United States Patent Application Publication US 2004/0029129 A1 - sequence listing, part 18

SEQ ID NO: 49424 - protein, 261 aa, Burkholderia fungorum
MSTSASLPNRKPAGTSSSLVVRNLKKRYGSRTVVKDVSLDVKSGEVVGLLGPNGAGKTTSFYMIVGLVPLDAGEIDLDGKSISLLPIHKRASLGLSYLPQEASVFRKLSVEENIRAVLELQHEDNGKRLSKDTITSRTEALLDELQIAHLRANPALSLSGGERRRVEIARALATNPSFILLDEPFAGVDPIAVLEIQKIVKFLKQRNIGVLITDHNVRETLGICDHAYIISDGSVLAAGAPAEIIENESVRRVYLGEHFRM

SEQ ID NO: 49425 - protein, 338 aa, Burkholderia fungorum
MRRDRGSVRAAGVRLTAANGACATNLPKHVASNHAHRTNHALKKGVTQVMSTDHSFILKLSCADRPGIVHAVSGFLFERGSNILDSAQFGDSRTGEFFMRVHFQQVGGDPGLEALRASFATLAEQFGMRWELHDASVKPRVVIMVSKIGHCLNDLLFRYRTGQLGIEIAAIISNHKEFYQLAASYDIPFHHFPLMGATPEAKAAQEARVLEVIDEHQADLVVLARYMQILSPKLCEALAGRAINIHHSFLPSFKGAKPYYQAFDRGVKLIGATAHYVTTDLDEGPIIEQEVERVDHSMTPEQLTAIGRDVECVTLARAVKWHVEHRVVLNGSKTVVFR

SEQ ID NO: 49426 - protein, 957 aa, Burkholderia fungorum
MEQIRIRGARTHNLKNVNLDLPRHKLVVITGLSGSGKSSLAFDTLYAEGQRRYVESLSAYARQFLQLMEKPDVDLIEGLSPAISIEQKATSHNPRSTVGTVTEIHDYLRLLFARVGTPYCPDHEIPLEAQSVSQMVDAALALPDETKLMILAPVVANRKGEHVELFEEMQAQGFIRFRVRSGGGTANEGVAKIYEVDSLPKLKKNDKHTIDVVVDRLKVRPDMKQRLAESFETALRLADGRAIALEMDTDKEHLFSSKFACPICSYSLQELEPRLFSFNNPMGACPECDGLGQITFFDPKRVVAHPSLSLAAGAVKGWDRRNQFYFQMLQSLAAFYEFDIDTAVEDLPEKVRKILLFGSGKQEIPFSYINERGRTSVREHVFEGIIPNLERRYRETDSVAVREELAKYQNNQPCPACAGTRLRREARFVRIGTDSDARGIFEISGWPLRDALGYFQTLRLEGSKREIADKVVKEIVARLMFLNNVGLDYLSLERSAETLSGGEAQRIRLASQIGSGLTGVMYVLDEPSIGLHQRDNDRLIATLKHLRDLGNSVIVVEHDEDMIRMADYVVDMGPGAGEHGGMVIAEGTPKQVQANAASMTGQYMSGARNIEFPDERKAPDERRLRIVEAYGNNLKHVSLDLPVGLLTCVTGVSGSGKSTLINDTLYHAVAHHLYGSATEPAPYESIEGLEHFDKVINVDQSPIGRTPRSNPATYTGLFTPIRELFAGVPAAKERGYEAGRFSFNVKGGRCESCQGDGVLKVEMHFLPDVYVPCDVCHGKRYNRETLDVQYKGRNISEVLDMTVENAYEFFKPVPVVARKLKTLLDVGLGYIRLGQSATTLSGGEAQRVKLSLELSKRDTGRTLYILDEPTTGLHFHDIALLLEVIHRLRDQGNTVVIIEHNLDVIKTADWVIDLGPEGGAGGGQIVAQGTPEQVAKSKASFTGKYLAPLLKRAASKK

SEQ ID NO: 49427 - protein, 177 aa, Burkholderia fungorum
MASVNKVILVGNLGADPEVRYLPSGDAVANIRLATTDRYKDKASGEMKEATEWHRVSFFGRLAEIVSEYLKKGSSVYLEGRIRTRKWQAQDGTDRYSTEIVAEQMQMLGGRGGSMGGGGDEGGYSRGEPSERSGGGGRAASGGGSRGGSGGGAGGGASRPSAPAGGGFDEMDDDIPF

SEQ ID NO: 49428 - protein, 246 aa, Burkholderia fungorum
MPGFRTPGEQPLYEIVRARILERLRTGQWTAGDKIPAEPQLAEEFGVGIGTIRRAVEELVAERLLIRRAGRGTIVAKFADEHAFDQYFSFVDTTGELMKVTARLLRFGKERASPALASTLRLERGARLATADNLRLHDDVPVMLDRLWMPLDVFPDLDAGKFEARRGSIYGFYQEHFGISVVRVVEDLGGAAADEEAARALNIEVGAPVLRIERTAYTFKDQPVEFRVRLVDSSRCSYRNVRGLQD

SEQ ID NO: 49429 - protein, 229 aa, Burkholderia fungorum
MRDTAEVSTPIRAIIADDHPLVLLAIENLIGGYPNMQIVGRAADATELFTEVDRSSCDLVLMDLYMPGGADGSGLEVVRQFKTRYPGIALVVLTMETAAAELQKVISLGADALVSKRDRIDLIHVAVVTALARECYVGPAVRALIADATVTQRLDFVRQMLSRRELEVFTQYASGYGVTEIAARLGRSVKTISAQKCTAMRKLALHSDAELFRFAVEYGVIPEERVQNL

SEQ ID NO: 49430 - protein, 247 aa, Burkholderia fungorum
MPRPTSSLELLRSVTLSGLVQEEILRRIKTGELEAGMKLNEMDLAEHLKISRSPVREAFRALEEAGLVWLEKNRGVYIREISDAEAAELYEVRAGLDELAGRRLASRITDTQLQDLHAMLDQLEASSIHGELNNYFTLNIAFHDRLMELSGNATMLGLYRQVVNRMHLLRRRGFSIAGSSQASHTEHRLILDALARRDPEAVAQAMRQHVQAGFQRAIAAHNADDTASAAEVPAGEAAQTTLADGSR

SEQ ID NO: 49431 - protein, 259 aa, Burkholderia fungorum
MSGRKVERVEVRTPALRWPIPADLAKTLRGRVVRKVERRGKYLLFEIDAGWFIVHLGMTGTLRVLRHVPHPPAAAKHDHVDWIFDEFILRYRDPRRFGAVLWHPREAGDVLEHPLLAGLGVEPFSPAFSGALMHRLTRGRKVSVKQALLAGEIVVGVGNIYASESLFRAGIRPATAAGRVSLVRYDLLADAVRVTLAAAIEKGGSTLRDFVGSNGESGYFQLDYFVYDRAGLPCRVCGTPIKQIVQGQRSTYFCPTCQR

SEQ ID NO: 49432 - protein, 312 aa, Burkholderia fungorum
MGTRCYDEIYGFDDSMRIILITGISGSGKSVALNALEDAGYYCVDNLPPRFLPQLASYLAEDGQDRLAVAIDARSSASLDEMPAMIRDLSRAHDVRVLFLNASTQSLIQRFSETRRRHPLSGSTSHDADVGLLNSLAEAIERERELVAGLAEFGHQIDTSNLRANVLRAWVKRFIEQKDSGLVLMFESFGFKRGVPLDADFVFDVRTLPNPYYDHELRPLTGLDKPVIDFLDALPVVHEMIDDIEKFLAKWLPHFRDDNRSYLTVAIGCTGGQHRSVFIAETLAARLAASANVIVRHRDAPVEAGESSKLVA

SEQ ID NO: 49433 - protein, 322 aa, Burkholderia fungorum
MDTSSINAQSIFDDNAATLKLSWLTGHEGWERGFSSESVANATSSADLVGHLNLIHPNRIQVLGDAEIDYYKRQTDEDRSRHMAELIALEPPFLVVAGGVPAPPELVLRCTRSSTPLFTTPMSAAAVIDSLRLYMSRILAPRATLHGVFLDILGMGVLLTGDSGLGKSELGLELISRGHGLVADDAVDFVRLGPDFVEGRCPPLLQNLLEVRGLGLLDIKTIFGETAVRRKMKLKLIVQLVRRPDGEFQRLPLESQTVDVLGLPISKVTIQVAAGRNLAVLVEAAVRNTILQLRGIDTLRDFMDRQRLAMQDPDSQFPGKLI

SEQ ID NO: 49434 - protein, 151 aa, Burkholderia fungorum
MNRLAKFLPLENVVVGLSVTSKKRVFEQAGLIFENQNGIARSTVTDNLFARERLGSTGLGEGVAIPHGRIKGLKQPLAAFVRLAEPIPFESPDGQPVSLLIFLLVPEQATQQHLEILSEIAQLLSDRETRERLHTEQDRETLHRLLTQWQP

SEQ ID NO: 49435 - protein, 288 aa, Burkholderia fungorum
MSDTQRPTPPFPKQQQNHTPGHTAEMQPQPDHGERSYRGSGRLAGKAAIVTGGDSGIGRAVAIAFAREGADVLISYLDEDDDARETARWIEEAGRKAVLLPGDITNPAHCKAIVERAIEAFGRLDVLVNNAAYQMSYPSLDAISDQEWDKTFDTNIGAMFRITRAAVKHMKPGAAIVNTTSINADHPNPGLIAYAATKGAIQNFTGGLAQLLAEKGIRANCVAPGPIWTPLIPSTMPPEKVEQFGAQVPMKRPGQPAELAAAYVMLASDEASYISGATIAVTGGSPII

SEQ ID NO: 49436 - protein, 456 aa, Burkholderia fungorum
MRIARHRLAFPDPPPPVLKTSRFFDLLRIPGFKPLAAATLMLGVAMSFTAPYLSLFGVERAGMTPFRLGVFMTLIAASGVLASTFAGRWSDASGRHRPLLLAALVAAALGYLCLCVVRDYRLLLVVGIVFIGAGGSAISMVFSFSRAALPVADPAERVFASATLRTILSAAWVFGPSVGALVLAASSFYGLFLFAAASFGACATIVWRMREPQGHLGDHTVEDTAAEPSASITVPPLTTPGEDAHEDLPGVASANDIGRAVAALTLLGLAANATMIVLPLYIVHGLNGTHLDVSVMLGLGALMEIPMMLALGAKSSALHKPNWLGACAAVHAVYFAGMALAGNVHVLIPMQMLNAFVVAVTSCLGMTYVQDLMPHAPGRATALFFNAARVGSILSGVLSGLLVQAFGYRGTFMFCGLLALCALVLFAVPGDRYPLMWQAVKRFARSRYGKLQAGRR

SEQ ID NO: 49437 - protein, 694 aa, Burkholderia fungorum
MQNDPALDQLCINTIRTLSMDAVQKANSGHPGTPMALAPVAYHLWQNHLRYDPDEPLWPDRDRFVLSVGHASMLLYSLLHLANVKAVDDDGNPTDGPAVSLDDIEHFRQMGSKTPGHPEYRMTTGVETTTGPLGQGLGNSVGMAMAARWYESHFNKPDAPLFDYRVYALCGDGDMMEGISHEAASLAGHLKLSNLIWIYDSNRVTIEGHTDLAYSDDVETRFRGYNWHTLHVSDANDAAALEAAFVEAKSITDRPTLIVVHSIIGWGAPHKQDTSAAHGEPLGVEEVALAKKAYGWPEDKFFYVPDGVHERFAAGIGARGKAAREEWQAKYDAYSRKYPELAREFAQIEAHELPAGWDSDIPTFDADPKGVASRESSGKVLNAIAARVPWMIGGAADLSPSTKTNLKFEGAGSFEYDNYGGCNLHFGIREHAMGAAVNGLALSNLRPFGSTFLIFSDYMKPPIRLSAIMEVPAIYVFTHDSIGVGEDGPTHQPIEQLASLRGVPGLTVLRPGDANEVAEAWRVALADPRRPSCIVVSRQPLPTLDRSRYAAAKGTQKGAYVLADAADGQKPQVILIATGSELSVCVDVYEKLTSEGIAARVVSMPSWDIFERQDEAYQDSVLPPDVDARVAVEQAASLGWDRYVGRLGAQVVMHTFGASAPLAELKKKFGFTPEHVYEAAKQQIARVQGKRSQE

SEQ ID NO: 49438 - protein, 587 aa, Burkholderia fungorum
MNAMHATRDMRDTRGFAFESTLSKVARVLTGQYGVTVAFSPDGPRVEPGRIVIPDYELNGGVERDVLIGYLDLLVARARHASLAQLDALPSGVAANLAQVIEDRRVCGQLLDEYPGARWFIGRLRLHAAERVRQRWPKLHWRDRLVWLVERALWDETPTSTEASHSLLAALHAAQDLLHDARASRSTAQSIASAQALVARVRALSAGEVNSMAFTADALDDIDTETAASSSAPLDDGDTVLPDQASANSPPSDRSGGAQADNAVGMGRSPADAQQPSERSEGNAAGFPADAWRARLSIPLATEFDDIRDLTGQGDSAAWRELRAQARADTAPLKEKLERALSADERTRWRREQERGEIDRTALAKLATSPGYRTPFRTQRAAKGRDVAVTLLIDRSGSMAGRKIELARQCAAALCDALTQLSFDCEVLGYCSVESPPMQQLYARQLAAGADLRRYNRFVERLDLKVYKRFGATDLSGIAAIDCGHENPDGEALAWAATRLADHPAERRILMMFSDGYPSTGDGDPQVLRSDLRERIAAIGKRGIELVGIGVLTDAVEDFYPHNVVVSRLAELPATVFSVLSAMLLAR

SEQ ID NO: 49439 - protein, 425 aa, Burkholderia fungorum
MRSASHPASMSSAPPADGAPHWQRNLYVCLFGSFTTIVAMTLLLPFLPLYVQQLGVHPAAAAVQWSGVAFGATFLAAALVSPLWGRMADRYGRKLILIRASLGMAVVMSLLGLAQNVWQLVGLRFLAGLVGGYASGATVMIATQTPRGRTGWALGTLASGVMAGSLVGPLVGGALPPLIGIRNTFFIAGAMIFCAFIATTLLVKEQPVDRTRGKSHEERAATGWATVPDLRPVLAMLFTSGLLMFANMSIEPIITVYVGQLVHDARHVTLVSGFVMSASALGSVLAASRVGRLADRIGAPKVIVACLSVCAVLLVPQAFVTSGLQLVVLRFLMGLALAGLLPCITSVIRHSVPDRSAGYILGYATSANYTGQVTGPLAGGFVGAHFGMQSVFLITSALMLCGALFNGWVFRGSGSGSGSGSARGG

SEQ ID NO: 49440 - protein, 499 aa, Burkholderia fungorum
MQDQYILALDQGTTSSRAMLFDRLGNIVSTAQKEFQQIYPRPGWVEHDPQEIWSTQAGVAAEAVTRAGMNGTSIAAIGITNQRETTIVWDRETGHPIYNAIVWQDRRTADFCDQLKEQGLEEKVRAKTGLPIDSYFSATKIRWILDNVEGAREKAKQGRLAFGTVDSWLVWNFTKGGLHITDVTNASRTMLFNIHSLKWDDELLEALDIPRSMLPEVRASSETYGPTKTTVFASKIPLAGIAGDQHAALFGQMCTESGMVKNTYGTGCFLVMNTGDKPIESKNNLVTTIAWQIGDQINYALEGSIFIGGAVVQWLRDGLGIIRNAAEIETLARSVPHCDGVYLVPAFAGLGAPHWNARARGTLFGVTRGTSSAHIARAALDSIAYQSVDVLKAMEADSGIRIGELRVDGGACANNLLMQFQADILGVDAVRPKVSETTALGAAYLAGLAVGYWKDVDELQSQWKLDRRFTPALPHAEVKACLDGWKRAIRAAKAWADTP

SEQ ID NO: 49441 - protein, 293 aa, Burkholderia fungorum
MSILINKDTKVITQGITGKTGQFHTRACREYANGREAYVAGVNPKRAGEDFEGIPIYASVAEAKAETGATVSVIYVPPAGAAAAIWEAVEADLDLAICITEGIPVRDMIELKARMRAENRKTLLLGPNCPGTITPDELKIGIMPGHIHRKGRIGVVSRSGTLTYEAVGQLTAIGLGQSSAVGIGGDPINGLKHIDVMKMFNDDPETDAVIMIGEIGGPDEANAAYWIKDNMKKPVVGFIAGVTAPPGKRMGHAGALISGGADTAEAKLEIMDACGITVTKNPSEMARLLKAML

SEQ ID NO: 49442 - protein, 206 aa, Burkholderia fungorum
MVMMKLIGSLGSPFVRKARIVLADKKIDYELVPENVWAPDTRIHTFNPLGKVPCLVMEDGEAVFDSRVICEYVDTLSPVGKLIPQSGRERVEVRCWEALADGVLDAAVLIRLEGTQRTPEQRVQAWVARQQRKIDEALIAMAQGLGSKTWCAGNHYTLADIAVGCALGYLDFRMPELNWREPHPNLDKHFQKLSLRQSFIDTVPVN

SEQ ID NO: 49443 - protein, 567 aa, Burkholderia fungorum
MADPMTSRSRRGASASAAQQTRGRTLPRWHYLVALAAGAANTLSFAPTPHGGWLELAIFAFFFAWLTRTTGWKSAALTGGAFGFGNFVTGVWWLYVSMHFYGGMAAPLAGAAVVLFSLYLAVYPALAAAVWSFCAGHARNGAADDDTPFSPTWHGALAFASAWAIGEWLRGTVFTGFPWLASGYAQVDGPFAGFAPVAGVYGVGWMLALVAALIVQALLPLLPSRQPGGSGGADRKGGKPGVSRVVVPGAIALALIAAGLLLPLVQWTVPANAPLTVRLLQGNVKQEMKFEESGMRAAIDQYQQMITSKPADLIVTPETAIPVLAQQLPAPFASAVRNFSDTTGSAILFGAIGGTITPEGQVIDYTNSLFGVTPGTRDVYRYDKHHLVPFGEFVPWGFRWFVNLMSIPLGDFYRGAPVQKPFIVHNQPVAVDICYEDIFGEEIARTIRESDTPAGVLVNSTNLAWFGDTIALDQHLQIARMRSLETGRPMLRATNTGMTAAIDADGKVLGRLTPYTVGSLDLAVQGTSGSTPYVTSGNNTVLAVSLLLLAFGFAFGPGIRRRQNGKQ

SEQ ID NO: 49444 - protein, 311 aa, Burkholderia fungorum
MLCNSAPSLAGRTTMNDTYPSRRHTDKPQEKRSLLERLTDFISPEPDSRAELLEILQDAHERNLIDADSLSMIEGVFQVSELSARDIMVPRAQMDAINIADNPAEFIPYVLEKAHSRYPVYEGNRDNIIGVLLAKDLLRYYAEEEFDVRGMLRPAVFIPESKRLNVLLHDFRVNRNHLAVVVDEYGGVAGLITIEDVLEQIVGDIEDEYDFDEESGNIIASPDGRFRVRALTEIEQFNEAFGTHYPDDEVDTIGGLVTHHFGRVPHRGEKVRLDDLIFEILRGDARQIHMLLVRRDPLAGQREREAQHVQT

SEQ ID NO: 49445 - protein, 206 aa, Burkholderia fungorum
MHVGERFNSITHLVGAVLSVAGLATLVTMGALDGDAYKVVSFSVYGAMLFVLYAISTLYHSVRSPRVKAVLQKCDHSAIYLLIAGSYTPFTLVTLRGPWGWSLFGVSWGLAALGIVQELTLGRRTRSVSMVLYVLMGWLALVAVRPLVQALPAAGTAWLVAGGVIYSAGIYFFINDERIRHGHGIWHLFVLAGSLCQFVSVARYVA

SEQ ID NO: 49446 - protein, 305 aa, Burkholderia fungorum
MADRDGKIWMDGKLIDWRDAKIHVLTHTLHYGMGVFEGVRAYKTADGGTAIFRLQEHTKRLLNSAKIFQMDVPFDHETLAAAQCEVVRENKLESCYLRPIIWVGSEKLGVSAKGNTIHVAIAAWPWGAYLGEDGIAKGIRVKTSSFTRHHVNVSMVRAKASGWYVNSILANQEAIADGYDEALLLDVDGYVSEGSGENFFLVNNGKLYTPDLASCLDGITRDTVITLARDAGIQVIEKRITRDEVYTCDEAFFTGTAAEVTPIRELDNRTIGSGARGPITEKLQSGFFDIVNGKSDKYAHWLTRI

SEQ ID NO: 49447 - protein, 382 aa, Burkholderia fungorum
MKITRLETFIVPPRWCFLKIETDEGIVGWGEPVVEGRAHTVAAAVEELSDYLIGKDPLLIEDHWQVMYRAGFYRGGPITMSAIAGVDQALWDIKGKHHGVPVHALLGGQVRDRIKVYSWIGGDRPSDVANNARAVVERGFKAVKMNGSEELQIIDTFDKVQGVINNVAAVREAVGPNIGIGVDFHGRVHKPMAKVLAKELDPYKLLFIEEPVLSENAEALRDIVNQTSTPIALGERLYSRWDFKHILSGGYVDIIQPDASHAGGITECRKIASMAEAYDVALALHCPLGPIALATCLQIDAVSYNAFIQEQSLGIHYNQGNDLLDYIRNPEVFRYEDGFVSIPQGPGLGIEVNEEKVREMAKIGHRWRNPVWRHEDGSVAEW

SEQ ID NO: 49448 - protein, 397 aa, Burkholderia fungorum
MNKVLRLSDLIAEGKLSGKRVFIRADLNVPQDDQGNITEDTRIRASVPAIKAALDAGAAVMVTSHLGRPTEGDFKPEDSLAPVAKRLAELLGREVPLVANWVENGVNVAPGSVVLLENCRVNKGEKKDSDELAQKMAKLCDIYVNDAFGTAHRAEATTHGIARYAPVACAGPLLAAELEALGKALGAPKRPLVAIVAGSKVSTKLTILKSLADKVDQLIVGGGIANTFMLAAGLKIGKSLAEADLVNEAKAIIDAAKARGASVPIPTDVVTAKEFSPTAKAEVKAVADVQDDDLILDIGPETAKVLAAQLEKAGTIVWNGPVGVFEFDQFGNGTKTLAEAIAKSSAFSIAGGGDTLAAIAKYGIHDKVSYISTGGGAFLEFLEGKKLPAVEVLESRA

SEQ ID NO: 49449 - protein, 630 aa, Burkholderia fungorum
MATRSPTAKSANARGGKPRNSAAASAGERAARSAATPAAGSAGEFASGPASQQHEESGSPLGLAELTTAGKAAKSSSADAVQTAPSPAELPDEEIALISPPAPPVLLSNTASPYKATLVSTGAQPPAASFGAQPPHPTRSALSSDLTQTRRLMHRATKIVATIGPASNTPEILLQMIQAGLDVVRLNFSHGTADDHRQRAGFVREAARQAGREVAIMADLQGPKIRVGKFENGKIMLVAGEPFVLDADCELGNEQRAGLDYKDLPRDLKPGDVLLLNDGLIVLNVSRVIGNEIHTVVKIGGELSNNKGINRQGGGLSAPALTAKDMEDIRTAMSLGVDYVAVSFPKNATDMEMARQLANIAGAPFGVKPKMIAKIERAEAIPALQGILDASDGIMVARGDLAVEVGNAAVPALQKRMIRMARESNKFVITATQMMESMIHAPVPTRAEVSDVANAVLDGTDAVMLSAESAAGKYPVQTIETMAAICIEAEKSEQSELDKDFLDRTFTRIDQSIAMGALFTAFHLGAKAIVALTESGSTALWMSRHWTHVPIFALTPRVGSERAMALYRNVTSLHLDTNTDRDTALQQALETVVSKGYASRGDMVVLTVGEPMGQAGGTNTLKIVRVGEPY

SEQ ID NO: 49450 - protein, 552 aa, Burkholderia fungorum
MATVGGQISHVPMTNEEKRVIFASSLGTVFEWYDFYLAGSLAAFISKSFFSGVNPTAGFIFTLLSFAAGFAVRPFGAIVFGRLGDLVGRKYTFLVTIVIMGLSTFLVGFLPGYAAIGIASPVIFIAMRMLQGLALGGEYGGAATYVAEHAPAGRRGFYTAWIQTTATLGLFLSLLVILGVRTVMGEDAFGAWGWRIPFVASIILLGVSVWIRLQLHESPVFERIKAEGKTSKAPLSEAFGQWKNLKVVILALIGLTAGQAVVWYTGQFYTLFFLTQTLKVDGSSANIMIAIALLIGTPFFLFFGSLSDRIGRKPIIMAGLLIAACTYFPLFKALAHYTNPALEAATAKAPIVVIANPDECSFQFNPVGTSKFTSSCDIAKSALSKAGLNYENVAAPAGTLAEIKVGDTVVNTYDGKAADAKDRGKTFDSTLATTLKTAGYPPKADPSQINWPMSVVILTILVIYVTMVYGPIAAMLVEMFPTRIRYTSMSLPYHIGNGWFGGFLPATAFAIVAAKGNIYSGLWYPIVIALITFVIGMLFVKETKDSDIYARD

SEQ ID NO: 49451 - protein, 237 aa, Burkholderia fungorum
MHPYIAEFIGTALVVLLGDGAVANVLLARTKGKGADLIVIVMGWAMAVFIAVYVTASFSGAHLNPVVTISLALAGKFAWTKVPGYVAAQMLGGMAGALLVWIAYRQHFAKEGDADVKLGVFCTAPAIRSVPHNLLTEMIATFVLILGVLYLASPQVGLGALDALPVGLLVLGIGISLGGPTGYAMSPARDLSPRLMHALLPIPGKRDSDWHYAWIPVCGPLLGGAAAACLYLYLHVH

SEQ ID NO: 49452 - protein, 358 aa, Burkholderia fungorum
MEESKKGSAGLTAEKSKALAAALAQIEKQFGKGSVMRLGAGEVIEDIQVVSTGSLGLDIALGVGGLPRGRVVEIYGPESSGKTTLTLQVIAEMQKIGGTAAFIDAEHALDIQYASKLGVNVNDLLVSQPDTGEQALEIADALVRSGSIDMIVIDSVAALVPKAEIEGEMGDSLPGLQARLMSQALRKLTGTIKRTNCLVIFINQIRMKIGVMFGNPETTTGGNALKFYASVRLDIRRIGSIKKNDEVIGNETRVKVVKNKVSPPFREAIFDILYGEGISRQGEIIDLGVQAKIVDKAGAWYSYSGERIGQGKDNAREFLRENPDIAREIENRIRESLGVNAMAEAATVASAEVADEEE

SEQ ID NO: 49453 - protein, 142 aa, Burkholderia fungorum
MKTFSAKAHEVTREWYVIDATDKVLGRVASEVAHRLRGKHKPEFTPHVDTGDFIIVINAGKLRVTGNKATDKKYYRHSGYPGGIYETTFGKMQERFPGRALEKAVKGMLPKGPLGYAMIKKLKVYAEATHPHSAQQPKALEI

SEQ ID NO: 49454 - protein, 130 aa, Burkholderia fungorum
MIGNWNYGTGRRKSAVARVFIKAGKGDIVVNGKPIADYFSRETSLMIVRQPLELTNHGVTFDIKVNVTGGGETGQAGAVRHGITRALMDYDATLKPELSKAGFVTRDAREVERKKVGFHKARRRKQFSKR

SEQ ID NO: 49455 - protein, 416 aa, Burkholderia fungorum
MSTEPTKPNAASAFPITDEVRHALAVTKRGVDELLIEDEFAQKLAKSAATGKPLRIKLGLDPTAPDIHIGHTVVLNKMRQLQDLGHTVIFLIGDFTSLIGDPSGRNATRPPLTREQIESNAKTYFEQAALVLDRDKTEIRYNSEWSMPLGADGMIKLASRYTVARILEREDFTRRFQSGVPISIHEFLYPLMQGYDSVALNADLELGGTDQKFNLLVGRELQKQYGQEQQCILTMPLLEGLDGVEKMSKSKNNYIGISEKPTDMFGKLMSISDVLMWRYFELLSFRPMEEIAGFKKETEAGRNPRDFKVMLGQEIVARFHSQADAERALEDFNHRAKGGVPDDIPAVTLAGAPLAIGQLLKQANLAPSTSEALRNIEQGGVKIDGATVSDKGLKVEAGEYVVQVGKRRFARVTLTA

SEQ ID NO: 49456 - protein, 223 aa, Burkholderia fungorum
MTTQILFIRHGETDWNRIKRIQGHVDIPLATTGLAQAQRLARRMAEEAKQGARLDAIYSSDLQRAQQTAQPVADALGLPLQLRENLRERSYGAFQGHDNDEIAQRFPDEYAHWQTRDPGFSPPDGESQRALYHRVLHAIEPLVAAHPGGRIACVAHGGVLDCVRRFACGLPLDAPRDYPLLNTSVNTVDFDNGKATIVTWADVSHLDAPSEDDSFKKAAEPGR

SEQ ID NO: 49457 - protein, 311 aa, Burkholderia fungorum
MAARRTASKDNPTNASLAATESGDLMHIDLRNKRVIVTGASRGIGRAIARAFAAEGARVAICARTAADLEAAGADLQSRGAGDVIARAVDVTDTAGVRQFVEDIAARWGGVDVLINNAGQGRGGNLETLTPEQILEHANVLQMGHFRFVQAVVPHMRQQRWGRIVEINALAGVVPTPDGIPSVVNRAACIAMSKSLGMSLAKDNILVNTLNMGWIDTGQWDRHYREMPAGCSREEFDQMVLKVVPLGRFGKPEDVAGMALFLASDYASFISAASIDIAGGMGGQIAYYPTLKRDFYEAVKARGAVPQPEAG

SEQ ID NO: 49458 - protein, 165 aa, Burkholderia fungorum
MAARALANGHSPVAAEETFGWSDRFLLGFAAMDETHREFVDRVAALKRASDAELPARLAEFAQHAVAHFAQEERWMTTTAFPAAQCHADEHAAVLRSVREVEQMLRDGAALTLARDLTQALIDWFPAHADYMDAALSHWMSKRTHGGLPVVLRRGVAGPARVSHF

SEQ ID NO: 49459 - protein, 420 aa, Burkholderia fungorum
MPRSRRSRLTAIDPGEFLGAWRIVLVAVLGLGVSASASLLYSFGALVIPLQHAFGWSRAELQPAISCLFAGTIVSTQAVASLNARFGMLRVTALSLVGMGLCYALMTQLGHSIGWLYLMCVLLPLAGAGATQVTWAHLIILWFSRNRGLALAAMLSGTGLAAMVYPSAVTWAISRWHWQGGFVLLALAPLAVLPLAMAWMRVPVPRPAAIAVAAPIRSEEGVCFRTAVLSTRFWTLNIALALVVAAVVAMISNTVPLLCDKGLSAAGASRIFGSFGVSLIVGRLIVGYLFDRLWAPGVAAVTLAIPAFGCVLLSSAAASQTGLLTLATMLVGVGAGAEFDIGAYLVSRYFGMRDYGRLFGVHVSLITAAAALAPWCSARLYASTGTYAAMVAACGAAFLCGALLLLPLGRYPKFDPVTLA

SEQ ID NO: 49460 - protein, 361 aa, Burkholderia fungorum
MLIDLHAHAPHPGYYNQHPHWGPFFERHEDGDVKLRVGDWILTLGSPERKALVRAGKGPTVEEYQARWADPKVRLAGMDAAGQNAQVVSVPSHCYMYWAEKEFSVPFATKVNDTFAEYCSAAPDRLMFWAHAALNAPEQAALELRRACTELGAKGLVAGGANFGGLEFDSPELDPVWKVLCDLDLPMFIHGYNQSVTWGKKANDDRYETTAIVGMQYDETRCFWNLVCGGVLDRFPGLKVYITHGGGYVPYQLGRLAQCNGNLDVAHNKKPVLEYLKNNFYFDVELHEVPMRQALIDIIGADRVLYGSNFGGSDAVRHDLTEGLRLSDDDLQKIRWKNACKLLHLDPAKIGEPAKKQAVSA

SEQ ID NO: 49461 - protein, 422 aa, Burkholderia fungorum
MSLSDSSRGAALDLTEFRTGWRTVLMAMLGLGVAANASLLYAFGSLVIPLHNAFGWSRGELQPAVSFLFGGAVIGAQLVGWLNARYGMRRVTVVSLLALSATYALMPLMGRSIVWLYLMCALLPVAGMGTMHITWTHLVNLWFERNRGLALAVMLSGTGLSAMLIPSAVTWVIGRWNWQAAFLLLAFLPVVLVLPLVLWWMQTPDEERASAAQHMTRATQRAGLVFREAVRSTRFWALNAGLSLVVAATVAMVSNTVPLLRDKGLSAADASHIFGSFGIALIGGRLIVGYLIDRLWAPAVAAAALAMPALGCLLLSTASAGQTGLLTMATLLTGVGAGAEFDIAAYLVARYFGMRDYGRLFGVHVALITLAGALSPWLFGYLYILTGSYTVMLSICGTAYLLGALILLPLGRYPKFDSLNLA

SEQ ID NO: 49462 - protein, 364 aa, Burkholderia fungorum
MLIDLHAHAPHPGYYNQHPHWGPFFEEDDRGHIRMRVGHWVLTLGQPERKAAEAAGTAPRLDEWMSAWADPSTRIKAMNAAGQDAQVVSLPSHAYMYWTDPEFSVRFARKVNDTLAEYCSAYPDRLFFWAHAPLNAPVEAAREIRRAVTTLGAKGLVAGGANFGGLEFYDEAMHPVFETLCELDVPMFVHGYNQSVTWGEKANEDRFETTAIVGMNYDEARCFWYLVCGGVLDRFPDLKVYLTHAGGFVPYQIGRLAMTNPNLEDALNKRPVEEYLKNFWFDPELHELSMRQSLVDIVGANHLVYGTNFGGSDAIRSDMTEGLRLSQEDLDRIRYRNACDLLHLAPASIGRCPGQNETTAGIRS

SEQ ID NO: 49463 - protein, 601 aa, Burkholderia fungorum
MFTCHRSGPEAIRVRRAPPMKKPGISGSQGDKEMNGMTSRARLKRNRVSVGVAAALGCWAASASAMPLGAIPDWDINWDNTISYNIGMRAQGINPNIGNNPTFSESDYKFAHAGDIVTNRVSDLSEFDAVFQNKFGFRVSASFWKDFAYGGGVSNNPGMAYPGTPYSTLNSYANNRYSSYTERYYQQGAELLDAFVFYNFNLGSAPSSIKVGRLTQYWGNALFFSGIAYGQNAIDGIKGAAVPGTQLKELTVPRAQVLFQTNITPTVSLAAQYFAEYKPSMFPQGGTYLGTAGFLFQGPNLLDGQIPQGAPVQPTNGFHSDYGLKATWSPTWLNGTMGFYYRNLTETNPWVLLGVNPATGATNYHLGYASDVKLYGFSLDKQIGPYSTGLDVSYRHNTALNSSTGPLPGDLSGQAGARGDVLNVIGNVMAGLTRTPLWDTGSAVVELGYTQKLKTTSNGALYNGVGNSLACPGGNKWDGCSTNSAVAIAVQFDPQWLQVYPGIDLDMPIFLEYGIWGNQATVEPSPGQGTLQYTIGVHALIQNKYNVTLQYNGYHAHAGGQTNFGLANGLPGGGPSYYAGGNSTYFYNDRGWVSLTFSAAF

SEQ ID NO: 49464 - protein, 275 aa, Burkholderia fungorum
MMSNEKAGGKLENKVAIVTGAGAGLGAACARALAQHGARVAVVDINGEAAAAVAADIGERAMSVRTDVSSEAQVKAMVSAVLEHFGRIDILHNNAAVLDDAQRAGDRDVINMSVEVWDRAMAVNLRGAMLCCKHAIPAMLRGGGGSIIHSSSGFGAQGDFTMSAYAASKAGLAMLSKSVAAQYGKERIRSNTIQIGLVVADHPLPEDIKGVILDGHLTPYLGDPKHVADVVCFLASDEAAFITGDTLAVDGGFSSHAPTLAPLRALFAARGKAAY

SEQ ID NO: 49465 - protein, 203 aa, Burkholderia fungorum
MRSLSPLSSGHPTAPSMTKSRLIEITPATHGVDIDLVYATGRNLTGKPIYKEAHCLLLEPAEAGLRNAIGIARDAGLRLRIFDAYRPPQAQQVLWDFLPDSTYVAEPERGSNHSRGTAIDLTLLDAGGHELDMGTGFDAMTIESEHFHPGLPVHVQRNRLLLLGIMHAAGFAHIKNEWWHYELPGSRALPLIDDSESGTLRLM

SEQ ID NO: 49466 - protein, 535 aa, Burkholderia fungorum
MKLVLRNVLAAAALASALTCSFTAADPAAAATPKDMFVMATFLDEFTTLDPGEVYELVPEEYVANTYDRLVRVDLKDPSKFNGDVAQSWTVSPDGLTFTFKLRAGLKFHSGNPLSADDVAWSIQRTVLLDKGAAAVLQGIGLTRDNVLANVKKVDDTTVSVTTDRKYAPTFVLNVLGAWPASVVDKQLLLAHQKGNDFGNDWLRTNEAGSGAYKLVKWTANDSLVLQRFDGYRLPLAMKRIVLRHVPEASSQRLLIENGDVDVARNLSPDDLAALTKSGKAHVTAVPQATLLYLGLNVRNPNLAKPEVQEAMKWLIDYNGIQSNVAKTTYKVHQTFLPEGFLGVLNTNPYQQDVAKAKALLAKAGLPNGFSVTMDVRNGYPYSEIAEAVQADLAQGGIKVQIIPGDNKQTLAKYRSRSHDIYIGEWSADYIDPHSNAQGFAWNPDNSDKSAYKMLAWRNSWDIPDLTKETNAALAESSTAKRAELYQTMQKQMLANSPFVILFQQVSQVAARPGVTGLEVGPINDLVSYRDLKKQ

SEQ ID NO: 49467 - protein, 186 aa, Burkholderia fungorum
MVTVGTSSGFATHLSDLDRSTRSAIVLEAIGRIEVSKAVRGTSIADARQLRLDLLSQQSARSDPMDSSFNYAEAFRSLDLAAVKKDLAALMTDSQDWWLADFGHYGPLFIRMAWHSAGTYRIGDGRGGDGRGGAGRGQQRFAPLNSWPDNVSLDKGRRLLWPIRQKYGQKISWAGPSGRPPCALTE

SEQ ID NO: 49468 - protein, 252 aa, Burkholderia fungorum
MMTMNAWLEPRYVAWIWRGFAMTLALSASVAVCATLLGFALALARSAPSAALRRAAAGYVLIFRNSPLLVQLLFWYFGAAVLLPDGLMNWLNTPHVVVLGPVTLSWPTFEFVAGWLGLTCYSTTFIGEEFRAGMRGVRDGQYQAAAALGLTRFATFRHVILPQAVRIATPPLAGQYMNVIKNSSLTMAIGFAELSYSSRQVETETLKTFQSFGMATLLYIAAIATIEVALLIWQRRGAYGSGGVRFPRGGRS

SEQ ID NO: 49469 - protein, 331 aa, Burkholderia fungorum
MTRRAFTRAMLAAALTITGTQGHAQASRTAGSPVALRIGYQKSSTLITLLKARGSLEQALAPLGVNVSWHEFASGLPLTEALNVDAVDFSADVADTVPVFAQAAHANFVYIAQEAPSPGAQAIIVRKDGPLHTLADLKGKHIAVTKAAGSHYLLLAALAKAGLSPADVTIHYLAPADGRAAFEHGSVDAWITWDPYVASVDRDTSVRILADGNGLASYQRYYLASSNFAAAHPAVIQILFDQLSQAGTWLRTHPEDAAKTLSPIWGLDTTTIERANARRSYVVRPVVPQNFSEQQKIADTFLQAGLLPARVDTGEAQRWDFATKRAEPAGS

SEQ ID NO: 49470 - protein, 283 aa, Burkholderia fungorum
MLDLELLNTLICVVDEGSFTRAGERVHRTQSTVSQQVRKLEELVGRTLLLRDRTGNQVTATEHGELLAQYARRLLALAQEAQDALVSDVELTPVRIGVPEDFDARRMSAMLSGFVKAKPGVRLETVAGMSVDLQRKLAAGEIEIALVKREPGSGECLASWPESLVWVRGGNVELPEESADEPIPLALFPHGCVYRQRAIRSLDKALRRWRIAFGSQSLTGIQAAVSSGLGVSVLPTSAVLPEHRLCAGLPQLPPTELALVTSGGVLNALQLALVEFLRAEIKV

SEQ ID NO: 49471 - protein, 704 aa, Burkholderia fungorum
MTTLAARKRLRRNAPSVDSDSYRAPVESRVTTIGAALSALIVVVAMLRLAPGVRTWLAAPARSDAAQLAGILLFDLSVPRILAALVAGACLAVAGTLFQSLTRNPLASPDLLGITGGAQLGLLAAMLVPSLAGVASVPLLFACGLGAAACVAAAAGGWRATPLRLILAGSVCMLLFSALTTLILAFFEQSIVGVSLWASGSLYQPGAAGLKTAASWLVLPLVALPFVIRPLDPLALGDDAAAAAGVRVDATRLAAMVVAVGFASVAVSVAGPLSYVGLIAPNLLRQMRGAKASRLAALVPLSALVGGALVLVTDSAVQALDLDATLSTGVAIAFVGTPLMLAMIRSGAAWSGALHAGQERAAARAGSRFVRMVGAWPWPLTASALVLLGIVIVCAGASFGPTTIGVQRWLAAFDHRDELAGMLLDLRLPRLICALLAGALLAASGVLMQSIVRNPLAGPEVLGVTQGAGLATLAALVMWPLAAHSTLAAASLAGGGITLALTLLLNRRHRYAPLAVALTGIVIGTLWTTLSQWLITQQSVQPARFVVWLVGGTYGRSWGEVATLLPWCVLAVPVFALLARPLDLLALGDDQAASLGLPIGVLRPLVLTVATLAACAAVAAVGPVGFIGLMAPHLASMLGARAHRTRLWLAAACGALVLVVADIAARTLLAPREIPAGVLTALIGAPYLLALLIVEARREKRGKR

SEQ ID NO: 49472 - protein, 1119 aa, Burkholderia fungorum
MRQNIINSNTYWDQRFRQDWESNGGREQSRFFAEVAIGAMPQWLANEIKWNKLTVCDWGCAQGDGTETLAQFLSWDITGVDFSRSAIEAAQQRYGRIRFLQENLLDKPMRPRFDVLFSSNTLEHFANPWEVFEQVAEYAARFVVLLLPYREVARHAEHEVSFDSRNIPVAPNPAWSLVYHSVVDTRRWEPSFWPGEQILLVFARTGWLAQRRFSLADLTLYQMRQPGSATTVDTPQNSPGSEAYTQHVNERLHAVLSTKEARHARELEIACDELMREKARADELDIQLNGERIRGAAADQRAEAAEHQATARQEQLAELQLRMSAQQTQLDAARDQAKLVVALQDAVDHERENGRQLEEEKARVVATAQQVEERLHFLQYRERALTTEIQTLLATRSWRLTAPLRVLRGSPNWMKNRLRDVNYAYVHGGVRHVVGRCAGYFFKHFKSPVRLPAFSGVPPTVSSGVAEITPVSIAADLPPQFHRPAAERALADVFVFSIIDWHFRIQRPQHLAREFARAGHRVYFFSNHFVDAKEPGFSVEHLDPSLPLYQIKLKVSGAPAIYFSVPGQQAIEQILEGLRLFREWNGGGRSYALVQHGYWMPVATRLQADCVTYDCMDHHEGFGNVPRELLEMEEAMMKRADLLVATSSWLEGHARRYNPRVEVIRNAGQYEDFCHPPGECFADPQGRRVIGYYGAIAEWFDVELVARVAEAFPDALVLLVGADTAGVGTKLRSFANVEMTGEVPYARLPYYLYGFDICMLPFRVMPLTLATNPVKVYEYLGAGRSVVSVDLPEMTQFGDLVRVAGTPEAFLEQIRSAIEALPDSEEETSRRKAFAAGQTWGHRVASFRSAIEALPRAKVSVIVLTYNNLALTKDCLESLEQHSNGVDLEIVVVDNASTDGSGEYLSSWAASRPAAKVILNAENLGFAGGNNAGLAAATGDYLVILNNDTVVTRDWARRMVNHFRNHPRLGILGPLTNNIGNEAKVQTHYTNLESMHSEAALLTGPNLGALFELDTVAFFCAMLPRSTYELCGSLCEDYGRGFFEDDDYCRRVQAAGLVVACAEDVFVHHHLSASFNKLGEERKRALLETNRAIYEAKWGPWRPHQYRSQRARRNWRTFA

SEQ ID NO: 49473 - protein, 174 aa, Burkholderia fungorum
MRTTPALSLRPATLADAALIASIHSSSWQATYRGLLPDAFLDGEVARERAAYWEARLSAPGGERRIVLIAELAGEPAGFVCAERQPESAWGVLLDNLHARPAYQGLGVGKLLMQAAEDWARAQGELQLYLYVLEGNTPAIGFYERQGWQFVGAEPDHMGGVDITALRYVYRLDR

SEQ ID NO: 49474 - protein, 439 aa, Burkholderia fungorum
MSTTLPAAALADNRNARSRARKAALGSFIGAVVDWYDFLLYGIVAALVFNAEFFPKVSPAMGTLAAFATFGVGFLFRPLGGFVFGHFGDRLGRKRMLVLTVMMMGLSTAAIGLLPSFATIGWLAPVLLVTLRAIQGFAVGGEWGGAALMAVESAPEKKKAFYSSGVQVGYGVGLVLSTGLIALISRSMDNASFLSWGWRLPFLFSVVLVLIALWIRSSMEESKEFVEKVGEHGEHSVRLPIVEALLRHPKAFLLIIALRLAELFTMYIVTAFALNYSTANLHMPREFFLTIGLLVGALSCVTIPCFAALADRFGRRRVYIVGALVGMLSAVPFFLALEARSTVWIVVFAVMLANIAHDMVVSVQQPMFTELFGTEYRYSGAGVGYQVASVVGGGFTPFIAVALVNFAGGSWHPVAAYLAVGCLISVLVAARMKTGRTIA

SEQ ID NO: 49475 - protein, 38 aa, Burkholderia fungorum; identical to SEQ ID NO: 48043

SEQ ID NO: 49476 - protein, 65 aa, Burkholderia fungorum
MMKASELHQKDQAALNKELSDLLKAQFGLRMQLATQQLTNTSQLKKVRRDIARVRTVLTEKANQK

SEQ ID NO: 49477 - protein, 45 aa, Burkholderia fungorum
MNDSVKTSLKRTLVGKVVSNKMDKTVTVLVEHRVKHPIYGKYVVR

SEQ ID NO: 49478 - protein, 104 aa, Burkholderia fungorum
MSEIRKNDHRLMQVLLAPVISEKATLVADKNEQVVFEVAPDATKQEVKAAVELLFKVEVNSVNVLVSKGKAKRFGRFMGKRKDVKKAYVCLKPGQEINFEAEAK

SEQ ID NO: 49479 - protein, 334 aa, Burkholderia fungorum
MVVGDVMLDWYWHGSTSRISPEAPVPVVHVQSEETRVGGAGNVALNAAALGAQVRLLGLAGEDVHADRIENLLREGGVECFLQRVAGSKTITKLRILSRHQQMIRADFEDHFPARNGDELIFSFERHLQEVDAVVLSDYAKGSLHDSKNLIAAARRAGKHVIVDPKGADFERYRGATVITPNLSEFEAVVGHCDTELAIEQKGAALCDAFELEAVLVTRSEKGMTLIARGHAPLHLPTRAREVFDVTGAGDTVVATLSAALGAGMPLDEAVVLSNVAAGIVVAKLGTATVRRPELQQALQHDLHTARRSNIFARVSLLPWRAKPRSEKTSTVGT

SEQ ID NO: 49480 - protein, 108 aa, Burkholderia fungorum
MWVWVLVLVLVLVLGSEWELVPELGSELVSDSDSDSDSDSDSDSDSDSDSDSAPDLDSELDSALQPDSTWLSLPGLKPARASGSERGVASASDFALAQNPMSAYPMPV

SEQ ID NO: 49481 - protein, 178 aa, Burkholderia fungorum
MAEVQSINSSVANASGTNGRRDVQQADAGGQEFLVFTLGAEEYGIDILKVQEIRGYDNVTRIANAPEFIKGVINLRGIIVPIVDMRIKFHLGRVEYDHQTVVIILNVAHRVVGMVVDGVSDVLTLATDQIMPAPEFGATLTTEYLTGLGTVDGRMLILMDIEKLMTSREMALIETLGV

SEQ ID NO: 49482 - protein, 63 aa, Burkholderia fungorum
MDTMSDKTVKVQLVKSLIGTRETHRATVRGLGLRRLNSVSELQDTPAVRGMINKVSYLVKVIS

SEQ ID NO: 49483 - protein, 149 aa, Burkholderia fungorum
MNKPAPASRTAYPHFLPITTRWMDNDVYGHVNNVVYYSYFDTVVNEYLIRTGVLDFEHGTTIGLVVETHCNYFAPLVFPERIEAGLRVVRLGTSSVRYEVGLFKEGEDQPAAQGHFVHVYVDRVTRRPVSLPTELRAALEPLSTARQAE

SEQ ID NO: 49484 - protein, 288 aa, Burkholderia fungorum
MTKSQGAALAAHSLTVGYRDHVVLHGLNLNIAAGRVTALCGPNGCGKSTLLRTLAGLQPALSGTVEVNGVPLASLRRRVLARTLTMLAQFNQIPSGLSVRELVAYGRYAHGGWLRGLSRADHAAIDEALATSGLAADAARDVAALSGGERQRAWIAMALAQQAPIVLLDEPTTYLDIHHQLDILRELRRLNRERGLTIVWVLHDLNQAAAYSDDIVLMRAGRIVAQGSPDAMLDPRHLNETFGVPMLKIAHPQTGAPMCVPAYEGGAVDLDTAAASLHEEATSKDLAA

SEQ ID NO: 49485 - protein, 400 aa, Burkholderia fungorum
MFPDRIFSGMRPTGSLHLGHYHGVLKNWVRLQSEYPCFFCVVDWHALTTHYETPEVIEKNVWDVLTDWLASGIDPAQATLFIQSKVPEHAELALLLGMSTPLGWLERVPTYKEQQEKLKDKDLSTYGFLGYPVLMAADILLYRGSLVPVGEDQVPHVEMTREIARRFNYLYGREPGFEEKANEAAKKLGGKRSKLYHELRNAYQQEGDDEALEQARAMLQESQSLSMNDRERLFGYLEGSRKIILVEPQAMLTEASRMPGLDGQKMSKSYGNTIGLREDAETITKKVRTMPTDPARVRRTDPGDPDKCPVWQLHQVYTDEATHDWVQKGCRTAGIGCLECKQPVIEGILREQQPMLERAQKYMDDPSLLRAIVADGCDKARKFASETMRDVREAMGLSYN

SEQ ID NO: 49486 - protein, 273 aa, Burkholderia fungorum
MYKVIATDLDGTLLNADHQVDPFTVATVRKLESDGLHFVIATGRHYCDVAGIRDVLGISPYLITSNGARIHAPDNTVIHADDLPPAIVQRLVQPEIAGAHGRVIVNLFADQAWLIDRDAPDLLKFHQDSGFTYEVTDLPKHDGADIAKALYIGEPADLAQVAANLARQFGDALYVTYSLPDCLEVMTANVSKGRALQIVLERVGVDASHCVAFGDNMNDIDLLETAGHPFMMNNANPDLMTRLPNVPRIGNNFEAGVAHHLRKLFSLDDELMS

SEQ ID NO: 49487 - protein, 397 aa, Burkholderia fungorum
MRATRKRRGATAVQSQQVSGYPDRLVFCLSEKSDMTKTNSLHARTGRARKLLPALVAAAAFGATAMQAHAADAVVLYTADGLENLYKDVLPAFEKKEGVKVNIVTAGSGEVVNRATIEKDQPKADVLVTLPPFIQQADQSGLLQAYQSANYKNVPAIAKAPNGAWATFVNNYFSFAINPEVTKTQPKTFADLLHPDFSGKIAYSNPATAGDGMAVIILTSSLMGEDKAFDYLKKLENSAKFHTKGTGYLDVLLSRNEIAVANGDLQMDLDDAANGGLSLKPVFLAAAPGGQPTTFQLPYAIGLIKNGPNQAEGKKLIDYLMSTEVQAKVPDIFGIPGRTDVPLAGKNGEAVKQAIAGVKLIPVDWNQVMAKKADWTARWKNDVIGSSGKQIEVVKPK

SEQ ID NO: 49488 - protein, 265 aa, Burkholderia fungorum
MHVQACHDGASTHIDVAKFVKMTEYMQTASVDPIEVVRRHSLTTLVRDEIERHIIEGALAPGDKLNEADWATRLQVSRGPVREAFRALEQAGLVRTEKNRGVFVRTVSLAEADEIYAVRAVLEEAACRMLAASIDARKLAVLRDWLDAMRAALDARDHDAYARANVAFHDALVAASGNLKLYETYRRLVCELSLFRRAALVVHADAMERSLAEHRAILTALASRDAGRAAALMHAHVNGGLQRAHAACEPAGPLGMVRMPPASNG

SEQ ID NO: 49489 - protein, 70 aa, Burkholderia fungorum
MIGGFNQLQGIMRTVYNQYDSMVRPLHKWLDQHGVRFELNTRVTDLGFCEMDAANAWNASNTSGRDAPEK

SEQ ID NO: 49490 - protein, 133 aa, Burkholderia fungorum
MGRSALGAVAMAMHGIVLFGHGARDVRWREPFERLAVKLREASAGARPVALAFLELMEPDLPTALGELVAQGCDVVTVVPVFFGQGGHVRKDLPLVIEQCQALHPSVLIKCAVAVGEDEAVLDAVAQYCLRQV

SEQ ID NO: 49491 - protein, 701 aa, Burkholderia fungorum
MPRKTPIERYRNIGISAHIDAGKTTTTERILFYTGVTHKIGEVHDGAATMDWMEQEQERGITITSAATTAFWKGMAGNYPEHRINIIDTPGHVDFTIEVERSMRVLDGACMVYDSVGGVQPQSETVWRQANKYKVPRIAFVNKMDRVGADFFRVQRQIGDRLKGVAVPIQIPVGAEEHFQGVVDLVKMKAIFWDEENQGIKFEYRDIPPELAATAKEWHDKMVEAAAEANEELLDKYLGGETLTEEEIKHGIRVRTIANEIVPMLCGSAFKNKGVQAMLDAVIDYLPSPLDVPAITGHDEHDNEIERHPNDNDPFSALAFKIMTDPFVGQLIFFRVYSGVVNSGDTVYNAIKEKKERLGRILQMHANERKEIKEVYAGDIAAAVGLKEATTGDTLCDPNHVIILEKMIFPEPVISQAVEPKTKVDQEKMGIALNRLAQEDPSFRVQTDEESGQTIISGMGELHLEILVDRMKREFGVEATVGKPQVAYRETVRNKVEDVEGKFVKQSGGRGQYGHAVITLEPAPQGKGYEFVDAIKGGVIPREYIPAVDKGIQETLKAGVLAGYPVVDVKVTLTFGSYHDVDSNENAFRMAGSMAFKEAMRKARPVLLEPMMAVEVETPEDFMGNVMGDLSSRRGLVQGMEDIAGGGGKLVRAEVPLAEMFGYSTSLRSATQGRATYTMEFKHYAETPNNVAEAVINAKHK

SEQ ID NO: 49492 - protein, 283 aa, Burkholderia fungorum
MAASEGTRAMDPSEYIAHHLQNFSTAHQTSIFDIHVWNLDTLFWSIVCGLATIFILHLAARKATSGVPGRFQCAIEMLVEMVEDQSKSMIHGSRTFIAPLALTVFVWVALMNSLDFIPVDLPGHVIGWLGLSEVIPHHRIVPTADLNGTLGIALGVFALMIYYNFKIKGAGGFVHELLSAPFGAHPLLWIPNLALNIIEFVAKTVSLGMRLFGNMYAGELLFLLIALLGSIWSFGADTTVLGFIGHVIAGSVWAIFHILIVLLQAFIFMMLTLVYIGQAHDTH

SEQ ID NO: 49493 - protein, 474 aa, Burkholderia fungorum
MHAQPSRKDGAVPDEAADTLAPDTSTPDNTEQGLPVPHRYWAMLVIALALTLAVLDSAIANVALPTIARNLRASAAGSIWVVNAYQLAITISLLPLASLGDRIGYRRIYLGGLILFTLASLGCALSTSLSTLALARVIQGFGAAGIMSVNTALVRMIYPRTQLGRGVAINAMVVAVSSAVGPTVASGVLAIASWPWLFAINVPIGIAAIVGGFKALPMNRGHESPYDYLSAVMNAFVFGLLIFAVDGLGHGERFGYVAIEVIAAVVIGYFFVRRQLTQPAPLLPVDLLRIPVFALSIGTSICSFCAQMLAFVSLPFLLQETLGFSQVDTGLLMTPWPAVIIVAAPIAGLLSDKVSSGWLGGIGLAAMTAGLILLATLGPHPDVMQITWRMALCGAGFGIFQSPNNRTILSAAPRERSGGASGMLGTARLTGQTLGAALVALIFGIAPLHGPTIVLYVAACFSAVAAVISTLRVM

SEQ ID NO: 49494 - protein, 308 aa, Burkholderia fungorum
MESHPLRYSLRQLRYFVITAEALSFTAAAKRLHISQPSISTALADLEVSFGVQLFIRHHASGLSLTQAGRDLLGQARNLLKIAEELQMAAKEMDGGMTGAIALGCLVSLAPPLMPRLISRFTAEHAGISFRTVEAHQDGLLRGLHDGSLDIALTYSLDLTEDIAFTPLLSLPPYAILPRTHRLARARKVSLADLLPEPYVMLDLPHSREYFAALFDAVGNRPVPAFRSSQPEVVRGMVANGLGYSLLNFPLKSNRTVDGEEFVIKRFKDNVNATMLGIAQSRTMKPRQVVHRFASFCETYIRRLHLDD

SEQ ID NO: 49495 - protein, 91 aa, Burkholderia fungorum; identical to SEQ ID NO: 48065

SEQ ID NO: 49496 - protein, 163 aa, Burkholderia fungorum
HHNALWHAAEEEVFHSSILDLEVAGKSQQVLLRDVQYHPFRQLVLHVDFQRVDAKKKLHTKVPLHFLNQETNPAVKLSSAVISHVINEIEIECLPSALPEFLEVDLATIEAGHSVHAKDIKLPAGVTLVAHVEAENPVIAAATIPAGAIAEGEAAAAEGEGET

SEQ ID NO: 49497 - protein, 589 aa, Burkholderia fungorum
MNGGSFVNTGHVALTTGQVSFDDLQIAPGIFQRNVVLNTTGGAIVIGPQGLSSALVDLDLIAKTIQINGPVANTFTSATAITRAVAGTSAVTLNTGLSPSDNANDWLTLQTGQPLATANSFALDITAAGSVTSGRVEIIVTDKGPGVRSAGPLDASLGDFTLSSNGSVQISNTTVTANGNINFQVQDGISLTDTRVTSGTATLDASGAITLTGSSILTNGGATLSANGITLTPDSAQTGSTLASATAGVVLDSTADITNLGSLIQGQAATSGDAQSLGAVTLDASGNILNQSLPGTPLGILFGVKGDVVVSAGGNIVNQNARILSNENVTIAAGGDVDNIIDHTSGVDNGVASSYSSDGWSFLFLEHHSSGISVNYGELSDPTALSYITADAGNVTITGNNINNVGGSILSNDGAISITARNSLLDQGVFTGQAQFHESCFIFCHSSASSDVQLYGGDIEAGTSISLKAGTQILNTGGTVLAEGALTLNAPHVVAQGVLGYTAIDENHDLKAWFGSEWSAIYASDMGGLFDAGSGQVQIIGEGDIEGGAFSGPGGVSATGGIVTRSAPYRAPVTIGTHNSIGLISWFGL

SEQ ID NO: 49498 - protein, 412 aa, Burkholderia fungorum
MSGLPFSCSSVRTIMIITSLLDTDLYKFTMMQVVLHHFPAANVEYRFRCRTPNVDLVPYIGEIRDEVRKLCQLRFTDDELDYLRRMRFIKGDFIEFLALFHLNEKYISIGPSPKGNGEIDIEIKGPWLHTILFEIPMLAIVNEVYFRNTQQKPDYSEGRGRLVEKIKLLGARPEFADCKIADYGTRRRFSKQWHEEVILKLKEGLGEQFAGTSNVFYAMKHGLTPLGTMAHEYLQACQALGPRLRDSQIFGFEMWAKEYRGDLGIALSDVYGMEAFLRDFDMYFCKLFDGARHDSGDPFDWGERLLKHYEANRCDPRTKILVFSDALDIPKVLQLYERFRGRCKLAFGVGTNLTNDLGYNPLQIVIKMVRCNGQPVAKLSDSPGKNMCEDKAYLAYLRQVFGIAQPEEEAAK

SEQ ID NO: 49499 - protein, 577 aa, Burkholderia fungorum
MKLFRNARSSVSGFALVALVSVSSAFLESTPALAKPPAKTQPAVLTASAIAVADKYSADAAEQIFKEGGNAVDAAVAIAFTLAVTYPEAGNIGGGGFMTLYVDGKPYFLDYRERAPLAATRNMYLDDKGEVIKGMSLYGYRAVGVPGTVDGMWQAQRRFGKLKWKQVLAPAIHYARDGFEVSQQLQERRDAAAKDFAGKTNFDTYFGNLKQGVDFKQPDLAGVLQRISDQGAKDFYQGKTADLIAASMRGHGLITKADLQQYKAVWREPVEADWNGYRVYTAPPPTSGGIGLVQLLKMKADLAPDFKDVPLNSAQYVHLIAEIEKRVFADRAQYLGDPDFYKVPVAQLTDDAYIAKRAAEVNPTAPSDTKTVQAGLGTSMPEKAETTHFSVIDKWGNAVSNTYTINGYFGSGVVADRTGIVLNDEMDDFSAKPGVANMFGVVGSDANSIEPKKRPLSSMSPTILTKDGKVSLVIGTPGGSRIFTSIFQVINNIYDYNMPLPQAVAAMRFHHQLLPPDTIFWEPYKPIDGELAKQIEAKGYTLKGQDFSGDIQAIKVNGDTPEAAADPRGRGVTRVIQ

SEQ ID NO: 49500 - protein, 183 aa, Burkholderia fungorum
MVASLFTSFCTLRTVLRASLLTILDALGIQRATNHVVTHTRQVLDTTAANQHDRVFLQIVAFTTDVRNHFEAVRQTNLGNLTQCRVRLLRRRGVHTGAHAATLGAVLQSRALALRRFRRAAFANQLIDGWHCLFLKLNKIDASVSGQSRNDCASNFRTGSRRTNRLRAQAFQEPEPSIIFRNY

SEQ ID NO: 49501 - protein, 79 aa, Burkholderia fungorum; identical to SEQ ID NO: 47901

SEQ ID NO: 49502 - protein, 152 aa, Burkholderia fungorum
MRCSKEVFNMAKKIIGFIKLQIPAGKANPSPPVGPALGQRGLNIMEFCKAFNAQTQALEPGLPIPVVITAFADKSFTFVLKTPPATVLIKKAAKIDKGSSKPHTDKVGKITRAQAEDIAKTKMPDLTAADLDAAVRTIAGSARSMGITVEGV

SEQ ID NO: 49503 - protein, 201 aa, Burkholderia fungorum
MRISGGRNTPDWSDAVIERGTQGARCVYRIWRLTVPLNKESKQAVVAEVAAQVAKAQTVVLAEYRGIAVGDLTKLRAKAREQQVYLRVLKNTLARRAVEGTPFAPLAEQMTGPLIYGISEDAIAAAKVVNDFGKTNDKLIIKAGSYEGKVMDKAGVQALANIPSREELLSKLLYVMQAPVSGFARALAALAEKKQGEETAA

SEQ ID NO: 49504 - protein, 124 aa, Burkholderia fungorum
MAIAKEDILEAVSSMSVLELNELVKAFEEKFGVSAAAVAVAGPAGGGAAAAAEEQTEFTVNLTEVGANKVSVIKAVRELTGLGLKEAKDLVDGAPKPVKESVPKAAAEEAKKKLEEAGAKAEIK

SEQ ID NO: 49505 - protein, 185 aa, Burkholderia fungorum
MSDTPASPSGKRWYVVHAYSGMEKSVQRALQERIERAGMQDQFGQILVPTEEVVEVKGGHKSVTERRFFPGYVLVEMEMTDETWHLVKNTAKVTGFVGGARNRPSPISPREVEKIMSQMQEGVEKPRPKTLFEVGEMVRVKDGPFTDFNGSVEEVNYEKSRVRVSVTIFGRATPVELEFGQVEKL

SEQ ID NO: 49506 - protein, 707 aa, Burkholderia fungorum
MAGKTNTQKPAAKNAQASGPQSDPKAKDLEQFRVSPEGEALRTNQGVKISDNQNTLRAGPRGPSLLEDFIMREKITHFDHERIPERIVHARGSAAHGVFQVYESMQEYTKAAFLQDPAVQTPVYVRFSTVQGPRGSADTVRDVRGFAVKFYTQEGNYDLVGNNMPVFFIQDAIKFPDFVHAVKPEAPNEMPTGGSAHDTFWDFVSLVPESAHMVLWTMSDRAIPRSLRTMEGFGIHTFRFVNAQGKGRFVKFHWRPVLGSYSLLWDEAQKLAGKDPDFHRRDLWESIERGDFPEFELGVQIIEEADEHKFDFDLLDPTKLIPEEQVPVKIIGKMTLNRNPDNFFAETEQVAFHPGHVVPGIDFSNDPLLQGRLFSYTDTQISRLGGPNFHEIPINRPVCPFNNNQRDAMHRQTINVGQASYEPNSLSGGWPKETDPAPSDGGFETYQERVEGTKIRVRSESFADHFSQAALFYNSMSPPEKDHIAAAYQFELGKVTKPEIRARVVNEILANFDAGLAAQVAEGLGLPAPKKGTAKLTGPKESPALSLLNRVKPGIKTRKIALLAAPGSDGAAIKKLQQALQGEGATPMLIAPTLAAIDGMAPDATIAGLPSIMFDAVIVVGGDQGAKALAQSGDARHFVLEAFKHLKAIAAIGAGRDVLAAAHLPHNADGVATGDDKQAAEVLKAFIEAAGQHRVWSRAQQAETVPA

SEQ ID NO: 49507 - protein, 302 aa, Burkholderia fungorum
MAKIGFIGLGIMGAHMARNLIKGGHSLFVNGAYPVPEDLGKTTSVVANSTAVAQAADIVIIMVPDTPDVANVLFADDGVAAGLSPGKLVIDMSSISPLDTQAFAKKINALGVDYLDAPVSGGEVGAREASLTIMVGGPEKAFATARPLFDLMGRNISLIGENGAGQTCKVANQIIVALNIEAVAEALLFASRSGADPERVRKALMGGFASSRILEVHGERMTKRTFNPGFRIELHQKDLNLALDGARKLGISLPHTASAQQLFSVCAANGGKAWDHSAMVRALEIMANHEVAQAPGSEAKAA

SEQ ID NO: 49508 - protein, 1651 aa, Burkholderia fungorum
MSRRVEEIALKEPDRFVSDESPDGFDAPSFLAGGGELGALIRAYDWTQTALGPPENWPQGLKIAIRIMLTSRQPIWIGWRDELLYFYNDPYKSIIGGKHPAALGQPTKVVWREIWTDIEPLLNTALAGAEGIFVEQKLLIMERNGFPEETYYTFSYSPIPGDDGEPGGIICANSDGTAQVVGERQLALLKELAAVSPNGRDWRHACELSARALQANPQDLPFALLYAAEPGSDTVALVGACGIEPGHAAAPQTMKLDGEALWPVVDVFDTQAPRLVGDLTQRFGTALPSGPWHIPPQQAVILPVSPGSESTQTVVLVAGLNPCRLFDDAYRSFLNLAAGQIGAAIGYARAYEEERRRAEALAEIDRAKTTFFSNISHEFRTPLTLMLGPLEELLAKPQLAAGGDNARVGSDIEDRALIEITHRNGLRLLKLVNALLDFSRIEAGRMQIHMQPTDVASFTAELASLFQSAIEAAGLRLEVEIPAAPVVVQLDREMWEKVVMNLLSNAYKFTFFGTIRVAVRVVAGAGVEVSVTDSGIGIAEEEVPRLFERFHRVAGAPGRSVEGSGIGLAMVQELVKLHGGTVRVDSALGEGACFTVSLPHGAVPAQPDEESVHAAMSRHARTYVDAALRWSPENEIVADAPAETALAGAAPPIAAPVAAARLLVVDDNADLREYMSRILRAAGHEVRLATDGQAALEAARQERPDLVLSDVMMPRLDGFGLLRALRADPELRDTPVLMLSARAGEEARVDGIEHGADDYLTKPFSARELLARVSGNLQLARLRRETETKLREESRTLEILNRVGSTVAAELDLNRAVQIVTDAATELTGAAFGSFFYNVLDDKGGSYMLYTLSGVPKETFGQFPMPRNTAVFAPTFMGEGIVRVSDITQDPRYGHNAPHRGMPEGHLKVRSYLAAPVQSRSGEVVGGLFFGHPEPGVFTERAERIVAGVAAQAAIAIDNARLYQAAQTEIAERTKAQSALHDLNETLERRVIETVADRDRLWELSEDLLVVADIEGRLQRVSPSWSNALGHNTHWLMSRSYVDLVHPDDVEVVRAHLAELRRTGVPVRYENRFKRIDGTWRWVAWTLALDPDTARIHGVGRDVTADKETTEALRHAEEALRMAQKMEAIGKLTGGVAHDFNNLLQVIGGNLQLLAKDVAGSEKPEQRVRNALAGVARGANLASQLLAFGRRQPLAPKVVNLGRFVRGLDDMLRRALGDGVEIETIVSGGLWNTLVDPFQVENALLNLAINARDAMNGHGKLTIEAGNAALDDAYAKRNAEVTPGQYVMLAVTDTGAGMPPEVRERVFEPFFTTKPEGQGTGLGLSMVYGFVKQSGGHVKIYSEEGHGTTIRIYLPRVREQEDLETNIDAGPAKGGTETVLVVEDDEEVRTTVVEMLSDLGYRVLKAKDAQSALAIVESGVPIDVLFTDVVMPGPLRSTELARKARERLPAIAVLFTSGYTDNAIVHSGRLDEGIELLSKPYTHEALARKIRYVLQTQNPQAAEIAEAGQHLLDIDPPAMPDSADSADSVAAQPRPRILLVEDDELVRASTAELLRMFEFDILEAEGEHDAKQILSEHAISVMLTDVGLAGKSGVDLALEVCAGRPDLRVIFLTGYDLVLTPEQRKVLPHAILLRKPYDLLDLIDALKTPLR

SEQ ID NO: 49509 - protein, 862 aa, Burkholderia fungorum
MPQDGARNQHIEETALMKIIVIGHGMVGHKLVECLAEDAAHGLDITVLCEESRPAYDRVHLSEFFAGKTADDLSLVEPGFFERRNVLLKLNAKAVAIDRDARTVTVSTGETLPYDKLVFATGSYPFVPPVQGRERTDCFVYRTIDDLEAMRECGARSKTGTVVGGGLLGLECAKALRDMGLQTHVVEFAPRLMAVQVDDGGGRVLRTKIEELGVTVHTQKNTTAIVDGEAGTHRMQFADGSHLDTDMIVFSAGIRPRDDLARESGLTLGARGGIVIDNACRTSDPHIYAIGECALWNGQLFGLVAPGYEMARAVAKQLLGGAAEFAGADMSTKLKLMGVDVASIGDAHGSTPGSRAYQFSDERKQVYKKLVVSECGKYLLGGVMVGDAGEYGALLQMMLNRIELPASPEFLILPQADGNAKPALGVEALPAGAQICSCNNVSKGELCAAVCAGATDIGALKGATGAGTSCGGCVPLVTQVMKAEMKKQGLAVNNHVCEHFPYSRQELYHIVRVEGVRSFGALLAKHGHGLGCDICKPLVASILASCWNEFVLKKEHASLQDTNDYYLANIQRDGTYSVVPRMAGGEVTPDGLIAVGQVAKKYGLYTKITGGQRVDLFGARVEQLPLIWEELIAAGFESGHAYGKSLRTVKSCVGSTWCRYGVGDSVGLAVEMENRYKGLRTPHKIKFGVSGCTRECAEAQGKDVGIIATEKGWNLYVCGNGGMKPRHAELLASDLDKETLVRYIDRFLMFYVRTADRLQRTSVWRDNLEGGLEYLIDVVVNDRLGVAGELESEMQHVVDTYECEWKKAVTDLETRKRFRHFVNSGESDSNLAFVEERGQIRPATPAERRSKLAAIPVVAETV

SEQ ID NO: 49510 - protein, 451 aa, Burkholderia fungorum
MTQSAKAAQSAFRAQLLTFNGDPAQSPNAAVFNEDGLLIVEDGHVVAAGAYAALAPQLAPGTQVVEMRDKLIVPGFIDTHIHYPQTDMIASPAPGLLPWLETYTFPTERRFADPAYARDTASFFVEELLACGTTTALVYCTVHKESADALFTESEARNLRMVAGKVLMDRNCPEFLRDTAQSGYDDSAELIGRWHNRGRQMYALTPRFAPTSTEAQLEACGVLAGKHPDIFIQSHVAENHDEVKWVADLFPGHRSYLDIYDHYGLLRRRAVYGHCIHLDEEDRKRMAQTGTVASHCPTSNLFLGSGLFDFDKADKAGMPIALATDVGGGTSFSMLQTMNEAHKVARLTGHHLTATRMFYLATAGAAEALDLADKVGTLKPKSEADFVVLDPRATPLLARRTGRTESLEELLFAFALLGDDRAIYETYAAGKRVHRRDDVRQYASGAERVAA

SEQ ID NO: 49511 - protein, 92 aa, Burkholderia fungorum
MAMKKTDLEKNKALKLNNAMKLSTAERFGKAAAAEPKLDRREQRKLDQAQGLVAFACKLNGDLVTELKERAATHPEGMTGLLNEVIKRGLAG

SEQ ID NO: 49512 - protein, 391 aa, Burkholderia fungorum
MRRGAQHLVGTKRGRTGQDSAGTCPEPDGDPRFTRRQWSRAFSPYSGESPMLIDVHAHLFTPGMLKRHDFWGPFMKTRGLTVGHFSLGTTQPSKARDDDEAEANLLARMTHAARRKLMAERGVDKLVLSTPSHAFMYWAGEFGDEYASICNDELSAFCAQDPEHFAFWAHANLANPAQAVREIGRAVTQLGAKGVCVGGANFNGLEAHSEELFPVWEALSKLDAPIMVHGFNQSIYWGEKHTDDKFETTSIVGDCVDETLFFWNLINGGALDTFPNLKTYITHAGGMAIFQLGRLNDLNRVMAPDSRNQRELIEYLPNFYFDLDVHAPGLRRGVVDVVGVDNLVYGTNFGGAYEHGDLTEGLGLTDGEREKIRSGNARRLLKLDAHEPVAA

SEQ ID NO: 49513 - protein, 466 aa, Burkholderia fungorum
MRLGLLTALVIGSMIGSGVFSLPQNMASGAGAAAVLIGWLITGVGMLMLAFVYQTLTTRKPELDNGIYAYARASAGEFVGFNSAWGYWVSAWIGNVGYLVIVFGTLGYFFPIFGDGNTPAAVLGASIALWIMHAVILRGVRSAAVLNAITTVAKVIPLLLFIVLAAIAFRSHVIAQDFWGNAKLGSVFTQVKSTMLITVWVFIGIEGASVFSARAQRREDIGRATLLGFVVVLLLLMAVSLLSLGIVPQGELAAMKNPSMAGVLDKAVGAWGAVLISIGLLVSVGGALLAWTLLAAETLFTPANGGVMPKFLARENSHGVPANALWVTNGLVQLFLIITLVSNATYQALISLATSMILIPYLFSAVYATGIAMRGEGYAPAEGARTRDMLIGAAATVYCCWLLYAAGPKYLLLSALLYAPGVLLYGWAKRERGARLFKPFEAVILAALLILAAVAAWLLSTGALGL

SEQ ID NO: 49514 - protein, 363 aa, Burkholderia fungorum
MIPVTILTGFLGSGKTTLLKRILNEKHGMKIAVIENEFGEENIDNEILVQDTGEQIIQMSNGCICCTIRGDLSRVLGDLAAQKQAGTLDFDRVVIETTGLANPGPVAQTFFMDDQIANEFLLDAIITLVDAKHANHQLDEHEVVQRQVGFADRLFITKSDLVDEKHLADLRHRLLHMNPRAAIKVVNFGEADIKEIFDLRGFNLNSKLEIDPDFLVEDEHAHSHAHAHDEHGHTHDDHANCDHDHGHCDHEGHDHGHHHHHAHHDDKIKSFVYRNDRPFDPNKLEDFLGGILQIYGERLLRYKGVLYMKGVDRKVVFQGVHQMMGSDLAAKWQPIEKKTNKMVFIGIELPQDLITDGLDACLV

SEQ ID NO: 49515 - protein, 426 aa, Burkholderia fungorum
MKIHIQGGTLIDPAAGTEQQQDIFIAAGKIAAIGNAPADFNADKTIDAQGLHVMPGLVDLSARLREPGYEHKATLESEMTAALAGGVTSLVCPPDTDPTLDEPGLVEMLKFRARNLNQAHVYPLGALTVGLKGQVITEMVELTEAGCIGFSQADVPVVDTQVLLRALQYAKTYGYTVWLRPVDAYLGKGGVAASGALASRLGLSGVPVSAETIALHTIFELVRVTGARVHLSHVSSAAGIALMRAAKAEGLPVSCDVTVNHVHLIDLDIGYFDAQFRLDPPLRQQRDREAIRAGLVDGTIDAICSDHTPVDDDEKLLPFAEATPGATGLELFLSLTVKWADEARVPLAKALNRITAAPAKVLELDAAGRIAVGGVADLCVFDRNAHWRVEPRALKSQGHNTPFLGYELPARVHATIVSGHVAFEQR

SEQ ID NO: 49516 - protein, 164 aa, Burkholderia fungorum
MTDQTSTRFPPTRDAHAPVPSGDNSFAWSDARLLGFALMDEVHKEFYAVALNLVTCTDATAATAIDRFERHAVSHFEQEDQWMRSTNFPPRDCHIDEHAAVLKSVSEVKEAVEQGRAGAEMVRDLGMHLFEWFPGHADYLDSALAAWMMKRTMGGKPVVLRRKI

SEQ ID NO: 49517 - protein, 281 aa, Burkholderia fungorum
MKESWRVAGLAGVDVHDDARAMRAWRWMQWVLFALSLLAIPAFYFELAAASRFHLAGRALYASMSAGFTMVLGRIAFLSRKPERFITRNAYDVLIAAGSAISVAWGALPWSPLEWLLRVVFVGLVAARIVVSLRSFFSPGRLGLLLVIAVLLLASAGAGFYWLEPGVHTYAEGVWLAFESSATVGYGDMAPTTPASRVFAAFVVLLGYGLLSLVFASIAATFVEQEERILRREMHRDIKALRDEIAALRQDVQAAAGGEARVAAASAGPVKPAASHPGESH

SEQ ID NO: 49518 - protein, 366 aa, Burkholderia fungorum
MSGNTLGTLFTVTTFGESHGPAIGCVIDGCPPGLALNEADIQLELDRRKPGTSRHVTQRQEEDKVEILSGVFEGQTTGAPIALLIRNTDQRSKDYGNIADTFRPGHADYTYWQKYGIRDYRGGGRSSARLTAPTVAAGAVAKKWLREKFGTEIRGYMAALGEIDVPFVDWAHVRENPFFVPNQQIVPQLEAYMDALRKEGDSIGARINVVASGVPVGLGEPLFDRLDADIAHAMMGINAVKGVEIGAGFASVAQRGSVHGDELTPEGFVGNHAGGVLGGISTGQDITVSIAIKPTSSIRTPRRSIDKAGQPAVVETFGRHDPCVGIRATPIAESMLALVLIDHALRHRAQCGDVSVSTPKIAASAP

SEQ ID NO: 49519 - protein, 913 aa, Burkholderia fungorum
MPEERSLEGKTLLLVDGSSYLYRAYHAMPDLRGPDGGPTGALYGMINMLRRMRKEVTAEYSACVFDAKGKTFRDDWYADYKANRPSMPDDLSRQIEPIHVAVRALGWPLLMIEGVEADDVIGTLSTEAEKRGMNVIVSTGDKDLAQLVSDHVTLINTMTNEKLDRAGVLAKFGVPPERIIDYLSLVGDTVDNVPGVEKCGPKTAVKWLTQFDSLDGIVAHADEIKGAVGDNLRRALDFLPMAKKLVTVERNCDLTDHIVSIGESLQSQPESRAELREVFTRHGFKTWLREVEIADAVEGPETDVPPALSVDHERHYDTVQTWEQFDAWLGKINAAELTSFDTETTSLDPMIAQIVGLSLSVEAGRAAYVPLAHRGPDAPVQLPRDEVLARLKPWLESAGHKKVGQHLKYDEQVLANYGIEMRGIEHDTLLQSYVVESHRTHDMDSLALRHLGVKTIKYEEVAGKGAGQIGFDEVALDKAAEYAAEDADITLRLHQVLYPQVAAEKTLQYVYHDIELPTSRVLRKMERTGVLIDSEKLRQQSSEIATRLIQLESEAYVLAGGEFNLGSPKQIGQIFFEKLELPVVKKTPSGAPSTDEEVLQKLAEDFPLPKILLEHRGLSKLKSTYTDKLPRMVNATTGRVHTNYAQAVAVTGRLASNDPNLQNIPVRTGEGRRIREAFIAPAGHKLVSADYSQIELRIMAHISGDESLLHSFSQGEDIHRATAAEIFSVTPLEVSNDQRRVAKVINFGLIYGMSSFGLASNLGITRDAAKLYIDRYFARYPGVARYMDETRVSAKAKGYVETVFGRRLWLPEINGGNGPRRQAAERAAINAPMQGTAADLIKLSMIAVQKWIEESKIGTRMIMQVHDELILEVPDAELSDVRKRLPELMCGVADLKVPLVAEVGAGLNWEEAH

SEQ ID NO: 49520 - protein, 191 aa, Burkholderia fungorum
MASSTQQTKQPIDVVALFPQVADIQDEALRKAVVVVWQELWEMSAWKRLEEVPTSPEIPYPTLPHNQCVLDMAMSVADLFERHHGLKVNRDYLIAAAVLQDASKVVEMEPGAEGKVAATALSKHYPHAFWAAHLALRHGVPDEVVHVLLTHSPQSPKFPSTIEGKILYYVDQIDVIGIFKDRWRKDLYITK

SEQ ID NO: 49521 - protein, 252 aa, Burkholderia fungorum
MYLQLTGTHVRVLGSMHLFPATSRRTPPWIAEAYDWAEALVFESDPPTILPLLKAAGQDGAARLQPLLSADAWQQLQAAWPVEGPLAPLVDLRPWAALIVAPTLFQHVVEGVEPRMLRSAIAQAKPYRYLETAQEVAAALDSIPLDALGAALGLLMADLDEPQRTLERMHAAWLEGDLPAVHRIAVESPMFNLPGIRHAILDARNRAWAARLAEWLTRPERTLVVVGALHLCGPGNLIECLARPVEPVFAHP

SEQ ID NO: 49522 - protein, 248 aa, Burkholderia fungorum
MTSARTPRRKTVAGASAQQVGLNFETPDDIVCGVDEAGRGPLAGPVVAAAVIFDPAKPMIRGLDDSKVLTAKKRDELYDKIVDRALAYCIASASVEEIDSLNILHATMLAMKRAVEGLSVVPTLVKIDGNRCPTLSVRSEAVIGGDALVKSISAASILAKVTRDRMLLELHQAHPVYGFNAHAGYGTPQHLAALREHGPCEHHRRSFAPVREAHLRLGTGVPLPAGNVIVVSEVMLDDDAFGERSGAA

SEQ ID NO: 49523 - protein, 406 aa, Burkholderia fungorum
MQPASPVPDIPYLERGTRAYWRASIALLFAGYATFSLLYCVQPLLPSFSAAFNVTPAQSSLSLSLTTAALALAVFVAGFISEGWSRHKLMTLSLTISALATIGVSIAPHWHQLLVLRTLEGLALGGVPAVAMAYLAEEVHPDGLGLAMGLYVGGTAIGGMAGRVITGVVADLFSWRVAIGTIGVLGLLSMLAFRALLPPSRHFVPRRGLGFTHHRTALLRQFTRPGLPLLFLLGFVLMGSFVTLYNYIGYRLLAPPYRLDQTEIGAIFVVYLTGVVASPWSGRMADTFGRARVLTASLLLMAFGLALTMLHPLTAIAAGIACVTFGFFAGHSVASGWVGRLAKDAKGQAAALYLLAYYIGSSVVGSYGGHMWTSYGWNGVAGLVGALLVIGLIAAARLRKREQPLA

SEQ ID NO: 49524 - protein, 356 aa, Burkholderia fungorum
MPRPLSATIHTSALANNLAVARRYAPKSKIWAVVKANAYGHGLARVFPGLRATDGFGLLDLEEAVKLRELGWAGPILLLEGFFRPTDIDVIDRYSLTTALHSDEQLRMLEMARLSKPVNIQLKMNTGMNRLGYTPEKFRAAWERARAAQGVGQITLMTHFSDADGDRGVDYQVEAFERGAQGIAGARSLANSAATLWHPATHFDWVRPGIILYGASPSGVTAAIEGTGLQPAMTFASELIAVQTLHEGHTVGYGSSFKARGSMRIGVVACGYADGYPRVAPEGTPVIVEGVRTRIVGRVSMDMLTVDLTPIPTANVGSRVELWGNALPIDDVAQACGTIGYELMCAVAPRVPMRAE

SEQ ID NO: 49525 - protein, 1427 aa, Burkholderia fungorum
MHTVVFGWFGGSAVWFIPLLWRLVKSALPGGAGLRGPGTIRLWLGFVCVLVASCMLEASLIDVAGVNGFGHVLAAGSGRLLGHIGTPLAALALLLVSLPWLLDFRWRDFAAWADGAFGLGLSRGLAKRDEEARRHRSADDGLPSHVSPATNTMAPKTNGRYARPTVWRPPARGRDAAAGAAAAAAGKDAAARGAGASWRTGAAAPRSQAAQAEPVLRTGAATTPPRHVPMQTQPLNADKAAWMPAEPVAPAGWLRGAGPHAAAPVAGSMAGSGVSGAAARDAALQVGRRSAGEQRPVGSSGGGAGLAAGAGFAAAGAAGAAGAVGATGTANAAAAAGAATAARTAQAAHAGHAAATRTTATARAVPGAASHSATGDTGNTSGEGRPSTTAKGTTAPVSSVNRTAAPLQAFSPASHSSDVTRTPATRQPPSFTRPMPTTQKVAPPASVQETLRSIAENAARWTDLAGVSLARSSGAETAKVASVPDDVPSFEGPQSSVDVPGTDAVETPLTLDVPVSSLEVVESGSAGSPVKTAVDSPRMEAALDVPLEACHEPVVQWPIEPPVIRPPLTAAPVAEPTLAPAPAPAPAPAPAPAPAPAPAPAPAPASQYVPPVATPTPFQIFAAQLQASEADPDASPFEDDSAQSTPRADGHVNPGVEVAPTLSQPADPREVIAPKIAEAPAASAIAEQMEETAPVIESQATAPAPIAEVVIDKTLVPWEAELDATLSQHAASSLSGPAVGSVAASSEVVHTHDVTLSPGIAHTAESAAPIETETVEYSPALSDAPEASGSLTGARTANTTTAVTAVPPPGIAPHASDSSTTTPAANTTTAASPDIASHASNVVRFPGFAVHAAPVASDVVADEPVTAEDRLNEVAISPAASAPLAAVPLAATPLAAPDSPTATATEPTEPTVQRPPLRGHNPANGFEFRAPAASMVELPTLDLLAPADIDVEPVSEEKLIETGLLIEQRLQEFKVPVTVVGASAGPVITRFEVEPALGVRGSQIVGLMKDLSRGLGLTSIRVVETIPGKTCMGLELPNARRQTIRLSEILEASVYQNSHSQLTLAMGKDITGHPVVADLAKAPHMLVAGTTGSGKSVAINAMICSLLYKATPEEVRLIMIDPKMLELSVYEGIPHLLAPVVTDMKLAANALNWCVGEMEKRYRLMSAVGVRNLAGFNQKIRDTEAKGKKLGNPFSLTPEAPEPLAPLPLIVVVIDELADLMMVAGKKIEELIARLAQKARAAGIHLILATQRPSVDVITGLIKANIPTRVAFQVSSKIDSRTILDQMGAESLLGQGDMLFLPPGTGYPQRVHGAFVADEEVHRIVEYLKQFGEPQYEEGILDGPATDGGAAQDLFGEAPDAEADPLYDEAVAFVVRTRRASISSVQRQLRIGYNRAARLVEQMETAGLVSAMGINGSREVLAPGPAE

SEQ ID NO: 49526 - protein, 648 aa, Burkholderia fungorum
MYVPPPVGTTENAMVSIRLPDGSVRQYEHPVTVAEVAASIGPGLAKAALGGKIDGELVDTSALIDHDVALAIVTEKDADGLDIIRHSTAHLLAYAVKDLYPEAQVTIGPVIDNGFYYDFAYNRPFTPEDLEKIEKRMQELAKKDEPVSRRVVSRDEAVDYFKSIGEKYKAEIIESIPATDEIKLYSHGGFTDLCRGPHVPSTGKLKVFKLMKVAGAYWRGDSKNEQLQRIYGTAWTKKEDQEAYLHMLEEAEKRDHRKLGKQLDLFHMQDESPGMVFWHPRGWTLWQQVEQYMRRRVNDAGYLEIKTPMIMDRSLWEASGHWQNYRENMFTTESEKRDYAIKPMNCPGHVQVFNHGLRSYRDLPLRYAEFGSCHRNESSGALHGLMRVRGFVQDDAHIFCTEDQFISESIAFNTLAMSVYKDFGFDHVEIKLSLRPDARAGTDETWDRAEQGLREALTACGVTWEELPGEGAFYGPKVEYHIKDALGRSWQCGTLQLDMVLPERLGAEYVAEDNSRRRPIMLHRAIVGSMERFLGILIEHHAGAMPAWLAPMQVVVMNIAESQTEYAQSLAQSLQKQGVRVAADLRNEKISYKIREHTLEKVPYLLVVGDKEREAQTVAVRARGGVDLGVMPLDTFIERLRQDVQSFN

SEQ ID NO: 49527 - protein, 227 aa, Burkholderia fungorum
MTVSQKGSGREALEPLLADGVRELGLALSDAQLGKLLDYVALLAKWNAVYNLTAIRDPRQMLIQHILDSLSIVPHLAPLGPSSVLDVGSGGGLPGIVLAIVLPEWTVTVNDIVHKKTAFQAQGKAELGLANLSVVTGRVESLQPGAEVPAKFDVIVSRAFAELADFVTLARHLVAEQGAIWAMKGVRPDGEIERLPAGAHVEQVIRLNVPSLDAERHLIKVVVDAGG

SEQ ID NO: 49528 - protein, 261 aa, Burkholderia fungorum
MAVSRAIQCIASTIHGVTLGKAAFAAVSRRSAAESAAIKNIPRSAIAYERRNIAAGATAMQIKTYTVLTLVVFSSAAFAWQPLTYPIRSQSPYQRSIDTAMCYATANRQTKVNIAREPQTPPRKPAAAKTSSTGVPSRPPLPSSTFSSTPIGASMPAAAEAPGASAPAATTAAAARGAAAPKAASATQAGTTTTATATAATGASATSADNGASETAAASAAQVAAASGVKLPPLPAPEPPMTQYWAAYGACMQARGYVVAQ

SEQ ID NO: 49529 - protein, 327 aa, Burkholderia fungorum
MTAMTLALAGVPAAHAETSLLNVSYDVTRELYKDINAGFIAAYKQKSGETVSIRQSHGASSAQALSVLQGLQADVVTMNQPNDIDLLAEKGQLLPANWRTRLPNDSVPYTTTMVFLVRKGNPKHIKDWDDLARPGVQVIIANPKTSGNGRYTYLAAWGYRKQHGGTDAQALDFEKAIFKNVPVLDTGGRGATTTFTQRGIGDVLVTFENEVALMDTGVGGGNFEAVYPSVSLLAAPPVSIVDKVVDKRGTRKEAQAYLDYLWSPAAQEIIAQHHLRPQDKTVLAKHASEFKAIKTFTVEEMFGGWQKAQQTHFSDGGTFDQIIVDKK

SEQ ID NO: 49530 - protein, 285 aa, Burkholderia fungorum
MNRSVAVSSPPSSSRFIELRSGLHMPYVEAGEGELLLFVHGSLCDYRYWQPQLTGLSKHYRCVAVSLTHYWPAADTDPGLPFSWSEHADEVAEFIERFGAGPAHVVGHSRGGCVAFHFARRHAQHVRTLTLADPGGPLQIAGRPPASLPETVNALRSKAAQLIESGEVEAGLQLFVDSVSRPGFWAMSTPGFRRMATDNAHTLARQFRDPLPAYVPEEAAEVRCPVLLIDGEKSPDMFRRTIAALQTWLPDARRETVRGASHGMNLAHPSAFNRYVDEFIRSVRA

SEQ ID NO: 49531 - protein, 193 aa, Burkholderia fungorum
MQFNHAVAGTGRPRNVLKLDRKVFSMKKLMIAAVIGALSTTMLSVATDAVAQTATTTKPATKAVPKKPQPKRLIKRKPNPAKEAKVDPVPEGAEKWSCNEGLAFELKGDMKRDQIVTVHWANKNYNLPREATTTGADRFHDAATGMDLVVIPTKAMLFSDKDSSRLADECKTAAMIEGAPAPTQSNAINKTSN

SEQ ID NO: 49532 - protein, 688 aa, Burkholderia fungorum
MSEFSETPAGLDTAAAPAVSAATPAPRPLRAIQPLPDQLISQIAAGEVVERPASVVKELLENALDAGAQSLRILLDEGGVKRISITDDGCGIPENELALALMRHATSKIRSLAELEAVATLGFRGEALASIASVAQMTITSRTADAAHAVRVDAQTGVLSPAAGTQGTTIEVRELYFNTPARRKFLKSEQTELGHCLEQIRRAALARPDVAISVLHNGKAVEHWNASEPPVRVAKILGDTFATAHLPLDESAGPLAVYGCAGLPTASRGRADQQYFFVNGRFVRDKLLTHAVRAAYEDVLHGERYPSYVLFLDLPPEAVDVNVHPSKIEVRFRDSRSIHQFVFHAVQRALARHAGASPETTAGGHAAHLAPSVSGPASFGATPLGGAGVGGVGFGAGNGAGGIGGGLGGASGGGFGSSSQQPGNTWMRQARMTQGTLPVAQPLAFYDALFGRKDTNAGTAEGATLFEARDSAAEAPSPYNASAPYPAPAFHAADEQPLGFALGQIHGIYVLAQNAHGLVIVDMHAAHERILYEQFKNALADRTIAVQPLLIPQSMQADPVEIGTVEEERDTLDALGFDLAVLSPTTLAIRAVPALLKDADLQALARAVLSDLHAFGGSRVLTERQHELLGTLACHHAVRANRRLTLDEMNALLRQMEATERADQCNHGRPTWYQLTLSDLDRLFMRGQ

SEQ ID NO: 49533 - protein, 253 aa, Burkholderia fungorum
MMSRMTHRFSWLRFAAAACVAGTAFAAVPAHAGIFDDDQARQAILDLRSKTDSLSGQLSAAQRTILDQSNRLDQLNQQVATLRGQNEDLGNQLATLQKQQKDYYTDLDTRLKKFEPQQQTVDGVQGEVQPGETESFNAASQQFRNGDFKNAAASFRTFISRFPNSPYQPTAQYWLGNALYALRDYKGSTAIWQGVVKNYPQHPRAPEALLAIANNQLEQGQKAAARKTLEQIVAQYSGSDVAQSAQSKLSQIK

SEQ ID NO: 49534 - protein, 226 aa, Burkholderia fungorum
MRGAARRFACGRPCDTAQLHLTRQTLRLPMPFNFPIFLTWLRIVLIPLVVGVFYLPDMMMSPAHRNLAAATIFILAALTDWFDGFLARKWNQTSAFGAFLDPVADKLMVTAALLVLVQLARIDSAIALVIVGREIAISALREWMAQIGASKSVAVNSLGKFKTVCQMVAIPMLLFYGPLRFGGGVVVDTRVWGLWLIYLAAFLTIWSMLYYMKLAWPQIRERSGVA

SEQ ID NO: 49535 - protein, 158 aa, Burkholderia fungorum
MQPEAAISRMAIYGIGTDIVQVSRVAAVMTRTNGRFAEKVLGPDELRVYHARHARSAARGLAFLATRFSAKEAFSKAIGLGMRWPMTWRALQTLNKPSGEPMVVASGELAEWLDARGITARVTVSDERDYAVSFVIAEAVETAPSASSTQAAAPGAAG

SEQ ID NO: 49536 - protein, 430 aa, Burkholderia fungorum
MTGLLPRSLLGRNLLLLLLLVVASDISTFTIFFVFIETPRIDEAASLFASQTRQVERLLRALPPQVRYNELVAINGGEQAPPANADTDTDTHSFSAHRFLQTLTQHLPSGTLVSLEGGKDSRRIWIQLRIGEGLEWVMLPVPAEISHQLPWSLIAQLLTIAAFPALGAWLIQRYTVVRLQRLARAATTVTHGAWPEPVPVDGPVEFITVASMFNQMVASLAEMDATRTEMLAGISHDIRTPLTKLKMAISAPEAFEAPSASAEHFVAEIDVIVEQFIDFGRSWDSEPVAQGDLNALVDQLAADYVGLGYIFQVSLAPLPSIPFRPVGMQRVLMNLMHNAVIHGRIGLAVRTWTEPGYVVLSVEDEGPGVPEAQLPLLKQPFRRIASPGKAGGTGLGLAIAERIIRWHGGRLDLSLRTEGGLAATLRLPLK

SEQ ID NO: 49537 - protein, 110 aa, Burkholderia fungorum
MSMMKGQLAGLMKQAQQMQENMKKMQEQLALIEVEGQSGAGLVKVTMTCKNDVRRVSIDPSLLADDKDMLEDLVAAAFNDAVRKAEATAQEKMGGMTSGLPLPPGFKLPF

SEQ ID NO: 49538 - protein, 584 aa, Burkholderia fungorum
  MISC_FEATURE (546)..(546): X=any amino acid
MTYQVLARKWRPKDFASLVGQEHVVRALTHALDGGRLHHAYLFTGTRGVGKTTLSRIFAKALNCETGVTSTPCGVCRACREIDEGRFVDYVEMDAASNRGVDEMAALLERAVYAPVDARFKVYMIDEVHMLTNHAFNAMLKTLEEPPAHVKFILATTDPQKIPVTVLSRCLQFNLKQMPAGHIVSHLEHILGEEKVPYDVQALRLLARAADGSMRDALSLTDQAIAYSANQVNEEAVRGMLGALDQSYLIRLLDALADGDGAAVLSVADEMALRSLSFSTALQDLASLLHRIAWAQFAPSSVLDEWPEAGDLRRFAEALSAEQVQLFYQIATIGRSELGLAPDEYAGFTMTLLRMLAFEPAPTGGGGAVGAARAPGQSGAGGARRTGAPAVAAQQGASGSPVSQARAVAASGAVPGTSFEAQVSAAAPGRETQPGNVVVADKGAVVGAVSVEPATRAVAQAGSTVEVPPAVGDVQAAAADSAQGAVAGQSPAAEPATVAGPAPVIDELNPAPASAAPAAPAPALAPWDDAPANPAAREASTTAVPXLMILPRVKSLQPLATTVRQRAKPPQLPASTILPRTTSP

SEQ ID NO: 49539 - protein, 426 aa, Burkholderia fungorum
  MISC_FEATURE (410)..(410): X=any amino acid
  MISC_FEATURE (411)..(411): X=any amino acid
  MISC_FEATURE (412)..(412): X=any amino acid
  MISC_FEATURE (413)..(413): X=any amino acid
  MISC_FEATURE (414)..(414): X=any amino acid
  MISC_FEATURE (415)..(415): X=any amino acid
  MISC_FEATURE (416)..(416): X=any amino acid
  MISC_FEATURE (417)..(417): X=any amino acid
  MISC_FEATURE (418)..(418): X=any amino acid
  MISC_FEATURE (419)..(419): X=any amino acid
  MISC_FEATURE (420)..(420): X=any amino acid
  MISC_FEATURE (421)..(421): X=any amino acid
  MISC_FEATURE (422)..(422): X=any amino acid
  MISC_FEATURE (423)..(423): X=any amino acid
  MISC_FEATURE (424)..(424): X=any amino acid
  MISC_FEATURE (425)..(425): X=any amino acid
  MISC_FEATURE (426)..(426): X=any amino acid
MHLSELKTLHVSELIEMANGLEIESANRLRKQELMFAILKKRAKTGDTIFGDGTLEVLPDGFGFLRSPETSYLASTDDIYISPSQIRRFNLHTGDTIEGEVRTPKDGERYFALVKVDKVNGQPPEASKHKIMFENLTPLHPNKVLLLEREMRGEENVTGRIIDMIAPIGKGQRGLLVASPKSGKTVMLQHIAHAIKQNHPDVVLFVLLIDERPEEVTEMQRSVAGEVIASTFDEPAARHVQVAEMVIEKAKRLVEMKNDVVILLDSITRLARAYNTVVPASGKVLTGGVDANALQRPKRFFGAARNIEEGGSLTIIGTALIETGSRMDDVIYEEFKGTGNMEVHLERRLAEKRVYPSINLNKSGTRREELLIKPEVLQKIWVLRKFIHDMDEVESMEFLLDKIRQTKRYXXXXXXXXXXXXXXXXX

SEQ ID NO: 49540 - protein, 341 aa, Burkholderia fungorum
MPERHFMLTFQQIILTMQSYWDKQGCALLQPIDMEVGAGTSHVHTFLRAIGPEPWRAAYVQPSRRPKDGRYGENPNRLQHYYQYQVVLKPAPENILDLYLGSLEALGFDLKQNDVRFVEDDWENPTLGAWGLGWEVWLNGMEVTQFTYFQQVGGLDCKPVLGEITYGLERLAMYLQKVENVYDLVWTEWEEQGPNGPELRRLTYGDVYHQNEVEQSAYNFEHANVELLFSIFNSYEAEAKRMIEAQIALPAYELVLKAGHTFNLLDARGAISVTERAAYIGRIRALSKLVAQAYYDSREKLGFPMLGNPVHGVPGLTTDEQDAAMPAWAPPLKVERKIDQD

SEQ ID NO: 49541 - protein, 407 aa, Burkholderia fungorum
MLTLTTLMNTVTLKPSKEKSLLRRHPWVYANAIDRIDGNPAPGATVLVRAHDGRFLARAAYSPHSQIRARVWSFDETEPIDHAFFKRRVQRALAHRQTMVHDTGAVRLIFGEADGLPGLIVDHYVAEDEGQRSQLVCQFMAAGVEAWKEAIVAALTGATGCPNVYERSDVSIRQKEGLEQITGVLAGEPPSEALIVSENDVRYHVDVRNGHKTGFYVDQRDNRPLVQQLAQDRDMLNCFCYTGGFSLAALKGGAKRVVSIDSSGDALAIAQQNVAANGFDAERATWLDADAFKTLRRLYDDGERFDLVVLDPPKFAPSREHVDRASRAYKDINLTGLKLLRPGGLLFTYSCSGAIDSELFQKIISGAAADARVDARILKRLGAGMDHPLLTAFPEGEYLKGLLLQIA

SEQ ID NO: 49542 - protein, 802 aa, Burkholderia fungorum
MNRTDAFVEPAATHAAAHESEASIGVSLPHESAALHVSGEATYTDDVPELQGTLHAALGLSRHAHARIVSMDLDAVRNAPGVIAVLTAEDIPGENNCGPVLHDDPILAVEEVLYLGQPVFAVIAESHELARRAAALAKSDDVIRYEPLEAILTPAEAKARQQFVLPPLHLKRGEPAAKIAAAPNRISGTFEVGGQEQFYLEGQIAYAVPKEMDGMLVYSSTQHPSEMQQVVAHMLDWPAHNVVCECRRMGGGFGGKESQSALFACVASLAAKRLRRPVKLRADRDDDFMITGKRHDAIYEYEAGFDDSGRILGARVEIALRAGYSADLSGAVATRAVCHFDNAYYLSDVDIVALCCKTNTQSNTAFRGFGGPQGALVMEVMLDSIARQLNCDPLDVRLANYYGIGERDTTPYGQRVEDNIIAPLTDELLGTSDYRARRTAIAAFNANSPVLKRGLAFSPVKFGISFNVPFLNQAGALVHVYKDGSVLVNHGGTEMGQGLNTKVAQVVANQFGLPLSRVRVTATDTSKIANTSATAASTGSDLNGKAAEAAARTIRERLAELAARQLGGSAGDAQFANGQVSVNGGAMPFEQLVGAAYLARVQLWSDGFYTTPKVHWDAKTLTGHPFYYFAYGAAVSEVVIDTLTGEWKLVRADVLHDAGQSINPAIDIGQVEGGFIQGMGWLTTEELWWNCDGRLMTHAPSTYKIPAVSDTPAAFHVQLYQNHNAEPTVFRSKAVGEPPLLLPFSVFLAIRDAIAAAVPDAREAPPLRAPATPEAILDALDALQPQRAPQPATEPATTDTAA

SEQ ID NO: 49543 - protein, 241 aa, Burkholderia fungorum
MTVFFIGAGPGDPELITVKGQRLVRSCPVILYAGSLVPAAVLEGHAAVQVVNTAELDLDQIIALLEAAHLKGQDVARVHSGDPSLYGAIGEQIRRLRELKIPYEIVPGVTATAACAAALGCELTLPDISQTLILTRFASKTSMPEGEQLADLARHRATMAIHLGVRHLARIVDELRPHYGGACPIAVIYRASWPDEEKLTGTLDDIVGKVQSSSIERTALILVGQVLAAEGFADSTLYAKD

SEQ ID NO: 49544 - protein, 378 aa, Burkholderia fungorum
MTLASTPEIIAELKAGRMVILVDEEDRENEGDLVIAAEFVTPEAINFMARYGRGLICLTLTQERCKLLNLPLMTYRNGTQYGTAFTVSIEAAEGVTTGISAADRARTIATAVAPDAKAEHIVQPGHVFPIMAQPGGVLVRAGHTEAGCDFTALAGLTPAAVICEVINDDGTMARLPDLMEFAKEHGLKIGTIADLIHYRSRTESIVERICERTMQTAHGAFRAVMYLDQPSGQPHIALVRGTPCTDQDTLVRVHEPLSVLDLLEVGESTHSWTLDAAMKEIARRDCGVIVLLNCGDSKDHLIDVFKAFDSKERAEALKRRPVDFKTYGIGAQILRELGVGKMQVLSNPRKLGSMSGYGLEVTGFVPMPGSTAQAPQQG

SEQ ID NO: 49545 - protein, 411 aa, Burkholderia fungorum
MNDLTVTRQTFDEVMVPVFSPAAFVPDRGLGSRVWDTQGRDYIDFAGGIAVTALGHGHPELLKVLHEQGAKLWHIGNGYTNEPVLRLAKRLEELTFADRAFFANSGAEANEAALKLARRVAFERHGADKFEIVSFTQSFHGRTFFTVSVGGQPKYSEGFGPVPAGITHLPYNDIEAAKKAIGAQTCAVIVEPVQGEGGVIPADPAFLAALREACDQHGALLIFDEVQTGVGRSGYFYAYQETGVTPDILTTAKALGNGFPIGAMLTTNELAAYFKVGVHGTTYGGNPLGAAIAEKVVELISDPKLLEGVRSLSEALKGHLAKLNDRFGLFTEVRGRGLLIGAELTDAFKGRAKDFVTAAGQHGVIMLMAGPDVLRFVPSLIMPLDDMNEGFARLASAIEGIVGAKAEAASH

SEQ ID NO: 49546 - protein, 744 aa, Burkholderia fungorum
MAINFENRYTDVSGPDELHLSDYLRTIVRGWRTIAMVTLIALALGCAYAFLAPPTYRADVLFHVEDKTANANANGKDSLPPLTGMFDTKPSTAAEIELLKSRLVTEETVKKLHLDISAAPRYFPVIGGMIAGLVNGQWGFRLPQFINLSGYAWGDEAITVSQFDTSKDMYDTTFTLIAGNDGSYVLRDRNGIAILSGKVGETVETDTADGPITLHVDKLVGPAGSRFELSRASTLSTVDRLQKALVVQETTLQSGVIRASLEGGDSALTAAIVNSMAREFVRQDVESRSTEAEHMLAFLDQQLPGLRKELDDAEQRYNKFRNTHGTVDLGEESRLLLQQIVDNKTKLMDLQQQRAEMSQRFTANHPAVAALDAQIAALQGAAANMNRSVAVMPDTEQTALRLLRDVHVDTELYTNLLNSAQQLRVAKAGQVGSVRVVDFAEAPDDPVRPKRVIAILIALGGGLVLGILLTFFKRAMYGGVERPDELEGMLGVPVFAVVPRSQTQLKLQENVMLRRRGLHVLAQQAPEDIAVEGVRNLRTSLQLSLDHAENNVVMITGSRPDSGKSFLSVNLAALVASANKRVLIIDGDMRRGDVHSHFGIGHQPGLSDVLSGGDLNAMIQRDVLPGLDVLAKGTLPSHPAELLMSKRFETMLEELKSHYDLVIVDTPPVLAVTDSTLIGKYAGTTLLVVRHGRHPLNEVMETAKRLRNGGVALRGVLLTDVPQEGAFLGSGYQGGYYGYDSIAG

SEQ ID NO: 49547 - protein, 445 aa, Burkholderia fungorum
MKPVIALVGRPNVGKSTLFNRLTRSRDALVADLPGLTRDRHYGEGRTGERPYLVVDTGGFEPVAKDGILHEMARQTRQAVEESDIVVFIVDGRNGLAPQDKSIADYLRKVGRPIFLVVNKAEGMKYSTVAADFYELGLGDPRAISAAHGDGVTEMINEALEVAYAGQPEENDDEKAARGVKIAIVGRPNVGKSTLINALVGEERVIAFDMPGTTRDSIYVDFERGGKPYTLIDTAGLRRRGKVFEAIEKFSVVKTLQSISDANVVILLLDARQDISEQDAHIAGFVVEQGRALVVGVNKWDGLDPHVRERTKADLERKLKFLDFAKFHFISAAEKTGIGPLMRSVDDAYAAAMAKLPTPKLTRALIDAVEFQQPRRRGPVRPKLRYAHQGGQNPPIIVIHGNALDAITETYKRYLENRFRETFKLTGTPLRIEFRSSTNPYADKA

SEQ ID NO: 49548 - protein, 369 aa, Burkholderia fungorum
MSRRIIPVADLSAVPVIAGPVQTPSGALHDTLARPLRDLRISVTDRCNFRCVYCMPRAVFDKDYTFLPHSALLSFEEIERLARIFVAHGVEKIRLTGGEPLLRKNLEFLIDRLARLTTPAGRPLDLTLTTNGSLLERKARSLKDAGLTRVTVSLDALDDTLFRRMNDADFAVADVLDGIAAAHAVGLAPVKVNMVVKRGTNDGEIVPMARHFKGSGAVLRFIEYMDVGTSNGWNMTEVLPSADVVTRIAEHFPLAPLEAHSAAETAQRWGYVDGGGEIGVISSVTRAFCGSCTRARLSTEGKLYLCLFASAGHDLRTLVRNGSGDADIATAVAEIWQGRGDRYSQLRGSQSADSRVRDGRRVEMSYIGG

SEQ ID NO: 49549 - protein, 746 aa, Burkholderia fungorum
MAANLPASPDATRANDDVSFADYLSLIYEGRWLIAGIMAFVIALSVIYAFGARPIYDANILIQVEDSDLSEKNLLGDLAPLLDAKSATTAEIELLRSRLVVGSAVSSLKLFIEATPRHFPIIGGWVTNRYESRMSAAEPAGIAPPFLGLSRFAWGGESIQVDQFDVPKTYWKKKFTLVATGRDSYVLKSSGDVVLEGKLNRVARGRVDDGEVTLLVSRLAARPGTEFILRRSSELQAVEDLQEDLKIEEKGKQSGILSVTLNGPNPKKTKSILDAVANEYVTQNVALKSAEAQQTIEFLDRQLPQLKSQLDDAEVKYNRFRNEKGTVNLSEEAKLILQQSVDSNTALLELQQRRLELRQRFTEEHPSVVALDKQIVAAKSQTESLGSRISGLPNLEQGALRLMRDVAVDTDLYTGLLNSAQQLRVLKAGKVGNVRVVDFAQDSEEPIKPKKALVIAMGVVLGAIFGVTTAFVRKAFFGGVESGDAIERATGLPIFATIPHSDEQRALDDAVRQRLKGSHILAHQSPADTTVESLRSLRTAIQFAMLEAGNNIAMVTSPSPSVGKSFIVANLATILASSGKKVLLIDCDLRRGHVHDCFGLAREPGVSDFILGEISLDKVVQRDVLPGLDFISTGTVPPNPSELLTNARFAEMLQKLQASYDIVIVDSPPVLAVTDAAIIGKHAGTTLLALRYAQHPLHEIVESVRRLQHGGVALKGALLNDLPRTALGYGRRYGRYYAYEYGQLTK

SEQ ID NO: 49550 - protein, 218 aa, Burkholderia fungorum
MKHSLRNRFKAAAIVSSLLCAGAFASQAHAEGDDTMNGIHAGDVLVRLRAISIMPNVSTTQSLSALNVDVNNAIMPELDLTYMIRDYLGVELILATSRHQLTSSLGNLGGVNVLPPTLLLQYHFNHAGRIRPYLGAGLNYTLFYNNGLNAGGQSIGITNHSWGPALQAGVDVQVTKTLFVNADIKKIWMHTDATLGGQPLGRLSIDPVVVGLGVGMRF

SEQ ID NO: 49551 - protein, 1069 aa, Burkholderia fungorum
MAKFFIDRPIFAWVIAIILMLAGIASVFTLPIAQYPTIAPPAVQISATYPGASAKTVENTVTQVIEQQMSGLDHLLYLSSTSDDSGTATITLTFAAGTNPDIAQVQVQNKLQLATPLLPQAVQQLGTKVTKSSSSFLLVMAFVSEDGSMNKYDLANYVASNIQDPVSRIDGVGTVTLFGSQYAMRIWLDANKLTNFGLTPVDVQTALTAQNVQVAGGSLGGTPSVPGQVLQATITEATLLNTPEQFGNVLLKVNPDGSQVRIKDVGRIELGGENYNFDTKYNGQPTAGFGIQLATGANALATATAVRAKVAELSKYFPHGLVVQYPYDTTPFVRLSIEEVVKTLLEGIVLVFLVMYLFLQNLRATLIPTIAVPVVLLGTFAIMGLVGFSINTLSMFGLVLAIGLLVDDAIVVVENVERVMQEEGLSPRDATRKAMDQITGALVGVALVLSAVFVPVAFSGGSVGAIYRQFSLTIVAAMVLSVLVALILTPALCATILKPIEKGHQEKTTGFFGWFNRTFNKSRDKYHSGVHHVIKRSGRWLIIYMVVIFAVGLLFVKLPKSFLPDEDQGTMFVLVQTPSGSTQETTARALKDVSDYLLNTEKSIVESTFTVNGFSFAGRGQNAGLVFVRMKDYAQRQHSDQKVQALVGRLFMHFGSYKNALVYPVNPPSIPELGTAAGFDFELQDRAGVGHEKLMEARNMLLGMAAKDPTLAQVRPNGLNDTPQFKVDIDHEKASALGVSLSAIDQTFSIAWASQYVNNFLDTDGRIKKVYLQGDAPFRMKPEDLNAWYVRNGAGNMVPFSSFASGTWTYGSPKLERYNGISAVEIQGAAAPGKSTGQAMTAMEALVAKLPAGVGYEWTGLSLQERQSGSQAPILYGISILVVFLCLAALYESWSIPFSVIMVVPLGVIGALLAATLRGLENDVFFQVGLLTTVGLSAKNAILIVEFARELQQSEGMGPVEAALEAARLRLRPILMTSLAFILGVMPLAISNGAGSASQHAIGTGVIGGMLTATFLAIFMIPMFFVVIRAKFGGEKEDPDEALAHYNQHHPHDGQGGGAADEGSGKDGH

SEQ ID NO: 49552 - protein, 403 aa, Burkholderia fungorum
MDLTQVSSSSSSPSRPRKAPAGEVPNVAQYDERPFLKRLGVVDWLFAVAMVAGAGFALSRYHPFMNYYDKLVLVCAVPVFMVLGWRWKPVRPLMVGITALSLLAIQIYHGDLSRADNAFFLKYFLSSQSAILWMSALFVFATVFYWIGLLSRSPTGAAIGSKMTWAAVLMGFVGLMVRWYESYLIGADVGHIPISNLYEVFVLFSLITALFYLYYEQHYNTRALGAFVLLVISAAVGFLMWYSVARDAQQIQPLVPALQSWWMKIHVPANFIGYGSFALSAMVGVAYLAKERGVLADRLPALEVLDDVMYKSIAVGFAFFTIATILGALWAAEAWGGYWSWDPKETWALIVWLNYAAWLHMRLMKGLRGAVAAWWALTGLLVTTFAFLGVNMFLSGLHSYGKL

SEQ ID NO: 49553 - protein, 219 aa, Burkholderia fungorum
MRMNRLSKTLMVLHVAAGLSGLAIQARAADPVKPDVNRGQAIAVQVCASCHGADGNSAGGAYPKLAGQHPEYLVKQLKDFKTEPGARQPARNNAIMAGMAAALSDQDMVNVAAYFAAQTPKPGYAHNKDTVPLGQKIYRGGIADKGVPACASCHGPTGQGIPSQYPRLSGQWAEYTVAQLTAFTQGPGARNNNEAMHAIATRLSDSEIKAVADYIAGLH

SEQ ID NO: 49554 - protein, 692 aa, Burkholderia fungorum
MNAPTEHARAVCPHDCPDTCAMRVTVEAGRAIKVVADPEHPPTQGALCTKVSRYAERVHHPQRLTRPMKRVGRKGEGRFEPIGWDEAFQLAARRLSEIAHRAPEAILPYSYAGTMGLIQGDSIAQRFFHKLGASQLDRTICAAAGTAGLKYTYGASLGMLTEFFDESELILIWGSNPIASNLHFWTRAQQAKRRGARLIAIDPYRSLTAEKCHQHIALKPGTDSALALGMINVLIRENLLDHAYIEAHTSGFEALKARALSYPPSRAAEICGIDERVIVDLARLYGGTRKAAIRMNYGLQRVRGGGNAVRAIACLPSLTGAWRERAGGVLLSSGGWAPVDSYALQRPDLMPGWPTRTSRVINMNGIGDALLHKGDAAFGPKVEAIVVYNSNPVAVAPDSERVAAGFAREDLFTIVLEHFQTDTADYADLLLPATTQLEHLDVHKSYGHTHVMVNLPAIAPVGEALPNTEIFRGIARHMGLDEPALFESDETVAQAAFRWQDRTLEGVDWETLKKTGWAKLNLPDAPFAEGGFQTPSGKCEFYSERLAQRGLDPLPDYLPPYESADGAPELAARYPLAMISPPARNFLNSTFVNIESLRSTEGEPHLDMHPADAQSRDIVDGDQVRIFNDRGSMQARVRVTDKAREGLVVGLSIWWKKLAPDGRNANQVTSQALTDLGGSATFYDCLVEVERV

SEQ ID NO: 49555 - protein, 189 aa, Burkholderia fungorum
MLIAFGALASSFSLGAFAAADTYQLDPTHTYPSFEADHFGGLSVWRGKFTKSSGTVTLDRAAKTGTVDVTVDPASVDTGNGKLDEHLKSDAFFDVAKYPSVTYKGTDIRFDGDKPVEVIGNLTIRGITKPLNLKIESFKCMQHPVLKREVCGVEASAHFNRADYGMDFGVKYGFSMDTKLHIQSEGIRQ

SEQ ID NO: 49556 - protein, 154 aa, Burkholderia fungorum
MSTEKINLDIHKILTLLPHRYPILLVDRVLELEPHKNIKALKNVSINEPYFQGHFPTRPVMPGVLILEALAQTAALLTFSEEPSDPSNTLYLFVGIDNARFKRVVEPGDQLILNCTFERHMRGIWKFKARAEVDGVVAAEADLMCAVRHTDKDA

SEQ ID NO: 49557 - protein, 148 aa, Burkholderia fungorum
MSIIDNRKAFYDYSVEERYEAGLVLEGWEVKALRAGRGQIKEGYVVIKNNELFLIGTHISPLPEASTHINPDPVRTRKLLLHSEEISKLIGKVEQRGYTLVPLNFHYKGGRVKCEIGLAKGKKQHDKRETEKKRDWEREKARLMRSPG

SEQ ID NO: 49558 - protein, 271 aa, Burkholderia fungorum
MPPTVFIVSDGTGITAETFAHSILSQFDQKFRLVRVPFVDSTEKAYATLEKINEAILQDGRRPIVFTTLVDSASNQIVKGSNALVLDMFQTFVEPLEQELELKSSHAMGRGHQNADTEEYKNRIEAINFSLAHDDGQSNRNLADADVILVGVSRSGKTPTSLYLAMQYGVKAANYPLIPEDFERGKLPTPLLAHRQKMFGLSIDPQRLSEIRNERRPGSKYAAPENCRYEINEAEAMMRREGIKWLSSTHKSIEEIATTILQEIKLERAAY

SEQ ID NO: 49559 - protein, 261 aa, Burkholderia fungorum
MKAITSRDNPLYKRLKALAGSTHQQRKSGHALLEGFHLASAYLDVAGQPEMCIVTDGALRHDEAQAIVSRIEDHRLVTLPDALFGQLSNVVHGVGILLLVEKLATPLPDEVAQTCLVLDGVQDAGNVGSILRSAAAAGIQQVFCAPGTAYAWSSKVLRSGMGAHFLLQIHEDVEAQALIERLAVPIVITDSHGAEAIYDCDLSGPLAWVFGNEGAGVSQIWRDAVSLRVTIPQPGGMESLNVAAAAAVCVFEQCRQQRGRG

SEQ ID NO: 49560 - protein, 303 aa, Burkholderia fungorum
MIRLARFALAAALLIGSLHSHAAVSVTDDTGATVTLPAPAQRVISLAPHVTELLYAAGGGARVIGAVSYSDYPPEAKQLPRVGDNKALDLERIVALKPDLIVVWRHGNAQRQIERLREMHIPLFFSEPHRLDDVAVSLTKLGQLLGTSPVADAAAAAYRRDIAALRSRYASRAPVSVFYQVWDQPLMTLNGEHMVSDVIALCGGRNVFAQLEPLVPTVSTEAVLAANPEAIVTAAPGATKPDTTLPQLGAWRAWPSLTAVANNNLFAIDGDLINRPAPRIAQGAKQMCEDLDLARSRRKSATQ

SEQ ID NO: 49561 - protein, 231 aa, Burkholderia fungorum
MTRRAELSMRTRPSSAARAPNGALRAVDTDSIEPFDDVSEPGAPNHADRAHGLNGMNGASVADGTARATQPGTERVTQHDGQHDAPHEPLSPDDPLAPLPFNPYKGNRGVTRAWHAMKNSLAGFRVAIREESAFRQELTLAAILIPCGVLVPVDPVSRVLLLGSVLLVLIVELLNSSVEAAIDRISLERHELSRRAKDLGSAAVMVALGMCLMTWLLIVGPLVVQWLKAWL

SEQ ID NO: 49562 - protein, 310 aa, Burkholderia fungorum
MKSTMHDRDGVIWLDGELVQWRDAQLHFLTHSLHYGMAVFEGVRAYETAAGPAIFRLDDHTKRLFNSAKIFEMAIPFSVETIRDAQLEVVRRNQLAACYLRPLVWLGSEQMGLGARGNTVHVGIAAWPWGSYLGEEGLARGIRVKTSSLSRHHVNVSLVRAKASGYYINSILANREVTRNGYDEALLLDTEGYVSEGAGENVFIVRNGVLYTPDLASCLDGITRASVIEIARDQGLQFVEKRITRDEMYCADEAFFTGTAAEVTPIRELDDRVIGNGERGPITASLQETFFAAVAGKSERYAHWLTRVVR

SEQ ID NO: 49563 - protein, 367 aa, Burkholderia fungorum
MSSNSKQSSDYPAVEVRKGQVTEKMPREAFRERFMARFYDPAFRAEDDALGRLEAIAWDAYCNARKSPVTAKAGPGFADPDYDLSVEWRAASERVKAAQIRQQERATPSRVLIVNASSRNDYTCPGEMSKSFRLGKLAQETLERKACEVDFLDLSLLNSEHDLHIHPCKGCVSTAMPLCHWPCSCYPNHSLGLVNDWMNEIYERFAACHGVLFVTPVYWYQVSSPLKLLMDRLVCADGGNPDPTSTHGKQADEAKRLELAGWDYPKHLAGRAYGIVVHGDVAGIEGSRRALTDWLNWMGFIEAGAKSRLDRFIGYYEPYATSHATLDRDADMQKEVVNVAEAVALCVAQIRNGRKEPDEHLEPARAK

SEQ ID NO: 49564 - protein, 301 aa, Burkholderia fungorum
MSTTATEPNAASTVKAESAIRTPWSEFWRKFRKQHVALAAGIFVLLLIALAIAAPHIVPYDPENFFDYDALNAGPSAAHWFGVDSLGRDIFSRILAGSRISLEAGFLSVAIGAVIGTFFGLLAGYYEGWWDRITMRVADVLFAFPGILLAIGVVAILGNGMINVICAVAIFSIPAFARLVRGNTLMLKQLTYIEAARSIGASDWTIIVRHILPGAISSVVVYFTMRIGTSIITAASLSFLGLGAQPPTPEWGAMLNEARADMVTAPHIALFPSLAIFLTVLAFNLLGDGLRDALDPKLDRP

SEQ ID NO: 49565 - protein, 307 aa, Burkholderia fungorum
MTAADPIAAYLSNLEHERRLSAHTLRGYTHELEELKLLAKGRPLESLSAVDIRGAVSRAHAGGLTARSISHRLSAWRAFYRWLAGRVDLPANPVATVRAPKQPKTLPKALSVDDATRLMESPPAASPEGLRDHAMLELFYSSGLRLAELVGLDARFADADGYRSAGWIKLDSAEVEVLGKGNRRRVVPVGSKALEALAAWLAVRDQMVKHDPHPLFLSARGNRLSPNVVRERVKRAALVAGIPANVHPHVLRHSFATHVLQSSGDLRAVQELLGHASITATQVYTALDFQHLAHVYDQAHPRAKKRD

SEQ ID NO: 49566 - protein, 65 aa, Burkholderia fungorum
MICPISGGGKKKKKKKKKKKKKKKKKKKKKKKKKKKKKKKKKKKKKKKKKKKKKENETTKTKKRG

SEQ ID NO: 49567 - protein, 150 aa, Burkholderia fungorum
MQIILLEKVVNLGNLGDIVKVKDGYARNFLIPNKQARRATKEALAEFEVRRAELEKVAAEKLAAAQAQGEKLAGSTVQINQKAGVDGRLFGSVTNADIAEALVKQGFAVEKAQVRLPEGPLKLVGEHAVQISLHTDVLVDVTVAVIGEHV

SEQ ID NO: 49568 - protein, 461 aa, Burkholderia fungorum
MNAPSKDPQLESLKVPPHSIEAEQSVLGGLLLDNAAWDRIADFLSQSDFYRYDHRIIFEHIGKLIAATRPADVITVYEALGTAGKAEEVGGLAYLNALAQNTPSAANIRRYAEIVRDRAVLRRLVSVADEISADAFNPQGKEVRQLLDEAESKVFSIAEDGARGTQGFLEIGPLLTEVVERIDTLYHTANPSDVTGTPTGFVDLDRMTSGMHGGELIIVAGRPSMGKTAFSMNIGEYVAVEYGLPVAVFSMEMPGSQLTMRMLGSVGRLDQHRMRTGRLTDEDWPKLTHAVQKMSEAQIFIDETGGLNPMELRSRARRLSRQCGKLGLIIIDYLQLMSGSSSGENRATEISEISRSLKSLAKELDVPVIALSQLNRGLEQRPNKRPIMSDLRESGAIEQDADVILFIYRDEVYNPDSPDKGTAEIIIGKQRNGPIGPVRLTFHGQFTKFDNFAGAQNFYSD

SEQ ID NO: 49569 - protein, 136 aa, Burkholderia fungorum
MASIQKSAQGVCMRHYEIVFIVHPDQSEQVPAMIERYKSTITSHGGQIHRIEDWGRRQLAYMIEKLAKAHYVCMNIECDQTTLDELEHAFKFNDAVLRHLIVKMKKAETGPSPMMKEVQREEAKKSAATQPSEAQA

SEQ ID NO: 49570 - protein, 99 aa, Burkholderia fungorum
MNRLQLTASVVEREPVRYTPAGVPIAGCTLHHRTEVVEAGIARQVELTMQAVAAGEASGKLESCQMGVETLFTGFLAKKHRNARTLVFHITALQDIGKD

SEQ ID NO: 49571 - protein, 91 aa, Burkholderia fungorum
MPRPTGKKFDKRRQQQNPLFKRKKFCRFTAAGVDHIDYKDLETLKDFIGENGKITPARLTGTKSHYQRQLDTAIKRARFLALVPYTDQHKA

SEQ ID NO: 49572 - protein, 179 aa, Burkholderia fungorum
MSAARGAVIWMTGLSGAGKSTLANALHLRLKEAGQAAIVLDGDVLRRGLNADLGFTPEDRTENLRRVAHVAALFMQQGFVVIAAVISPEHRHRRAAREIVGEGFVEVFVNAPLQVCEARDAKGLYARARRGEIAHFTGISDPFEAPLAADLVIETDRMPVNEGVDRLLAHLVTMGRVSG

SEQ ID NO: 49573 - protein, 484 aa, Burkholderia fungorum
MRHRKTRLGPPRLRAFEGREAATGSKHSVFQKDTAMTVETTSIDTLVVGAGQAGVAMSEHLSRLGVPHLVLERARIAERWRTGRWDSLVANGPAWHDRFPNLEFADVDPDAFAPKEQVADYFVAYAKKFDAPIRTGVEVKNVVRNAGRQGFTIETSEGTIEARRVVVATGPFQRPVIPPIAPQDSSLTQIHSADYRNPGQLPEGGVLVVGGGSSGVQIADELQRAGRRVYLSVGAHDRPPRAYRGRDFCWWLGVLGEWDAEVMKPGREHVTIAVSGARGGHTVDFRRLANQGITLVGLTKSFDNGVATFETDLAENIARGDENYLSLLDAADAYAARNGLDLPEEPEARVIPADPECVTHPLHDLDLAKAGVTSIVWATGYALDFSWLNVDAFDEKGKPKHQRGVAKEPGIYFLGLPWLSRRGSAFIWGVWHDAKHIADHIVTQRKYLAYYDDSQRHAQGGSEQSTGNTSADSRVHKVSELGVN

SEQ ID NO: 49574 - protein, 380 aa, Burkholderia fungorum
MIRFLHTADWQIGTQFGQFEPDEAAHLAEARFETVRRIAGEAAARKVDAVLVAGDVFDLQTVSDTVIRRLFGALQGFTGPWIMLPGNHDAALVESVWTRAQRLNCIAPNVRVVLEPGVVLLDACRCALLCAPLTQRITYDDTTGFFDTTETPAGYHRVGLAHGSVSGILQEGIDSSNPIAPTRAASARLDYLALGDWHGHLRVDERTWYAGTHEQDRFRANDPGFMLDVTLREPGAPPEVEPVRVGQYQWHRWDETIAVPTDVDSLKARLAKLGSHDVLRVTVGGTAALADAEAIHVAVEEARARVRALRVDLSGLQVLPTADDLAELGAQSGYLAKVVARLRGLQEDPQSDPQAVRRAAEALLLLARFQRELPREARSA

SEQ ID NO: 49575 - protein, 336 aa, Burkholderia fungorum
MFRFVLRRVGMVIPTFIGITILAFALIHLIPGDPIEVMMGERGVDPAMHAVAMHRLGLDESLPMQYVHYIGRALHGDLGTSIITNTSVMGEFLARFPATVELSICAMLFALIVGLPAGVFAALRRGTVVDHGVMGTALTGYSMPIFWWGLILIMVFSVKLGWTPVSGRIAVEYDIPHVTGFMLIDAMMSTDEGAFRSALSHLILPAIVLGTIPLAVVARMTRSSMLEVLREDYIRTARAKGLSPGRVIVVHALRNALIPVVTVIGLQVGTLLAGAVLTETLFSWPGIGKWLIDAIGRRDYPVVQGGILMIATLVIVVNLVVDLLYGVLNPRIRHTR

SEQ ID NO: 49576 - protein, 371 aa, Burkholderia fungorum
MSDIVERRHTLPILANLLITKNGPDVSFLSTDLELQITTRADFGVGGDSVATTVAARKLLDILRAMPDGQVTLTLNDKRLTVQSGKSRFALQTLAADEFPTVAQAKDYGANLVVPQKTFRQLLGMVHFSMAQQDIRYYLNGMLLVVDGDQLMAVATDGHRLAFSSMKIEGSFQRQEVIIPRKTILELQRLLEDIDDTLKIDIAQTQVKFTFGQVELVSKLVEGKFPDFQRVIPKSHKNQFVIGREELQRSLQRAAILTSDKFKGRALHHRAGPVEDHVDQRRSGRGAGRTGNRIRRRQRRYRVQRHVSARRAREPEGRHVAGEPGRRQLQRVDHDSRERRIQVRRHADAHLTRPETREHTKGRSAPLAFLW

SEQ ID NO: 49577 - protein, 110 aa, Burkholderia fungorum
MFVMASVSRYNRVFQSFRTPVFKDSSMVIIRLARGGSKKRPFYNIVATDSRNRRDGRFIERVGFYNPVATKGESLRIAQDRLTYWQGVGAQLSPTVERLVKEAAKAQPAA

SEQ ID NO: 49578 - protein, 244 aa, Burkholderia fungorum
MSERDSGSSGPVKAKAAAPRAKTSGQAPFGAFVRKPVEKTEGKAKANAANAGSGATEMRMETAESWPVDAVEVGAIVDAYGLKGWVKVAAHADAGHGGDALLSAKRWWLLKGQERKSAPSLQAKTHSDSVVAHLGGVTDRDVALALRGSRVYISRSEFPALGADEFYWVDLLGLDVVNVAGVSLGKVADMIDNGAHSVLRIEYPATDKSGKPVTGERLIPFVGVFVKTVDQAAKQITVDWEADY

SEQ ID NO: 49579 - protein, 103 aa, Burkholderia fungorum
MNKTFRLMLANTVLIAAGAAAVASASAAEVVVIAPSAPPPVRYEAVPAPRVGYVWDRGHWRWDHGRYVWIGGHWQAERVGYHWVPGHWVAHGPHYRWVEGHWA

SEQ ID NO: 49580 - protein, 332 aa, Burkholderia fungorum
MNTETFSTPPHTLVIASRESRLAMWQAEHVRCALHKLYPSCDVKILGMTTRGDQILDRTLSKVGGKGLFVKELEAALADGRADLAVHSLKDVPMALPEGFALSTIMEREDPRDALVSNTYDSLAALPEGAVVGTSSLRREAMLRMRYPHLEVRPLRGNLDTRLAKLDRGDYAAIILAAAGLKRLGLGERIRALLDPEDSLPAAGQGALGIEIRADRAELAAWLAPLHHEHTAAAVEAERMVSRALGGSCEVPLAAYATWHDGALHLRGIVATPDGQRVLSAQASAPATSVEQAIALGQEVAGALEQQGAMEIVRALGAANGAAAADSAVTGE

SEQ ID NO: 49581 - protein, 561 aa, Burkholderia fungorum
MAANEYDYIIVGAGSAGNVLASRLAEDADVTVLLLEAGGPDYRFDFRTQMPAALAYPLQGRRYNWAYETDPEPHMNNRRMECGRGKGLGGSSLINGMCYIRGNALDYDGWAAHAGLENWTYLDCLPYFRKAETRDIGANAYHGGDGPVHVTTSKPGNNPLFAAMVEAGVQAGFPRTDDLNGYQQEGFGPMDRTVTANGRRASTARGYLDRAKARPNLTIVTHAVTDRVLFSGKRAVGVSYLHHGNVLNAQARREVLVCSGAIASPQLLQRSGVGRSTWLRELDVPLVHDLPGVGENLQDHLEMYIQYECKEPVSLYPALQWWNQPAIGLEWMLNGTGIGASNQFEAGGFIRTRDDDPWPNIQYHFLPVAINYNGSNAIRMHGFQAHVGSMRSPSRGRVKLTSRDPNAHPGILFNYMADPLDWREFRDGIRITREIMRQPALDRYRGRELNPGAELTTDEQLDSFVRMRAETAFHPSCSCKMGYDDMAVVDNEGRVHGMQGLRVVDASIMPRITTGNLNAPTIMLAEKIADRIRGREALARVDTPYFVANGVASRKRESATV

SEQ ID NO: 49582 - protein, 491 aa, Burkholderia fungorum
AYIASDADPSKNTLATGTLTYSDMQNHSDYSASTSGFSAGTQGVMPMLGQSASGSSSATTKSGVSAGTITITDSANQKQEVASLNRDTSNLNGTVSKLPDVNTVLGNQADVMNAANAAGEAVAKDIGTYADYKQKAALDGAKAANALGETGTAAQYGQDAADWGEGGADRVGMHIVAGAVLGGLGGGNFGSALGGAAGAGVSAGLAPRLNELSNSIANGDPTGNATADRMLGQVVSNLVAGAAGAAAGGGAGAFAASNADMYNRQLHPEEKQAIKNLANGDTDKEHRLEAAGCALVHCAAEFAPGTVDYAKYSALEAEGAGYTTEQAQLRNYTGTSVSLAGYGGMVRQNSGGLFQYPVADSTADNKAMQAAMEAQRPGSVDYLTVQGGGLGVSGALTVNLHNGNVYLSGSGSVPVVPGASIVGGMVASNPGLPSGQKGSNTDDFLAGASAGGGACAFGVCGGVNHGIGGDTAFEVGVGTGGITKAPNLSGY

SEQ ID NO: 49583 - protein, 299 aa, Burkholderia fungorum
MTFAVEAIQEPIAARITGLDLRQPLSAADAQAIDNVIAQYPVLVFPAQDIDDNQLLAFSENFGPVQVSVQYATRQNEHRLQPRISDISNVGKDNETFKAGDNRRMNTFVSRRWHSDQSYQPIPARYSFLLNYSVPARGGESQFADMRLVYDSLPQDLRETIENLSAEFDILHTRAMCGFTDFPEEERAMLKPSIHRLVKTHPLSGRKTLYLSVHATHVVDWPIPEGRDLLRELMEFATQPQFIYTHHWTVKDLVMWDNRTLIHRGLRYSPPTDRREMHRATVMDEPEWTRAAAPVNVPA

SEQ ID NO: 49584 - protein, 291 aa, Burkholderia fungorum
MRRASASLTEAAYTSAIQANVRARARRIIRPSERPARLSATLFGNRMLLREESVVPALECRGLSKTYGAGRIVLAHLDFTLAPGEFVAIMGDSGVGKSTLLNLVAGLDSADSGDVIIDGSVVSRLDDNAATRLRRQKLGFVFQAFHVLPHLTLAQNVALPLLLNDLPTAAALDMLAAVGLSGRGDDFPRQLSGGELQRVAIARALVHRPKLILADEPTGNLDPDTAHDVLALFRAQSKATGAATIMVTHSEAAAAVADRILILSDGGLHASSRTSAPFGSRSPAASADDVH

SEQ ID NO: 49585 - protein, 397 aa, Burkholderia fungorum
MYNLPDERGHFGQFGGTFVAETLVHALDELRAAYGKYQKDPDFVAEYERELKYFVGRPSPIYHAQRWSDMLGGAQIFLKREDLNHTGAHKINNVIGQALLAKRMGKPRVIAETGAGQHGVATATIAARFGMECVVYMGAEDVRRQAANVYRMKLLGATVVPVESGSRTLKDALNEAMRDWVTNVEDTFYIIGTVAGPHPYPMMVRDFQRVIGDECKVQMPELVGRQPDAVIACVGGGSNAMGIFYPYIDDASVKLIGVEAAGDGIETGRHAASLIGGSPGVLHGNRTYLLQDENGQIIETHSVSAGLDYPGVGPEHAWLKESKRAEYVGITDEEALKAFHDCCRIEGIIPALESSHALAYATKLAPTLPKDKYLLVNLSGRGDKDMHTVAERSGIQF

SEQ ID NO: 49586 - protein, 587 aa, Burkholderia fungorum
MNMPSAEFSTSDTTPHPEADSIGATVLMKALADEDVEFVWGYPGGSVLYIYDELYKQDKFQHILVRHEQAAVHAADAYARSTGKVGVCLVTSGPGVTNAVTGIATAYMDSIPMVVISGQVPTAAIGQDAFQECDTVGITRPCVKHNFLVKDVRDLAATVKKAFYIARTGRPGPVLIDIPKDVSKAPCQYEPLKSVSLRSYNPVTKGHSGQIRKAVALLLSAKRPYIYTGGGIILADASRELNQFADLLGYPVTNTLMGLGGYRASDKKFLGMLGMHGTYEANMAMQHCDVLIAIGARFDDRVIGDPAHFASRPRKIIHIDIDPSSISKRVKVDIPIVGDVKEVLKELIEQLQTAEHGPDTAALADWWKDIEAWRAKDCLKFDRKSDIIKPQYVVEKAWELTDGNAFVCSDVGQHQMWAAQFYRFNKPRRWINSGGLGTMGFGLPAAMGVKMAHPDDDVLCITGEGSIQMCIQELSTCKQYETPVKIISLNNRYLGMVRQWQQIEYSKRYSHSYMDALPDFVKLAEAYGHVGMRIERTADVEPALKEALRLKDRTVFLDFQTDPTENVWPMVQAGKGITEMLMGSEDL

SEQ ID NO: 49587 - protein, 189 aa, Burkholderia fungorum
MYCGSSNGAKPLYAEAARAFGRALVQAGLALVYGGGKVGLMGVIADTVMAEGGRAIGVIPELLVNKEVGHDGLTELHVVPDMHHRKKMMADLSDAFVAMPGGAGTLEELFEVYTWAQLGYHQKAVALLNIDGFYDPLIKLLQHTVEEGFMRQTYFDILQIEADPAALIGKLQRYQPPASDKWAISRNAV

SEQ ID NO: 49588 - protein, 90 aa, Burkholderia fungorum
MSAVETSKKSEVVAQFARAANDTGSPEVQVALLTTRINELTVHFKAHTKDHHSRRGLLRMVSRRRKLLDYLKGKDADRYRALIEKLGLRK

SEQ ID NO: 49589 - protein, 163 aa, Burkholderia fungorum
MRHIISVLLENEPGALSRVVGLFSARGYNIETLTVAPTEDRSLSRMTIVSIGSDDVIEQITKHLNRLIEVVKVVDLTEGAHIERELMLIKVRAVGKEREEMKRMSDIFRGRIIDVTEKTYTIELTGASDKLDAFIEGIDATAILETVRTGSSGIGRGERILKV

SEQ ID NO: 49590 - protein, 714 aa, Burkholderia fungorum
MFNKIVKEFQWGQHKVRLETGEIARQASGAVIVDVEDTVVLATVVGARTAKPGQDFFPLTVDYLEKTYAAGKIPGGFFRREGRPSEGETLISRLIDRPLRPLFPEGFYNEVQVVIHVLSLNPEIPADIPALIGASAALAVSGLPFNGPVGAARVAYINNEYVLNPTRPQMKESALDLIVAGTERAVLMVESEAQQLSEEVMLGGVVFGHEQMQIAIDAIHDLVREGGKPEWDWQPAAKNEPLIARVTELAQADLLAAYQLRDKQARSAKLKEIYAATSAKLEEDAAAGGTVAADKATVGNVLFDIEAKIVRTQILNGEPRIDGRDTRTVRPIEIRTGVLPRTHGSALFTRGETQALVVATLGTKGDEQNIDALEGEYRERFMLHYNMPPFATGETGRVGSPKRREIGHGRLAKRALAACLPSADEFGYSIRVVSEITESNGSSSMASVCGGCLALMDAGVPMKAHVAGIAMGLILEGNKFAVLTDILGDEDHLGDMDFKVAGTEQGVTALQMDIKIQGITREIMQVALAQAKEGRLHILGKMTSAVSGANTVLSDYAPRMITIKINPEKIRDVIGKGGSVIRALTEETGTTIDISDDGVVTIASTSSEGMAEAKKRIENITLEVEVGQVYEGTVLKLLDFGAIVNILPGKDGLLHISEIANERIKDINDYLKDGQQVKVKVIQTDEKGRVRLSAKALLNDAANGAPQGEPTPQQ

SEQ ID NO: 49591 - protein, 338 aa, Burkholderia fungorum
MKVFYDKDADLSLIKGKQVTIIGYGSQGHAHALNLKESGVNITVGLRKGGASWSKAENAGLQVKEVAEAVKGADVVMMLLPDEQIAEVYAKEVHANIKQGAALAFAHGFNVHYGQVIPRADLDVIMIAPKAPGHTVRGTYSQGGGVPHLIAVAQDKSGAARDIALSYAAANGGGRAGIIETNFREETETDLFGEQAVLCGGTVDLIKAGFETLVEAGYAPEMAYFECLHELKLIVDLIYEGGIANMNYSISNNAEYGEYVTGPRIVTAETKKAMKAVLTDIQTGEYAKSFILENKAGAPTLQSRRRLTAEHQIEQVGSKLRAMMPWIAKNKLVDQSKN

SEQ ID NO: 49592 - protein, 321 aa, Burkholderia fungorum
DIASLHAVFLAFTAQTRMSGVDLPGREIRKGAADAVKNYVEANGGRFPNEVSNAVAEVARRGSTPLVVAEKGEQGARVLGVIELKDVVKGGIKERFAELRKMGIKTIMVTGDNRLTAAAIAAEAGVDDFLAEATPEAKLSTIRAHQAEGRLVAMTGDGTNDAPALAQADVAVAMNTGTQAAKEAGNMVDLDSNPTKLIEIVEIGKQMLMTRGSLTTFSIANDVAKYFAIIPAAFATTYPALNALNVMHLATPASAIMSAVIFNALIIVLLIPLALKGVRYRALGAAILLRRNLLIYGLGGIIVPFIGIKLIDMVLAAFGWV

SEQ ID NO: 49593 - protein, 944 aa, Burkholderia fungorum
MNRPDPDELLDKLQRDEEKRQRGRLKIFFGASAGVGKTYAMLQAARRRHDEGADVVVGIAETHGRSETAALLEGLDVLPLAQIEYRGRKLGEFDLDAALARKPQLILVDELAHSNVQGARHLKRWQDVYELLDAGIDVYTTVNVQHLESLNDVVGQITGIRVWETVPDRVFDSADEVTLVDLPAEELLDRMRDGKVYLPQQAERAVRNFFRKGNLIALRELALRRTADRVDAQMREYRADRSIRRIWQARERLLVCVGPGPEAPMLVRAAARLAASLKADWIAVYVETPALQRLPDARRERTLNALKLAAELGAETATLAGADAATALIGYAQARNVSKLVAGASARTGAERWLRRPLSERIAEKAGDLDLTLIRASSGRDGGEHRHLLNTTANAWREALSAARERRSPPRAYAFALAICAAITLLASQLSDHIDLTNLVMLYLLGVIFAAVKLGRGPGVVLSFMSVAAFDFFFVPPRMSLSVSDTQYLLTFFGMLLTSLVISHLTSSLRREASVARRREQRTGAMYAMARELAAALTTEQIVGIGSRHVSEVFGARVAILLPDSVDQVKQKIEDPDAAVTLEGEMLDSDVGQWVYDQQKPAGHGTDTLPAAAALYLPLKAPMRTRGVLAVVTRNEGELDVPEQQRMLDAFAAQIALALERVHYVDIARDALVNMESERLRNSLLSAISHDLRTPLTTIVGFSSMLAQSPDAQPNAELVEAIHEEALRMTGIVTNLLDMARLQAGSLQLNQQWTLLEETVGAALRACKRVLANHPVQVKLPADLPLLHLDAVLMERLFSNLFENAAKYTAPATPLTIGAQRLDTDGKSFVRVTVDDNGPGLPAGMEARVFEKFTRGEKESAKPGIGLGLAICRAIVEAHGGTIGALNRVSANGHVEGARFWFTLPVETPPEAPDALEDEGADALTHVDTDSESTPNPFAKPSHD

SEQ ID NO: 49594 - protein, 251 aa, Burkholderia fungorum
MGKVYLIGAGPGAADLITVRGARLLGLADVVLHDALVEPAMLDYAPSHARRIAVGKRCGQLSTAQQFINKQIVDAALEHDVVVRLKGGDPMLFGRADEEMRALEAAGIEYEVVPGITAALASAASLKRSLTLRGVSRSVALATFSRAPGSEEIREQVNADSLVFYMGRDSGVEIAQQLIEAGRSVATPVAIVEACSTARERMLSLTLEELAAGDAQKWVDASQPSLLMIGEAFAARQSGVVRSAGGLLVAA

SEQ ID NO: 49595 - protein, 362 aa, Burkholderia fungorum
MRAPWHDSAHVRSSDMGLLVDGQWQDRWYDTKSTGGRFVRNDAAFRNWVTADGSPGPSGAGGFEAQAGRYHLYVSLACPWAHRTLIVRALKGLDAMIDVSVVHWLMLENGWTFADGPGVVPDTVNHAALLHQVYTAADPHYSGRVTVPILWDKQRATIVSNESSEIIRMLNSAFDGIGAKPGDFYPAPLRAQIDTINARVYDTLNNGVYQAGFATTQQAYEEAVTPLFETLDWLDAKLATQRYLTGAHLTEADIRLFTTLIRFDAVYVGHFKCNLRRIADYPNLSAYTRDIYQLPGIAQTVDFTHIKRHYYESHRSINPTGIVPLGPVQDFSAPHDRARPGVSGSTCALTAAAGSQPYPVKE

SEQ ID NO: 49596 - protein, 179 aa, Burkholderia fungorum
MAELATIARPYAEALFGVAEAGDIAAWSTLVQELAQVARLPEVLSIASSPKVSRAQVSELLLTAVKSPLKDNAQAKNLVQMLVDNHRLPLLPEIAVQFEELKNAREGAADVLIVSAFPLEGAQLNDLVASLERKFKRKLKPTVEVDSSLIGGVRVTVGDEVLDTSVRARLASMQTALTA

SEQ ID NO: 49597 - protein, 156 aa, Burkholderia fungorum
MNLNATLFAQMVVFLILAWFTMKFVWPPLINALDERSKKIADGLSAAEKGKAELEAAHKRVDQELAQARNDGQQRVADAEKRAVAVADEIKAQAQAEAARIIAQAKADAEQQVVKARETLRGEVAALAVKGAEQILKREVDQAAHADLLNQLKAEL

SEQ ID NO: 49598 - protein, 91 aa, Burkholderia fungorum
MIMQAFIANIQGLTAIGIGIIIGLGAIGACIGIGLMGGKYIEACARQPELMNPLQTKMFLLAGLIDAAFLIGVGVAMLFAFANPLLSKLAG

SEQ ID NO: 49599 - protein, 199 aa, Burkholderia fungorum
MEYTFLSATILLILITDPLGNIPLFISCLRGVSPKRRTIVILREVAIAFAILLVFMVAGDGFLRMMSLTDQSLRIGGGIVLFLIALRMVFPHPDGPFGGDTRGGEPLIVPLAIPALAGPSALATVMLLTSQAPGKMFEWIAALTVTMIVCAVVLMLAERIQAWLGERAMMAFERLMGLVLVAISVEMMLGGIRSFVHQL

SEQ ID NO: 49600 - protein, 124 aa, Burkholderia fungorum
MYNHGFPRAVRGKNEHRVRFSMYAVIKTGGKQYKVAVGEKLKVEQIPADIDAEITLDQVLAVGEGESIKFGTPLVSGASVKATVVSQGRHAKVTIFKMRRRKHYQKHGGHRQNYTELRIDAINA

SEQ ID NO: 49601 - protein, 87 aa, Burkholderia fungorum
MAHKKAGGSSRNGRDSESKRLGVKVYGGQAINAGGIIVRQRGTRMHPGENVGMGKDHTLFALTDGHVNFSTKGAAKKHMVNVVPAAV

SEQ ID NO: 49602 - protein, 373 aa, Burkholderia fungorum
MKFIDEARIEVIAGDGGDGSASMRREKFVPFGGPDGGDGGRGGSVIAVADRNINTLIDYRYAKKHLARNGENGRGADCYGKGGDDITLRMPVGTTITDMETGELIADLTEHNQSVQIAQGGAGGLGNLHFKSSTNRAPRQKTDGKPGERRMVRLELKVLADVGLLGMPNAGKSTFISSVSNARPKIADYPFTTLAPNLGVVRVGPSRSFVIADIPGLIEGAAEGAGLGHQFLRHLQRTGLLLHIVDLAPFDESVDPVAEAKAIVNELRKYDELLYEKPRWLVLNKLDMVPEDEREARVSAFIEGFGWDGPVFEISALTGQGCENLCYAVFDYIAAHSDAQRAAEAEDLAADVRFRAKPADPVAADDSGVDPQQ

SEQ ID NO: 49603 - protein, 1001 aa, Burkholderia fungorum
MQTTDNVTTRYEGSPTGQAFGQAQGAQALAPQATFADYKVIRRNGSVVSFEPSKIAIAVTKAFLAVNGGQGAASARVRELVEQLTQNVVRALVRSRPNGGTFHIEDIQDQVELALMRGGEHNVARAYVLYREKRTQARGHDDQIVANTPGLNVTDNGVTRPLDMAALRGIIELACSNLGDAVSADPIIAETVKNLYDGVPMSQVYDSAILAARTMIEKDPAYSQVTARILLHTIRREILEEEVTQTEMGERYAEYFPQFIKRGVQAELLDDKLLQFDLKRLGAALDNNRDLQFGYLGLQTLYDRYFLHHDGVRIEMPQAFFMRVAMGLSLNEIDREARAIEFYNVLSTFDFMSSTPTLFNSGTRRSQLSSCYLTTVDDDLDGIYEALKENALLSKFAGGLGNDWTRVRALGSHIKGTNGKSQGVVPFLKVVNDTAVAVNQGGKRKGAVCAYLETWHLDIEEFLELRKNTGDDRRRTHDMNTANWIPDLFMKRVMEGGDWTLFSPSTCPDLHDKFGAEFETAYTAYEDKVARGEIKLFKKIPAAQLWRKMLGMLFETGHPWITFKDPCNVRSPQQHVGVVHSSNLCTEITLNTSDAEIAVCNLGSVNLVAHLKEQADGTLVLDHDKLKRTVSVAMRMLDNVIDINYYAVAKARNSNLKHRPVGMGIMGFQDCLHLLRTPYASEEAVRFADTSMEAVCYYAYYASTELAQERGRYSSYRGSLWDRGILPQDSVKLLAEARGGYVEVDSSESMDWTELRSRIAQYGMRNSNCVAIAPTATISNIIGVSACIEPTFQNLYVKSNLSGEFTVVNDYLVRDLKARGLWDEVMVADLKYFDGTLSRIDRIPADLRAIYATAFEVDPKWLVEAASRRQKWIDQAQSLNIYMGGASGKKLDEIYKLAWVRGLKTTYYLRTMAATHVEKSTVAHGALNAVSSGGGEGSGGAAGGAAGGFGANNGAAGGAAGGFQAAAAAPAVAVEAAPEADGPVCMMRPGDPGFDECEACQ

SEQ ID NO: 49604 - protein, 411 aa, Burkholderia fungorum
MLNWDDEITAVTPSSATQQNVLRNAAGPAVGSQVGTRSAPHAPSAQDVFANDIAVAPVAHVTHAAAGTAAVSEARVNVADKRIINGQTDVNQLVPFKYKWAWEKYLAGCANHWMPQEVNMSRDIALWKDPNGLTEDERRIVKRNLGFFVTADSLAANNIVLGTYRHITAPECRQFLLRQAFEEAIHTHAYQYIVESLGLDEGEIFNAYHEVSSIRAKDEFLIPYIHVLTDPAFKTGTLEADQTLLRSLIVFACVMEGLFFYVGFTQILALGRQNKMTGAAEQYQYILRDESMHCNFGIDLINQIKLENPQLWTAEFRAEIREIFQQAVELEYRYAEDTMPRGVLGLNASMFKSYLRFICNRRCQQIGLDPLYPNEENPFPWMSEMIDLKKERNFFETRVIEYQTGGALTWE

SEQ ID NO: 49605 - protein, 578 aa, Burkholderia fungorum
MKASRFFIGTLKEAPADAEIVSHKLMVRAGMIRRVAGGIYNYLPIGLRSIRKVEAIVREEMNRAGAIELLMPAVQPAELWQESGRWEKYGPELLRFKDRKQSDFVIGPTHEEVVTDIARNQIKSYRQLPVNFYQVQTKFRDEIRPRFGVMRGREFIMKDAYSFDKDMDGLRESYRKMYDAYVRIFTRLGLDFRAVAADNGSIGGSGSHEFHVIAETGEDAIAYCPTSDFAANVEAAEALPLHAERAAPAEEMKKTATPGKAKCEAVAELLNIPLERTIKSIILATENEGAEPTIWLLMLRGDHDLNEIKASKLPGLADFRMATEAEIIETFGTPPGYLGPLNTKKPVKVVADRTVANMSDFVVGSNEVDYHTTGVNWGRDLPEPVVADIRNVKKGDPSPDGKGVIDICRGIEVGHVFQLGTKYSEAMNATCLDETGKPRPMEMGCYGIGVTRILGAAIEQNFDDRGIIWPESIAPFEVVLCPMGYDRSEAVREAADKLYATLLEAGIDVILDDRGERPGVMFADWELIGVPHRLVIGDRGLKDGKLEYQGRRDAEATLLPVEDAAQTVIAKVRAALAR

SEQ ID NO: 49606 - protein, 305 aa, Burkholderia fungorum
MLKQRTIKQIVKTVGIGLHSGRKVELTLRPAGPDTGIVFSRVDLATPVDIPASAMAIGDTRLASVLQKDGARVSTIEHLMSACAGLGIDNLYVDVTAEEIPIMDGSAGSFVFLIQSAGIEEQNAAKKFIKVTKPVEIRDGDKFARLDPYFGFKLKFTIDFRHPAVDKTGQALEVDFANTSYVREIARARTFGFAHEVEMMRELGLARGGSMDNAIVLDEYRILNNDGLRYDDEFVKHKMLDAIGDLYVVGHPLLASYTAYKSGHGLNNALLRELLAHEDSYEIVTFDDTQKAPRGFAYETQTAFA

SEQ ID NO: 49607 - protein, 936 aa, Burkholderia fungorum
MTTGFLQKIFGSRNQRLVKQYQKTVAAINALEPQIEQLTDDQLRGKTGEFRQRVASGESLDKLLPEAFAVCREASKRVLKMRHFDVQLIGGMVLHYGKIGEMRTGEGKTLVATLPVYLNALSGRGVHVVTVNDYLAQRDAEWMARLYNFLGLSVGINLSQMDHAAKQEAYAADITYGTNNEFGFDYLRDNMVYETDARVQRALNFAVVDEVDSILIDEARTPLIISGQAEDHTELYVRMNALPPLLERQIGEEKADGTGVEKPGDYTLDEKGRQVFLTESGHEKAERLLSEWGLIGEGESLYAPQNITLMHHVYAALRAHTLFFKDQHYVVQNGEVVIVDEFTGRLMSGRRWSDGLHQAVEAKEHVKIQSENQTLASITFQNYFRMYAKLSGMTGTADTEAYEFNEIYGLETVVIPTNRPPKRIDKQDQIYKTAKERYDAVIRDIRDCYERGQPVLVGTTSIENSELLSHLLKQAGLPHEVLNAKQHAREAEIVAEAGRPKRITIATNMAGRGTDIVLGGNAEKQASFLELDETLPEDEKRRRIQKLHDEWQALHDQVKAAGGLHIIGTERHESRRIDNQLRGRAGRQGDPGSSRFYLSLEDPLLRIFAGDRVRAIMERLKMPEGEAIEAGIVSRSIESAQRKVEARNFDIRKQLLEYDDVSNDQRKVIYQQRNELLEANDITETIGAMRQSVIADIVHQFVPAGSIEEQWDVPELEEVLRNEWQLDLAIQEMINESNSISADEILEAVEAAADEAYEAKVELVGRESFSAFERSIMLQTLDRSWREHLAALDHLRQGIHLRGYAQKNPKQEYKREAFELFAAMLDAVKLEVTRVVMNVQIQSPEQLEQAAEQLEEQGSHLENVEFRHAEFAEAAAAAPVAAEAATAAMIGDAMSHGSSQAAAANMSADNVPKVGRNDPCPCGSGKKYKQCHGKIV

SEQ ID NO: 49608 - protein, 428 aa, Burkholderia fungorum
MLHRKISRWWTAVAGALGAATGGGVIAVYVFGVFAKPISAEFGWSRATVSLGLTVFSIANGLGTVFLGVAMDRWGVKRTTMAMILLFGVSLASVSLLSPNLPAYLGVFAVVGFAAAAATIMPYALVVSVWFDRTRGWVLGLINAGTGLGGAIMPFYANYLLAHFGWRGGYLGVGIAVAVVPLLAMAFLVRLPEGFEENRLRDRLAAAKTAVPLHTIVRTSRHFWLLALAIFGISFATYGMLSQLTPMMLDRGVTPIVAAGVMSAASISSICSRLGAGAFLDRFFAPYVTAVIFILAAIGMLLVSGSHSVLLLTCGAVLLGLGLGAEGDLLTYLVSRYFSIYSFGSVTGAIWLTFAWGGASGIYLLNRSFDVTHSYKPAAYSFVAIVVLAAIAVSRLGPYRFPPAHKGSHASSSDSELGDETAGAVSRL

SEQ ID NO: 49609 - protein, 409 aa, Burkholderia fungorum
MKKPTLLAIAVASTAASAVHAQSSVTLYGLIDQGLNYVSNVQTGRVDGALVGKRQIAMSDGATGIGGSRWGLKGNEDLGSGLRAIFTLENGFNINTGGLAQGGLLFGRQAFVGLANQAGQVTLGRQYSIVSDMLAPLSEAGEIPGHMGANPDDFDDLGHSIRLNNTIKFKSTSFSGVTLGALYSLGGVPGATGRNQVWALAATYANGPFAAGAGYLNARDPNLSYFGTNGNSGNSSTNNLGSFGSDTTAQSNPVYAGFASATTLQLIVAGMKYHFGPVSVGATWSHAGFGGLGNTSAGPNPLHYAGTAALNNGALNVSYTFTPAFNVNAAYSYTHKGSVGEFGSANYHQGTLSAAYYLSKRTQLYALAIYQKASGTDSLGQSAVASITQLTPSATDHQALVRLGILHTF

SEQ ID NO: 49610 - protein, 328 aa, Burkholderia fungorum
MTLRDGMHAIRHQYSLADVGRIARALDQAGVDSIEVAHGDGLRGSSFNYGFGAHTDLEWIAAVAEVVEQAKIATLLLPGIGTIHDLKAAYDAGARVVRVATHCTEADISRQHIEYARSLGMDTVGFLMMSHMTTPENLAVEARKMESYGATCIYVVDSGGAMNMNDIRDRFRALKEALDPATQTGIHAHHNLSLGVANSIVAVEEGCDRVDASLAGMGAGAGNAPLEVFIAAAERLGWNHGTDLYALMDAADDIVRPLQDRPVRVDRETLALGYAGVYSSFLRHSEVAADRYGLKAVDILVELGRRKMVGGQEDMIVDVALDLLRNPA

SEQ ID NO: 49611 - protein, 388 aa, Burkholderia fungorum
MWPAHGPASGRTDLGDAMSLEPFIDSKPFTFGVELEMQIVNTHDYDLTKAGSDLLRLIKDEKIPGNITPEITESMIELSTGICTTHEQAVADLRKIRDTLVSAADHLNVGLCGGGTHAFQQWSERQIVDTPRFQYLSELYGYLAKQFTVFGQHVHIGCPDPNSALYLLHSMSRFIPHFIALSASSPFVQGVDTGFHSARLNSVFAFPLSGRAPFVLTWDSFEEYFSKMVHTGVVNSMKDFYWDIRPKPGFGTIEVRVMDTPLSVDRAAAIACYIQTLARHLLLDKPISPKEDDYLVYTFNRFEACRFGLAGTCINPQTGERKTISEDILETLDRIAPHAEALGSGNALAEIGAIARSQVNDATWLRGVVEREKSLHEAVRQQCLEWRA

SEQ ID NO: 49612 - protein, 523 aa, Burkholderia fungorum
MLVAVEETATAMGKESGQTAVYGRGNPAGYTALFTLRQIAFAALALLGALPTWSGAQIVPGGAHAPSVAQTQNGLDQVDINRPSGGGVSVNTYNQFDVQQRGAILNNSPTIVQTQQAGVINGNPNLGAGQSARVIVNQVNSSAASQINGYLEVAGQRAQVVIANGSGISVNGGGFINTSRAILTTGTPNYGADGSLTGFNVTGGNVTIDGAGLNAGNVDQVDLIARAVRANAAIYAKNLNVITGANSVDHDTLNATAVAGNGPAPGVSIDVSSLGGMYANRIVLVGTEYGVGVSTKGVLAAQAGDLILTTQGKLVLAGQTNASGNIAINAHDGIDNSGTTYAQQNVSANTSGALNNSGTLVAQQDATINAGSVASGGTLGAGINGDGSIAQAGELNLNASGALSATGRNAAGGNATVQGASVNLPGSSTSANRNLVLTATGGDLNTSGATTTAGGALTASTAGALTNDNGVMSSGGAQTVNAAALSNRSGQMVAGGTLSENVTGAVSNTGGTMQAARCRRRAR

SEQ ID NO: 49613 - protein, 416 aa, Burkholderia fungorum
MAARRFIWIPMSHVTRSRPDGRLILLLGALAACGPISIDMYLPSLPTIAQAFAISTGAAQTTLTSFMFGFSIGMLLYGPLSDTYGRRPVLLGGIVMYALASVACALSFSIGSLVIFRFVQALGAGAASVLARAIARDAHGPADAARVLSMLAIVTSIGPLLAPLIGGQLLLLGGWRVVFIVLTLFGTVCAVTAFLKVPETWPREKRAQSALLKSFGAYGKLLRDPVAWGHMLCGGMAFASMFAYITATPFVYIEYFHVSAQHYGFLFALNIVGIMFGNFMNTRLVGRLGPLPLISFAATVSCIASLFVCLVSLTGWGGLWSIVFGLFFVVGVVGLLSANCTTDLMHRYPVNAGAAAAVFGAVQLALGALSSLAVGLWQDGSPKGMGVVVGAAGLLCYLGRILVVRWHGTRAPVAVV

SEQ ID NO: 49614 - protein, 341 aa, Burkholderia fungorum
MHSIRRTVDMPLLEVKDLSVRFTRREGAPVDAVQRVSFSLEAGRTLGIVGESGSGKSQTVMALLGLLAGNGKVSGSATYRGENLLAMNEAALNRIRGDRIGMIFQDPMTSLNPFLTIERQMTETLELHRKMSRREARRRAIETLESVRIPDAARRINMYPHEFSGGMRQRVMIAMALLSEPEILIADEPTTALDVTVQAQIIELLRELNRERGTAIILITHDMGVVAGLCDDVMVMYAGQTVEQASAAALFAAPTHPYTLGLLNALPRLTDDDDERPLQTIPGNPPLPGEVGAGCAFAPRCGYCTERCRESRPSLVAEEGYPDALRACFRPAGEILEAQHV

SEQ ID NO: 49615 - protein, 762 aa, Burkholderia fungorum
MYVSPRRYRMSSEAKCPFNHAAGGGTTNRDWWPKQLRLDLLSQHSGKSNPLDGGFNYAEAFRSLDLAAVKKDLAALMTDSQDWWPADFGHYGPLFIRMAWHSAGTYRIGDGRGGAGRGQQRFAPLNSWPDNVSLDKARRLLWPIKQKYGQKISWADLLILTGNVALETMGFKTFGFAGGREDTWEPDLDVYWGNEKTWLGGDVRYGKGAAGDNDDGGVIVADEEKHGEEVSRDNSGRNLENPLGAVQMGLIYVNPEGPDGNPDPLAAAHDIRETFARMAMNDEETVALIAGGHTFGKTHGAGPADNVGPEPEAADLENQGLGWKNSFGTGKGADTITSGLEVTWTTTPTKWGNGFFENLFKYEWELTKSPAGAHQWVARDAGETIPHAHDPSKKLRPTMLTTDLSLRFDPVYEKISRRFLENPDQLADAFARAWFKLTHRDMGPRARYLGPEVPAEELNWQDPIPALDHPLVNEQDIASLKQKILASGLSVSQLVSTAWASASTFRGSDKRGGANGARIRLAPQKDWPVNQPEQLAKVLKVLEGIQSEFNGVQSGGKKISLADLIVLGGAAAIEQAAKSAGQQVSVPFSPGRMDASQEQTDVQSVAALEPLADGFRNYLKGKYRAPAEALLIDKAQLLTLTAPEMTVLLGGLRALNVHAGQDSHGVFTHRPQTLSNDFFRNLLDMGTEWKPLSPARDVFEGRDRKTGELKWTGTRVDLVFGSHAQLRALCEVYASEDAQEKFVRDFVAAWAKVMDLDRFEIA

SEQ ID NO: 49616 - protein, 281 aa, Burkholderia fungorum
MTSDIASVSLPDGERIPKLGQGTWEMGEVPARRAAEIDALRCGIELGMTLIDTAEMYGDGATESLLGVALAGLRDKVFLVSKVYPHNASRRGVIAACEQSLKRLKTDQLDLYLLHWRGSVPLAETVEGFEALRRAGKIRHWGVSNFDTADMEELVATPGGDACATNQILYNVARRGPEFELLPWLAARKMPAMAYSPVDHARLPKRSPLDNIADARGVSVFQVALAWVLLAPGVFAIPKAGRAEHVRDNHRAAQLQLGADELAAIDAYFKPPRSKRPLEML

SEQ ID NO: 49617 - protein, 354 aa, Burkholderia fungorum
MPVSSAIATTVPSATLAPVTAAGASAKAAAETATEAAAKTTTFATAETAAKATAFTAACTGACTGAAAGASATAAATASAAAASATAASAAAASAAAASAAAASAAAASAAAASAAAASAAAASATAASAAAASAAAASAAAASAAAASAAAASAAAASAAAAPAAAAPAATASAATASITTSVAVPLAAPACTGAATARTRRPGCAAGAAVARTRRPVAAAAATTGRASTDVGAAAVVRPKHQRGIIGGGRLAGRDARARRAGSRAARRGAVVLRELRRAMHGAGWQRSIGEHDPLRDHIRRGRIRDLSRYRNYTCYDRSAPYHPAVVLIESRGLHHVSPEGTTAPRCRHLSR

SEQ ID NO: 49618 - protein, 221 aa, Burkholderia fungorum
MRLILLGAPGAGKGTQATFIKEKFGIPQISTGDMLRAAVKAGTPLGLEAKRFMDAGELVTDELIINLVKERLQQPDCANGYLFDGFPRTIPQAEAMKQAGVAIDYVLEIDVPFEEIIVRMSGRRSHAASGRTYHVKFNPPKVEGLDDVTGEPLIQRDDDKEETVKKRLEVYEAQTKPLIEYYTNWAKNGDSSTPLKAPQYRRISGLGSVDEIRERAFEALK

SEQ ID NO: 49619 - protein, 459 aa, Burkholderia fungorum
MNPESPFFSSAAPGGEVVVPVSALNRAIGTMLERSFPLVWVAGEVSNFTRAASGHWYFSIKDAQAQMRCVMFRGRAQYAEFTPREGDRIEVRALVTMYEPRGELQLNVEAVRRTGQGRLYEAFLRLKAQLEAEGLFAAERKRPLPSHPRAIGIVTSLQAAALRDVLTTLSRRAPHIPVIVYPAPVQGAGVSGKLAAMVDAANARREVDVLIVCRGGGSIEDLWAFNEEVLARAIAESAIPVVSGVGHETDFTIADFAADVRAPTPTGAAELVSPQRVLLLRELDHRHATLARGFGRMMERRAQQLDWLARRLVSPAERLARQRTHLQQLSVRLASGGTRPVRDARARFSLLQMRWQRWRPDLAGHRAKLGNLAGRLDTALLRQHERQTARIDTLAARLEVLSPQRTLERGYAAVLDAQSGRAVRAPSSLKPGRRLTVHLAEGAADIALADVQPRLTDGF

SEQ ID NO: 49620 - protein, 178 aa, Burkholderia fungorum
MEQFHGTTIVSVRRGDKVALGGDGQVTLGNIVMKGGAKKVRRIYNGKVMVGFAGGTADAFSLLDRFEAKLEKHQGNLTRAAVELAKDWRTDRMLRRLEAMLIAADATTTLVITGNGDVLDPEGGICAIGSGGAYAQAAAKALADNTELSPREIVEKSLEIAGDMCIYTNHNRVIETIE

SEQ ID NO: 49621 - protein, 347 aa, Burkholderia fungorum
MAYEAASERYSDMQYRVCGKSGLKLPALSLGLWHNFGDTTPISTQRDILRTAFDLGITHFDLANNYGPPYGSAETNFGRLFKDDFKPYRDELLISSKAGWDMWPGPYGQGGGSRKYVLASLDKSLQRMGLDYVDIFYSHRFDAETPLEETAGALASAVQQGKALYIGISSYSASKTLEMAKLLAEYKVPLLIHQPSYNMLNRWIEHELLGALEKAGAGAIAFTPLAQGLLTSKYLNGVPEDARVNKPGGGSLKQEHLSPQNIEHVRKLNDIAQRRGQSLAQMALAWALRDPRVTSVLIGASRAEQVRENVGALKNLAFSKDELAEIDRYATEGGINLWEKPSTDQAI

SEQ ID NO: 49622 - protein, 409 aa, Burkholderia fungorum
MKLNRNHKTGVCNVANDYLFTSESVSEGHPDKVADQISDAILDAILAQDKYSRVAAETLCNTGLVVLAGEITTTANVDYIQVARNTIKRIGYDNTDYGIDYRGCAVLVAYDKQSPDIAQGVDRAHDNNLDQGAGDQGLMFGYACEETPELMPLPIHLSHRLVERQANLRRDGRLPWLRPDAKSQVTVRYVDGKPHSIDTVVLSTQHSPDIDLGTLREAVIEEVIKPTLPADLIKGDIKFLVNPTGRFVIGGPQGDCGLTGRKIIVDTYGGAAPHGGGAFSGKDPSKVDRSAAYAGRYVAKNIVAAGLASRCLIQVSYAIGVAQPTSVMVNTFGTGRVSDAVITRLVQEHFDLRPKGIIQMLDLLRPIYEKSAAYGHFGREEPEFTWESTDKALALAEAAGTEPVAALAE

SEQ ID NO: 49623 - protein, 111 aa, Burkholderia fungorum
MLRRSTTFSGDCMALTLTDVKRIAHLARLELADAEAEHTLVQLNDFFGLVEQMQAVDTTGIAPLAHPIEQIEDVALRLRDDTVTETVEREAFQRPAPAVQDGLYLVPKVIE

SEQ ID NO: 49624 - protein, 495 aa, Burkholderia fungorum
MHEKSLTELRAALTARECSAVELAQLYLKRIEAANSLNAFIQVDPDLTLAQAKAADALLHTGHAGPLVGLPIAHKDVFVTKGWRSTAGSKMLSNYESPFDATVVARLQNAGMVCVGKTNMDEFAMGSSNENSYFGPVQNPWDVKAVPGGSSGGSAAAVAARLAPAATGTDTGGSIRQPASFSGITGIKPTYGRVSRYGMIAFASSLDQGGPMARSAADCATLLNAMAGFDGRDSTSLVRDDEDYTRYLGQPWKEDGAGKPLAGLRIGLPKEYFGAGLADDVRASIDAALKQYEALGATLVEVSLPKTELSIPVYYVIAPAEASSNLSRFDGVRFGHRAAEYRDLLDMYKKSRAEGFGPEVKRRILVGAYVLSHGYYDAYYLQAQKIRRIIAQDFQEAFRQCDVIMGPVAPTVAWDLGAKGDDPVQMYLADIYTLSVSLAGLPGMSVPCGFGAGANAQRPVGLQIIGNYFNEARMLQVADAFQRATDWHRKAPAGV

SEQ ID NO: 49625 - protein, 494 aa, Burkholderia fungorum
MSTMTKQWEVVIGLETHAQLSTHSKIFSGASTQFGAAPNTQACPVDLALPGTLPVMNRGAVERAIQFGLAIGATVAPRSIFARKNYFYPDLPKGYQISQYEIPVVQGGQVTIQVPANEKANTPAYEKVVNLTRAHLEEDAGKSLHEDFAGMTGIDLNRAGTPLLEIVTEPEMRSAAEAVAYAKTLHTLVTWLGICDGNMQEGSFRCDANVSVRPVGQAEFGTRAEIKNLNSFRFLEEAIQYEVRRQIELIEDGGTVVQETRLYDPDKRETRSMRSKEDAHDYRYFPDPDLMPLVIDAAWVERVKSEMPELPVAIQQRFVTQYGLTPYDANVLTSSKAMAAYYEAVVSKLGPANAKAAANWLMGEVSSQLNREDLDIAASPVSSAQLALLLQRIADGTISHKIAKEIFLSIWEEKATDEAATDRIIEAKGLKQISDTGALEAIIDEVLAANQKSVEEFRAGKEKAFNALIGQAMKATKGKANPAQVNELLRKKLS

SEQ ID NO: 49626 - protein, 274 aa, Burkholderia fungorum
MSRIGRQQHRSFLFVPGNRPERYLKAWESDAGAVIVDLEDAVPIEEKDRARAAVANWISPERPVLIRVNGLATPWLEEDARVARLPGVAGVVLPKAANASDVAALLARIKRDIPVYPLIESAAGMWNVLEVASAPGVRQLMFGTLDFCVDMGMTLESGTLSPFRADMIMASRVAGIRPPVDGVTPDIDDDELLRTETVEGRKWGFAGKLCIHPRQAPVVNGCYAPSETELAWARRVLEAFERANGAAVAVEGKMVDRPVILQARRILEEDEPEA

SEQ ID NO: 49627 - protein, 1204 aa, Burkholderia fungorum
MAMSKRNNAGLVRLTLIAGAVVALLHNGTSFAGSSVDAGAADNEPASTRQNDESTAKRKNYNLDLLPQQPSDLIYLTTVTEPDSLYLKLTFDRASLPAGGYVQISNGASQDVATYRAEDLLTGPVTVRGDTAVIRTVLPRLRVLGELHLSHVDYGKPAVNASVRALIGNDERRQRACYVGTDMYRYSLPAVVAMGSGSGSVVGNGRYLLTNQHVTLGVAGKTESRGIELNYFRNSCDTTSEPNDPLRIRTDRIVAIGDGGSTDYSLVSLNDFDVQHAHTKELFGSARIRPLGDNALGDEIYIPQYGNGGLMPQVIGDLFEGKHAAVTSVGTTIKYNADTQSGSSGSPVLSRATNEIIALHYAGSDSANYGVRLTTLHKNVLPFIERENDNIVGEGNVKSVALVIPPFVLGKSVGTIASGAIVAPFPDVRMTHHGAYSEALLDSQDELTLDLGAVRYQLYFQGPAGAHDLSSQAVAGDELFIRLVPPATPSTTLSTSLAWLPLKVTDARGTLLENLIVRVENSEYDPFTVPFDASSPDVTRLSFDIANAKKDYMLDSRFDGEQYGYVALYPGEGPAQLVGSTTEPYASIQLPLKNQMGRAEVVRLRGYRATACSRRAMQSTIGCASGEYSTLRLEYLAADNPNLSAGTYDGFLPLQAQRSSATSRKILAEVHLKVASDALPVANVGESARTVVASSVEQTYALDGTGSRDPADEKLTYKWRVASGSFGIRNADQAKAQAVVPKNATGEGVYELTVTNESGKTAKATVKVTAVAPQVTISGGTQQVKDNEQASYSANANFDGATYSWKLSSAAGKQAATGSGAQWKTPVGLDAGTYTVSLDARNGAGDRSASAQQKLTVERTVALPGPEANAGADRTVVATNDTGFAYPLVGSASRDPNGQAITYQWRVVSGPFTLRNGDRADAEAIVPKGTTGTGVFELKVTNAAGKTATATTKVTAIAPAVTLTGSTTVTGSGAASYKANANFEEATYSWTLTDTSGQQVVSGSGADWNLSADVKNGNYTLKVLASSVKGQRSATATLALKVERAVAPKPVEAKISGPVEIRAGTTIELSGAQSVNPNGTPTTYLWTVPPQLGSNAETPSVRLTAPANATVGAQYTIKLSVYDTQNKLSSTASYTVTVKAGETPAGPAYPAYKAGTEYKAGELVLNYGQLYQCKPFPYAGWCSQAPPAYEPGKGWAWTDAWIKK

SEQ ID NO: 49628 - protein, 345 aa, Burkholderia fungorum
MAIVRTVLGDITPDQAGSTLTHEHIRYAYPGCELDHRCVWDFDFVAEDVGKQFEEMREGCGIKTVVELTPPEIGRHPELFAQIARRSGMNIVATTGFFPEANAMGIPFHWRRQRKEDVVNMLIRDLTEGMIYDGQKTPYRAGILKAATGSLTAKTRTPVNEKGRRIGNVETHVISAIAAAQREVGCAINTHTQPLDYAVCNPGIELLDELEEGGADPTKVIIGHAFVHPNIDQLKAICERGASVQVDHIGIPWQNDSRAQLDELIAVAMCQLADLGHLDKLVVSYDKFFSHARGPVTEEEPEQLNELVPNDYIMTEFAPRLERKGFGARELHQVMVENPKRLLAF

SEQ ID NO: 49629 - protein, 296 aa, Burkholderia fungorum
MNAQANAQPNAQATPHSYLVGLIGSGIGGSLTPAMHEEEGSQLGLHYVYRRIDLEALKLDIAALPDLLIAAERMGFNGLNITYPCKQAVIPLLDELSGDARALGAVNTVLFKDGKRIGHNTDWSGFARAFQRGLPDVSLERVVQLGAGGAGAAVAHAALTLGAKSLTLFDVDASRAASLARELQKRFPAAAISAGSSLAGSLTAANGLIHATPTGMAKLPGLPLPVELLHRDLWVADIVYFPIRTALLQAAESLGCRTLSGGGMAVYQAVDAMRIFTGLEPDAERVYRHFQSLLQR

SEQ ID NO: 49630 - protein, 333 aa, Burkholderia fungorum
MSDIQLASGASRSTPPGSASQQKAPRRAGDVIFGGLARLAAIITLLLLGGIIVSLIVASMPSIRQFGLSFLWTADWDPPSKQFGALVPIYGTIATSIIALIIAVPVSFGIALFLTELAPAWLRRPLGIAIELLAAIPSIVYGMWGLLVFAPIFATWFEKPLGAVLGGIPFVGALFQGAPIGIGILCAGVILAIMIIPYIASVMRDVFEVTPVLLKESAYGIGCTTWEVMWKIVLPFTKSGVIGGVMLGLGRALGETMAVTFVIGNTNLLDNVSLFSPGNSITSALANEFAEADPGLHTSALMELGLILFVITFIVLAISKIMLLRLEKGEGAK

SEQ ID NO: 49631 - protein, 438 aa, Burkholderia fungorum
MGFSMHSEAQSQSSSKIVSNEPVFGGQAARRKSHAVDVRWGGQLVTIGGDAPVRVQSMTNTDTADAIGTAIQIKELAQAGSELVRITVNTPEAAAAVPAVREQLDRMGVSVPLVGDFHYNGHLLLRDYPACAEALSKYRINPGNVGHGAKRDTQFAQMVEAAAKYDKPVRIGVNWGSLDQDLLAKMMDENAARSTPWEAQSVMYEALIQSAIGSAERAVELGLSRNQIILSCKVSGVQDLIAVYRELARRCDFALHLGLTEAGMGSKGIVASTAALSVLLQQGIGDTIRISLTPEPGGSRTGEVIVGQEILQTMGLRSFTPMVIACPGCGRTTSTLFQELASQIQTYLRTQMPVWRDQYPGVEKMHVAVMGCIVNGPGESKQANIGISLPGSGENPAAPVFIDGEKVKTLRGENIAQEFQQIVSDYVERRYGRAEALN

SEQ ID NO: 49632 - protein, 275 aa, Burkholderia fungorum
MSQQLQQIIDTAWENRAELSPKAAPADVREAVAHAIEQLDKGLLRVAEKKDGDWVVNQWLKKAVLLSFRLEDNAPMPAGGYSQFYDKVPSKFASYTAEDFAAGGFRVVPPAIARRGSFIAKNVVLMPSYTNIGAYVDEGTMVDTWATVGSCAQIGKNVHLSGGVGIGGVLEPLQANPVIIEDNCFIGARSEVVEGVIVEENSVISMGVYLGQSTKIYDRETGEVTYGRIPAGSVVVAGNLPSKDGTHSLYCAVIVKKVDARTRAKVGLNELLRGD

SEQ ID NO: 49633 - protein, 434 aa, Burkholderia fungorum
MSRQEQAKQLQQQWETDPRWKGVKRSYTAEDVIRLRGSVQVEHTLAKRGAQKLWESVNNEPFVNSLGALTGNQAMQQVKAGLKAIYLSGWQVAGDANVAGEMYPDQSLYPANSVPLVVKRINNTLTRADQIQWSEGKNPGDEGYIDYFAPIVADAEAGFGGVLNAFELMKAMIEAGAAGVHFEDQLASVKKCGHMGGKVLVPTRENIAKLTAARLAADVSGVPTVLLARTDAEAADLITSDIDENDKPFLTGERTVEGFYRTKPGLEQAISRGLAYAPYADMIWCETGKPDLEFAKKFADAIHKEYPDQLLSYNCSPSFNWKKNLDDATIAKFQRELGAMGYKFQFITLAGFHALNYSMFNLAHGYARNQMTAFVEMQQAEFAAAEKGFTAVKHQREVGTGYFDAVTQTVEREASTTALHGSTEDEQFFDKRVA

SEQ ID NO: 49634 - protein, 657 aa, Burkholderia fungorum
MIRFNQFSLARGTKPLFDNTTFTLNPGEKAGLVGANGAGKSTLFAVLRGELHADGGDFSIPPTWQIAHVAQETPAADKTALAYTLDGDAALRTIEARIAAASAAHDGAAEGEAHAAFADADGYTAPARAEALLLGLGFTLEQTREPVSSFSGGWRMRLNLAQALMCRSDLLLLDEPTNHLDLDAIVWLEDWLHRYPGTLIVISHDREFLDSVCNVTLHLEQQQIKRYGGNYSQFEVLRAQQIALQQSAYEKQQRTVEHLQSYINRFKAQATKARQAQSRVKALEKMELIAPAHAASPFTFEFRTPDSAPNPMMVMEDVRCGYRSESEPGVEIPIVDHVMLSIQNGQRIGLLGANGQGKSTLIKTLAGTLEPLGGHVREGKGLRIGYFAQHQLETLRPEDTPLQHLARLAPDTREQELRDFLGSFNFSGEMATSKIAPFSGGEKARLALALIIWQKPNLLLLDEPTNHLDLETRHALTMALAQFEGTLILVSHDRHLLRATTDQFMLVAKHRLQEFDGDLDDYRDWLLQHAAEQRAALKAGTASNGGNGGNGGSGSDGGADNGVNRKEQRRLEAETRQKLAHLKKPLQSRITKIEKEMDALNAEKTTLDAFVVDPASYEPGQKSKLTEAIRRQADVNARLEALEAEWLEAHEELEQIG

SEQ ID NO: 49635 - protein, 320 aa, Burkholderia fungorum
MSQRIRRRILVAAVLAIASAALPFSSAYAQNAPAHKPRVALVMKSLANEFFLTMETGAKDYQKHNASQFDLITNGIKDETDTANQIRIVEQMIVSKVDAIVLAPADSKALVPVVKKAVDAGIIVVNIDNRLDPDVLRSKDLNVPFVGPDNRKGAQKVGDYLARKLKAGDEVGIIEGVSTTTNAQQRTAGFRDAMQKVGAKVVSVQSGEWEIDKGNAVASAMLNEYPNLKALLAGNDNMAIGAVSAVRAAGKQGKVLVVGYDNINAIRPMLKDGRVLATADQYAAKQAVFGIDTALKALSEHKKQSDLSGVVETPCDLITK

SEQ ID NO: 49636 - protein, 291 aa, Burkholderia fungorum
MTIRNIVGFVATAVIFIVAILIGRVLWVHYMDEPWTRDGRVRAEIINIAPDVSGAIVDLPVKDNQLVKKGDLLMQIDPSHYQLAVEQAQAAVAARKAELQMRRDDAQRRADMDALVVSKENRENATHTASAAEASYQQALAALDAARLNLERTRVVSPVDGYVTNLSVFRGDYATVGSAKLAIVDSHSFWVYGYFEETKLPHVHVGDKAAVRLMSGGTLQGHVESISRGIYDRDNPESRELLADVNPTFNWVRLAQRVPVRVKIDSVPDNVVLAAGITCTVVITPASAKAG

SEQ ID NO: 49637 - protein, 361 aa, Burkholderia fungorum
MPPSYRFDIEIEEDLIEEVARIYGFEKIPARPPVATSEMRATNETQRSIHVIRHALAARDYAETVNFSFVDAEWEQDFAGNDKPVRLLNPIASQLSVMRTTLFGSLIHVLRTNLNRRAADRVRVFEAGRVFLHDPSIKAGELTVEGFAQPKMIGGLAYGPALDEQWGAATRTVDYFDVKGDLEAVLAPAVARFVKAEHPALHPGRSARIELNGRAVGWIGELHPRWMQKYDLPHAPILFEIEAEALMQRVLPTPAEVSKFPPVRRDIAVVVDQKIEVQALLDELQKAQSEPACKAVQKVALFDEFRPKSNTSGGLAAHEKSLAFRVTLQDTGGTLQDETVELAIQTLVARLARVYGARLRG

SEQ ID NO: 49638 - protein, 402 aa, Burkholderia fungorum
MTLTFVRRPPGLQFGGLDVRQLADRAGRTPFFAYDRSAIDIRVRELRNLLPAGMHLHYSIKANPMPAVIHHLAQRVDGFDVASAQEMALALDAGTAPDAIGFAGPGKSHDDLRRAVASGINVHVESETQLRLVTALGWELGVQPSVAIRVNPDFQVGHSGMRMGGGAAPFGVDVDQVPALLRELEAREVALAGFHVFWGSQCLHAATIIKAQRQSADLILRLASGVPRPLRFVNLGGGFGIPYFPGETPLDVKAVCEAMQDWLPPLCERLPGTTPILELGRYLVGEAGIYVCRVIDRKVSRGRTFVVTDGGLHHHLAASGNFGQVLRRNFPVVIGNRPDGVPRERCHVVGCLCTPLDRLADEVELPEAHIGDFVVIMQSGAYGRSASPVRFLSHPEPVEMLV

SEQ ID NO: 49639 - protein, 625 aa, Burkholderia fungorum
MFSKAAVWLVIALVLFTVFKQFDKPRVQEGVSYSQFMDDAKNGKVKNVIVQGRNLTVTPADGQKYQIVSPGDIWMVGDLMKYGVQVSGKADDEPNALVSALYYLGPTILIIGFWFYMMRQMQGGGKGGAFSFGKSRARLIDENNNAINFTDVAGCDEAKEEVSELVDFLRDPQKFQKLGGRIPRGVLLVGPPGTGKTLLARAIAGEAKVPFFSISGSDFVEMFVGVGAARVRDMFEQAKKHAPCIVFIDEIDAVGRHRGAGMGGGNDEREQTLNQMLVEMDGFEANSGVIVIAATNRSDVLDKALLRPGRFDRQVYVGLPDIRGREHIMKVHLRKVPISNDVDAAVIARGTPGFSGADLANLVNEAALFAARRGKRIVEMTDFEDAKDKIFMGPERKSAVIREESKRATAYHESGHAVIAKLLPKADPVHKVTIIPRGRALGVTWQLPEHDNETYSKDYLLDRLAILFGGRVAEELFLNLISTGASDDFNKATQTARAMVARFGMTDALGPMVYVDDENDATPFGRGFTRTISEATQQKVDAEIRRVLDEQYNLAKRLLDENRDKVEAMTAALMEWETIDADQINDIMAGRPPRSPKSSTPSATDASSGGSPGTEVKPGSATAPA

SEQ ID NO: 49640 - protein, 341 aa, Burkholderia fungorum
MMNSNRGTIPVAFFGIAVGALAFANLWRVAIRLWHLPAAIGTLTTAAALVVWLVILAAYGQKWLTHAAEARTEMQHPVQSSFAALGPVSTLLAAQLLQPYAHALALALFGVAIVAQLALGVYLHGRLWQGGRQPELVTPAIYLPTVAPSFVAGTAAAAFGFHQLGGLFFGAGLLSWLAIESLILHRAAVHEPLPDALRPLLGVQLAPPVVGGVTYLSLSSGTPDLFALALLGYGLYQALLLLRLLPWIRQRAFVPGYWAFSFGVAALPTMVLRMVERGATGPLEWAAPVLFVAANLIIAILVVKTLGLLVHGKLIPAIVTAAAGSRPVPQAPAASRISRAG

SEQ ID NO: 49641 - protein, 555 aa, Burkholderia fungorum
MAQYVFTMNRVGKIVPPKRQILKDISLSFFPGAKIGLLGLNGSGKSTLIRIMAGVDKDIEGEATPMPNLNIGYLPQEPQLDPNKTVRETIEEGLGDVFNAQKKLDEIYAAYAEPDADFDALAAEQAKYEAILATSDGGNAEQQIEIAADALRLPPWDAKIEHLSGGEKRRVALCKLLLEKPDMLLLDEPTNHLDAESVDWLEQFLTRFPGTVVAVTHDRYFLDNAAEWILELDRGHGIPWKGNYSSWLDQKEERLKQEESSESARQKAIKKELEWVRQNPKGRQAKSKARIARFEELNSQDYQKRNETSEIFIPVGDRLGNEVIEFKNVSKSYGDRLLLDNVSFKIPAGAIVGIIGPNGAGKSTLFRMLTGREQPDSGEIVQGPTVKLAYVDQSRDALDSSKTVFEEISGGADVLTVGKYETPSRAYIGRFNFKGGDQQKIVGNLSGGERGRLHLAKTLISGGNVLLLDEPSNDLDVETLRALEDALLEFAGSVLVISHDRWFLDRIATHILAFEGDSQVTFFDGNYQEYEADKRTRLGEEGARPKRLRYKPIAR

SEQ ID NO: 49642 - protein, 806 aa, Burkholderia fungorum
MRDAASIVSSVVFDHYDEADERRRESLLGLGNGVLFVRACAPESMFASPADDGASHYPGTYRAGLYNELETEIQGERVRSTFTPRLPDATVLAVRPRGGRWLGADTSRVLDYRHALDMSRATATRHLLLADDGRTTRIEELRFVSAAHPQIIVLRWRVTACDWTGLLDIGAGIDGDVRNANVALQRAWRGRHVTDFSARQAAPETLLATARLSGALVWLALAARTVVRGAHGALAPSQLAACGAGLFELHRVPLQAGETVCIDRVIAVCTSRDATVSDPAEAVLALVSDEFAADADALQAAHERTWASRWERIQCRSSDARLARQLNLRAFHVAQTLSGAVVHEDAGFPARGWQEAYQGHIFWDDMFVLPALLRDCPEAARAPLLYRYRRLPAARRAAAREGYAGAMFPWRSATTGGEETPRFELNPLNGHWMRDDTRLQRHVGASIAWNIWRYYCMSGDAAFLYREGGEMLVEIARFWASIARFDEARRRYVIRAVIGPDEYHNAYPGADSPGLDNNAYTNVMAAWTLRCAADALRAMPRPQRDALAVKLELGDAEAARWNAIARRIHVPFLAGGIIEQFDGFSALKPYPDVSAQARHGQRTDWRLEAAGDTVEAWQVCKQPDVLMLFALLGQPQLASLLTDLGYPFDDANARRTLDYYTGRMTHESSLSKVACAAAFAHADPQRSWQYFVDALQVDAAAGAGSSAAEGLHLGALGGAFSVVLRHYAGIDFIPHAMRLFPAWPEPLPALQLAFAYRSNRFELQGDARTVRILSDPGNLSAVAVQHVGGTCQLAPGKTIAVAARAA

SEQ ID NO: 49643 - protein, 428 aa, Burkholderia fungorum
MQLLTIGINHHTAPVALRERVAFPLEQIKPALDTFKSIWLGPSARTAPEAAILSTCNRTELYCATDDQAAREAAIQWLSRYHNLPIGELAPHVYALPQSEAVRHAFRVASGLDSMVLGETQIVGQMKDAVRTASEAGALGTYLNQLFQRTFAVAKEVRSTTEIGAQSVSMAAAAVRLAQRIFDKVANQRVLFIGAGEMIELCATHFAAQQPKELVVANRTAERGTRLAERFNGRAIPLSELPSRMHEFDIIVSCTASTLPIIGLGAVERAVKARRHRPIFMVDLAVPRDIEPEVGQLEDVFLYTVDDLGAIVREGNASRQAAVAQAEAIIETRVQNFMQWLDARSIVPVIRHMHTQADVLRRAEVERAQKMLARGDDPAAVLEALSQALTNKLIHGPTHALNRASSENRDTLIELMSGFYKHSGSTER

SEQ ID NO: 49644 - protein, 360 aa, Burkholderia fungorum
MKTSMQRKLDQLTTRLAELNDLLSREDITSNLDQYRKLTREHAELGPVVEHYALWRQAMNDAATAQELLADASMRDFAEEEIRAARERMDKLGAELQKMLLPKDPNDDRNIFLEIRAGTGGDESALFAGDLLRMYLRYAERNRWQVEMMSASESDLGGYKEVIVRIAGEAAYSKLKFESGGHRVQRVPATETQGRIHTSACTVAVMPEADEIGEVEINPADLRIDTFRASGAGGQHINKTDSAVRVTHLPTGIVVECQDDRSQHKNKDRALKVLAARIKDKQSHEQQAKEAATRKSLIGSGDRSERIRTYNFPQGRLTDHRINLTLYRLDAIMDGDLDELIAALVSEHQAELLASLGDAD

SEQ ID NO: 49645 - protein, 286 aa, Burkholderia fungorum
MTSATSTAPTTPAALLRASPLPPPEARILLTHVLGWRPTQLITRSDEPLGAELVERYRALEARRAAGEPVAQLVGAREFFGLDFEVTPHVLIPRPETELLVETALAALENLSRPRVLDLGTGTGAIAVAIASMRPDAQVWALDHSAEALAVATRNAARLLDAKRPGGAVALTQSDWYDSLDAALRFDVIVSNPPYIASGDPHLAQGDLRFEPRGALTDEADGLSAIRAIIAGAPTRLAAGGVLWIEHGYDQAEAVRKLLTARGFTQVRSERDLAGIERISGGRLAG

SEQ ID NO: 49646 - protein, 364 aa, Burkholderia fungorum
MSLKCGIVGLPNVGKSTLFNALTKAGIAAENYPFCTIEPNVGIVEVPDARLKALAEIVKPERILPAVVEFVDIAGLVAGASKGEGLGNQFLANIRETDAITHVVRCFEDENVIHVANKVDPLSDIEVINTELALADLATVEKALARYSKAAKSGNDKEAIKNAAVLEKVRAQLDQARPVRALDLSDEEKATLKPFCLITAKPTMYVANVKENGFENNPHLDAVTKFAATENAPVVAVCAAIEAEIADLDEADMEVFLADMGMEEPGLNRVIRAAFKLLGLQTYFTAGVKEVRAWTIHIGDTAPQAAGAIHTDFERGFIRAQTIAFNDFITYKGEQGAKEAGKMRAEGKEYVVHDGDVMNFLFNV

SEQ ID NO: 49647 - protein, 466 aa, Burkholderia fungorum
MPSRRRPSIRSDRMDGVQGGFMSVFTSKVVRNLFGTDAMRTIFSDDTRVANYLKIEVALAKVEAGLGVIPQDAWRDIEQKSHSFEIDWERFRIDVEAVGYPVMPFVTQLAEHCGESGEYLHWGSTTRDITDTSFVLQLREALGVLAADLDKVRRKLREMTARHRSTLMIARTHGKHALPSTFGFRCAVWYSEVERQCERLAALRAEPFVGQFGGAIGTLAAVGPRGLEVQSALMAELGLGTAEIAWFASRDRVSEVVFRIASIAQSMASIAKSLVIMTRDELAEASEGGGEQRGTSSAMPHKHNTVVPELVIVHGKMATQQVAIVMESMVQDFERDWQGHFETIAVPQTFQHAHAAVTQMHTVLSGLILHEDRMRANLDVTRGQVMAESVMMALAPKLGRKNAHHAISRLCNQALAEDRPLGEVLRADPQVAQYLGEHELADALDPAGYIGLATQVVDNVLKAHAD

SEQ ID NO: 49648 - protein, 204 aa, Burkholderia fungorum
MAVVAPLTPGTDVPETLVPVSATVVPTAVMRLLAWVTMLPTGVEEVPEVPEVPEVPEVPEVPEVPEVPEVPEVPEVPEVPEVPEVPEVPEVPEVPEVPEVPEVPEVPEVPEVPEVPEVPEVPEVPEVPEVPEVPEVPEVPEVPEVPEVPEVPEVPEVPEVPEVPEVPEVPEVPEVPEVPEVPDPEVPPSPPPPILGVLRVDPQP

SEQ ID NO: 49649 - protein, 369 aa, Burkholderia fungorum
MTRLPISAPQSRRTNKTPCFRQLCVSAALAATVFSGSYAFAQGSQSVAPAAGTSNPSRAGITQAQQQTCTPLADNPIVSQASSSLPARPRRIVVLEFMFAEDLAAVGLTPVGMADPEYYPVWIGYDNARLASVPDVGTRQEPSLEAIAATRPDLILGVGLRHAPIFAALERIAPTVLFKYGPNFTEDGAHVTQLDWSRKILRTIGCLTGREEAANAVEAKVDAGFARNAQRLAEAGRRGEQVAWLQELGLPDRYWAFTGNSTAAGVAHALGLNLWPAEATREGTAYVSSEDLLKKPKLTVLFVSATDKDVPLATKLDSPIWRFVPARSSGRVGLVERNIWGFGGPMSALRLADTMTDTLLSLPAPVAKK

SEQ ID NO: 49650 - protein, 727 aa, Burkholderia fungorum
MQNSFVAGRPTFARGQRRTPSLLSAGLLASVGLTLSTLSSSGWAQVAASDTAATLPAVSVSATKDTSVAQADTVSAGALGSRKQVDTPFSTHVVTSDEAQDLFATTANDLYKYDPAVSVTSENAISENSMFTVRGMPIDTLNSIKVDGQTFPSWDTDLSLEPFEQVELLKGLSGFMYGFGSPGGIVNYVLKRPTDTPYRSVTVGYRSAGVFTEAVDLGGRFGNDDRFGYRLNLVNEDGNTAEDHGHIRRQVASLAFDFRITPDLTWSADAFYQKRRTNGTLFGLMFGGDAGGIPDASKVTHALTQPQNYYQTEMASFGTGLDYRISENWHASLKYRFAKENRTNSDSLLFVTDPAGNYSNTLYAAMTRYFYQNVDGMVQGHFNTGSIKHDVVVGAGFETQTAEYSNSTGWNEGYFLGYGNLYNSTLLTNDEVSIGSDLYRQQRTTQAAVYASDTVQLTSRLSALVGVRYTQYREHVYDPSGAVSSQYDADPVTPTFALMFKTDPYSTLYASYVESLEQGGAASNTNLNYPDTFGPLRSKQYEVGFKTDHAKWGANLALFRVDQGYNYTNVDNIFVQDGTKRYQGLDASGWLALTSEWRVMGGVMWLDTKAVDVNDPTVEGKRIYGAPRFTVTGRIEYNPSYLRPLTLAFGGKYVGNQAVDAQNTQFVPAYTTFDLSGRYETKIAGKDVTFRAGINNLFNRRYWTTAWGYYVAPSPTRTAVASATLQF

SEQ ID NO: 49651 - protein, 247 aa, Burkholderia fungorum
MATPLASAAPPRRARNLAEFVVSYVTEQIASNALKPGDKLPTESQLMVTLSVSRTVIREAISRLQAGKIIETRHGIGSFVLEPPREKLGIDMVPATTLRDVLSILELRISLETECAGLAAQRAKPDDLARMRSALDAIEATRHNGLDSVDADLQFHISVARATGNRYFVDILTQMGSALIPRNRLDSAGIARAEPDAYLSLVNLEHESILEAITRHDAEGARAAMRMHLSNSRERLRRANEAAEANS

SEQ ID NO: 49652 - protein, 406 aa, Burkholderia fungorum
MAEESDLEKTESATPRRLQKAREEGQIVRSRELSTFALLAAGFFGVWGMSGSIGEHLQGMLRAAFTFDHAGAFETRRMLIGAGVASREGLYALLPILAFTGAAALFAPMALGGWQLSSKGLEPKFDRLNPIAGLGKMFSINGPIQLGLSLVKTLVVGVIGGTAIWNRREEILALATQPLQLALANTVHLIAVCCGMTVAGMFVVAALDVPYQLWQFHKKLRMSKEEVKREHRESEGDPHVKGRIRQQQRAIARRRMMTNVPKADVVVTNPTHFAVALQYTDGEMRAPKVVAKGVNLVAARIREIAAENNVPLLEAPPLARALYHNVELNREIPGPLYGAVAEVLAWVYQLRRFKTEGGAVPMAPTELDVPAELDKGGISDDEADQEAADTLNPAMNPDNDASGASA

SEQ ID NO: 49653 - protein, 550 aa, Burkholderia fungorum
MKASDLFVKSLEAEGVEYVFGIPGEENLDLLESLRRSKIRLILTRHEQAAGFMAATYGRLTGRIGVCLATLGPGATNLVTAAAYAQLGGMPMLMVTGQKPIKSSKQGHFQIVDVVRMMEPLTKYTRQIVSVANIPAAVREAARQAEEERPGATHLELPEDVAHEEGDGKPIPKSYSRRPVAEEKAVARAVEAITGAKHPLLMIGAGGNRKTTTKMLREFVDQIGIPFFTTQMGKGVIDESHPMWLGNATLSDGDFVHRAIDHADCIINVGHDVIEKPPFFMRSGDAGEKTVIHVNFLGAEVDTVYFPQIEVVGDIANAVWQLKESLKQRQEHWDFTRFKEIKEHFEAHLVKGQHDDRFPMYPVRIVNDVYETTPVDGIVCLDNGMYKIWFARYYRAHEPNSLLLDNALASMGAGLPSAIATKIVHPDRKVMAVCGDGGFMMNSQELETAVRLRLDLVILILRDDAFGMIRWKQENMNFPDYGMTLSNPDFVAYAQSYGAKGHRIETAAEFAPLLRECFATPGVHVIDLPIDYSDNERVLNREIKRLSAQL

SEQ ID NO: 49654 - protein, 1193 aa, Burkholderia fungorum
MSPMSDPRFVHLRVHSEFSIADGIVRLDDVVKAAAKDGQGALALTDLGNAFGLVRFYKEARGKGVKPIAGCDVWITNPDDREKPSRLLLLVKDRRGYLNLCELLSKASLTNQYRGRAEIEAGWLESGLGEGLLALSGAQQGDIGLALAAGNEEAAKRNALHWAKVFPGGFYIEVQRCGQPGGEHYVQQAVALAASLKLPVVATHPMQFMTPDDFTAHEARVCISEGDILANPRRSKRFTPEQYFRTQEEMAALFADIPSALTNSVEIAKRCNLTLELGKPKLPLFPTPDGMSLDDYLVHLSKEGLEKRLEQLYPDEAERAAQRATYYERLEFECGTIIKMGFPGYFLIVADFINWAKNNGVPVGPGRGSGAGSLVAYALGVTDLDPLRYNLLFERFLNPERVSMPDFDIDFCQHGRDRVIQYVKEKYGADAVSQIATFGTMAAKAAVRDIGRVLDLGYMFTDGIAKLIPFKPGKHVTIADAMKEEPLLQERFDNEDEVHQLLELAQRVEGLTRNVGMHAGGVLIAPGKLTDFCPLYTQGDESGVVSQYDKDDVEAVGLVKFDFLGLTTLTILDWAERYIRRLDPSKQDWSLAQVPLDDPASFSILKKANTVAVFQLESRGMQGMLKDAQPDRFEDIIALVALYRPGPMDLIPSFCARKHGREVVEYPDPRVEPVLKETYGIMVYQEQVMQMAQIIGGYSLGGADLLRRAMGKKKAEEMAQHRELFRQGAAKNGLTGEKADEIFDLMEKFAGYGFNKSHAAAYALLAYYTAWLKAHHPAEFMAANMSLAMDDTDKVKILFEDCLVNKMAVLPPDVNLSAYRFEPVAEPDGKRSRTIRYGLGAIKGSGQNAIEEILRAREEGPFIDIFDFCNRVDRRIVNRRTVEALIRAGAFDSLHANRAQLIASVSLAMEAAEQASANALQAGLFDMGDAPSQGHELVDEPEWPEKKKLQEEKAALGFYLSGHLFDAYKDEVRRFVRQKIGELKEGRDKLVAGVIASLRTQMTQRGKMLIALLDDGTGQCEVTVFNETFEAHKQLFKEDELLVVQGQARNDAFTGGIRFTVDTVMDLGRARCRYAEAVKVQMNGNADALALRRVLEAHSAGKDEPQAAAAPAASSRGGNGGGNGGGRNGGGYGGGGQRQTVQIPNGLAVQVVYRSQNAEGEMRLGDAWRVKPTDELLAALRGEFAGSSIEIVY

SEQ ID NO: 49655 - protein, 634 aa, Burkholderia fungorum
MAQETMSFQAEVKQLLHLMIHSLYSNKEIFLRELISNASDAADKLRFEAIENSALYENDPNLRIRVSYDKDARTITIDDNGIGMSRDEAIANLGTIARSGTKEFFGKLSGDQQKDAALIGQFGVGFYSGFIVADRITVETRRAGLPASEGVRWESAGEGDFAVEQIERAARGTTITLHLRADEDELLSSHRLKSIIQKYSDHVALPILMKKEEWDAEKSAMVTKDEDETVNQASALWTRSKSDITDEQYKQFYQHLSHDHQDPLTWTHNRVEGRSEYTQLLYVPTHAPFDMFNRDHRGGLKLYVKRVFIMDDAEQLLPAYLRFVKGVVDSADLPLNVSREILQESRDVKAIREGVTKRVLSMLEDLANSDNEADKEKYAGFWKEFGQVLKEGIGEDFANRERIAKLLRFASTHTDTPEQTVSLADYVARMKPEQTKIYYVTADTWQAATHSPHLEVFRKKGVEVLLLTDRVDEWILSFLTEFEGKPLQSVARGDLDLGALNDEEKEAQEKVSEEFKPLVEKMKEALKDKAKDVRLTFRLTDSPSCLVADDGEMSGYLQRMLKAAGQQAPSFHPILEVNPEHALVKGLHADSANFDDWCHLLFDQALLAEGGALEDPASFVKRTNALLLARANEA

SEQ ID NO: 49656 - protein, 369 aa, Burkholderia fungorum
MRQHLSGNKRYPLALMLEPLFRCNLACNGCGKIDYPDPILNQRLSLEECLGAVDECGAPVVSIAGGEPLLHKEMPQIVKGIIARKKFVYLCTNALLMEKKMDDYEPNPYFVWSVHLDGDQQAHDHSVSQEGVYDKAVAAIKEAKRRGFRVNINCTLFNDAVPERVAAFFDTLGPMGVDGITVSPGYAYERAPDQQHFLNRDKTKQLFREIFKRGNNGKNWSFSQSGMFLDFLAGNQTYECTPWGNPARTVFGWQKPCYLVGEGYVKTFKELMETTQWEKYGTGNYEKCADCMVHCGFEATAVMDTVAHPLKALKVSLRGPKTSGAFTKDIPLDKQRPAEYVFSRHVEIKLEEIKVSGKGKKVQTATAAH

SEQ ID NO: 49657 - protein, 430 aa, Burkholderia fungorum
MTQPVRIVIVGGGIAGLLLATRLGNRLGRRGEAHVTLVDRSPTHIWKPMLHTIAAGTTDVHQQQVFYLTHARAHGFTYRPGEMCGIDRDTQQIQLAALAMPNGEVVMGPGTLGYDILVLSTGSRANDFGTPGVPEHCHFIDSQPQAEAFNEAIRSRIVRSVVENEPLRVAIVGAGATGVELAAELSHLLDVASSYGDASIRARLHLGLYESAPRVLTAFPPDISASSEALLRRLGFEVHTRTRVTEARAQRLRLNDGSEVAADLMVWAAGVKAPDFLGKLPGIEASHANQLFVRPTLQTTHDDHIFALGDCASLTPPGNERPLPPTAQVATQQAEHLAKHLPRWLNGEPLPEFTFRDFGALVSLSDYNAFGTLGKFGFFKGGFIRGRFAQISHAMLYRRHQQALHGFGKASLLWTAERINALVQPKIRLK

SEQ ID NO: 49658 - protein, 513 aa, Burkholderia fungorum
MKVLTVHPSGLMYTRVFLRLEPLGLETVAAVLREAGHEVRLIDLQVETHRDLHRLIRNWQPDAVCFSGNYLANIPEIVDLAKSVKEKQPRCFVFVGGHSVSFTAADILRHAEGAVDCVLKGEGEASVVALLEAASHGADLLQIPGAVTQHGEGPPPHFVESLDPVRPARDLLRHRRKYFIGTLDPCASIEFARGCPWDCTFCSAWTFYGRSYRARSPEVVAGELASIREPGVFIVDDVAFVHADHGMEIGKAVQRRGIRKKYYLETRGDVLLRNREVFEFWRGLGLQYMFIGMEAIDAEGLKAFRKRINLDRNFEALAFARSLGITVAINLIADPDWDHDRFEAVRQWCLEIPEIVNISVNTPYPGTEIWLREQRRLTSLDYRLYDIQHAVLPTRLPLPEFYAELVRTQQVLNRKHLGWTALRGAAGHACHLLLRGQTNFVRMLWRFNSVFNPQLQLNDHAREVHYTMSPPPGITEQRIDVKALYVHGPIGRKGRRIDDATENFVEQTRMGAG

SEQ ID NO: 49659 - protein, 506 aa, Burkholderia fungorum
MNHADMQFLDVEFPYARQYGNFIGGEWVPPVRGEYFDNVSPITGEPFTSIPRSTEEDIELALDAAHRARKAWADTAPALRANVLNRIADRMEQNLSRIAFSESIDNGKPIRETLAADIPLAIDHFRYFASCIRAQEGTLSEIDHDTVAYHFHEPLGVVGQIIPWNFPILMAVWKLAPALAAGNCVVLKPAEQTPASILVLIELIQDLLPPGVLNVVNGFGLEAGKPLASSKRIAKIAFTGETSTGRLIMQYASQNIIPVTLELGGKSPNIFFADVVDQDDGYFDKALEGFAMFALNQGEVCTCPSRVLIDEKIYDRFMERALKRVAAIAQGHPLDPRTMIGAQASQEQLEKILSYVDLGKQEGAECLIGGERNTLGGELSKGYYVKPTVFRGNNKMRIFQEEIFGPVVSVTTFRTEEEALEIANDSLYGLGAGVWTRDGTRAYRFGRQIQAGRVWTNCYHAYPAHAAFGGYKQSGIGRETHKMMLDHYQQTKNLLVSYSEQPLGFF

SEQ ID NO: 49660 - protein, 155 aa, Burkholderia fungorum
MSTEKINLDIHKILTLLPHRYPILLVDRVLELEPHKRIKALKNVSINEPYFMGHFPSRPVMPGVLILEALAQAAALLTFSEEPHDPGNTLYLFVGIDNARFKRVVEPGDQLILNATFERHMRGIWKFRACAEVDNVVAASADLICTVRNTDADAR

SEQ ID NO: 49661 - protein, 87 aa, Burkholderia fungorum
MRALRCEQYCIADGRADAAFLHANLKIGAGRSEAAKKATGDALFALIKQHFAAEFEQHGLALSLEINEFSEAGTWKHNNLHARLKAE

SEQ ID NO: 49662 - protein, 156 aa, Burkholderia fungorum
MKLHILAVGHKMPDWIATGFDEYAKRMPPELRIELREIKPEQRSSGRPAESVMAAERIRIEAALPKNARIVALDERGKDWTTMQLAGALPSWQQDGRDVAFLIGGADGLDPDLKARADMLLRVSSLTLPHAMVRVLLAEQLYRAWTITQNHPYHRV

SEQ ID NO: 49663 - protein, 156 aa, Burkholderia fungorum
MDLRKLKTLIDLVSESGISELEVTEGEGKVRIVKNAPPVYVQPSASYAPQYAQPLPAAGGEAPAAAAAAPATPAAAAPQGHVVTSPMVGTFYRAPSPGAEPFVQVGDTVKEGQTICIIEAMKLLNEIESDKSGVVKEILVENGQAVEYGQPLFVVG

SEQ ID NO: 49664 - protein, 1082 aa, Burkholderia fungorum
MHQTQPQTPPPAAAATQAGASRPPAGGTQRIVKIRRDYNAWVGDETLEDYALRFTPRAFRRWSEFRVANTAIGAVSFLVLEAIGGALVVNYGFTNAICAILAVSLLIFLTGIPISYYAARNGVDMDLLTRGAGFGYLGSTLTSLIYAVFTFVFFALEAAIMSLALELYLKVPLSVAYVISALVIIPVVTFGITFINRLQGWTQPLWLVLLVVPYVVVLWREPHVLAEWVTFSGVSGNGHEFNLVAFGAGCTVVFSLIVQIGEQVDYLRFLPPRTRANRFRWWAALIAAGPGWIVPGAMKMLGGAFLAFLAIQHEIDPVKAVEPTQMYLVAYHYVFHSPEGALAAMTLFVIVSQLKINVTNAYAGSLAWSNFFARLTHSHPGRVVWLVFNVLIALLLVEMGVFEAISKVLALYANVAIAWIGAVVGDLVINKPLGYSPRHVEFKRAHLYDVNPVGVGAMLIASLIAALSHAGVFGTTAEALSSFIALLVAFVCAPLLAIATRGRFYLARDGRDLEEGAILRCVICENTFEREDMAHCPAYAGSICSLCCSLDSRCNDSCKPHARLPAQFGKSMRTLFPRLTLGPAGLRLAQYAGLLIAVVTLLGGVLAVQWYQSVRTLPNLDTTVHDVLLQGYLKAFFALALVGCIAAWWLVLANENRKVTQEESQRQAELLMQEIEAHRKTDAALQRASAAAESANRAKSRYVTGLSHELRTPLNSILGYAQLLLQGTDELPPARRNAVATIYRSGEHLLALVDGLLDVARIEAGKLQLNVTEISLPDFVAQLAAMLEPQATDKGLQFEFQTSGRMADVVRIDEKRVRQILINLIGNAIRFTSHGSVKVRASYAWEAITFEITDTGPGMPASELERLFLPFERGAAAREHDHGAGLGLTICRLLTELMGGNLEVQSEVGKGTRFIVKLFAPEVRAPQLLASGPLNVKGYDGPRRTVLVVDDLAEQRRIVVQTLAPLGFNVVEAASGPEALQWLGTASADLIVMDVSMPDMDGFEASRLIRDNHLSAAPVLILSANAFADDRDKGAAAGCDDYLAKPLYIPLLLDKLAALLQLHWIVEPTEAAAASAVARVDV

SEQ ID NO: 49665 - protein, 254 aa, Burkholderia fungorum
MSTSNQSNAAAVRAFRVLETLAEAGGPLSMTELVNALGLPKQTVHRILVQLMDAWLVTRGAGDRLYECSPRVRMLAVNVLMHAGPAAARHVLLEQLVAKIGETCNLTMLSGNDVVYVDRVETGWPLRMHLQPGSHVPLHCSASGKLLLSFLPKDRRERVIETLPLRGYSERTITDRDLLRKELSTTRRRLLAINNQEHLQGLIAIAVPVMLDRNRACAAIAVQAPVGRVTLDDLLAFVPDLRHAAEETAKTFRE

SEQ ID NO: 49666 - protein, 297 aa, Burkholderia fungorum
MSVEAFPMSEAFDPADSSAGVLPGGAKAGRPEARLYNGADPFSGTAGMTKADTPTLRAFALLEHLVNSDGPVSLADIAQDVALPKASLHRMLASLEAGGLVIREPGQKNAYVIGPRLAQLALGVMMHSGARRLRHAILARLVTDLGETCNLTMLHENEVLYLDRMEAPWPLRLDLKPGSHVPAHCSASGKLLLAMLPREQRSALVRALKLERFTQNTITDPELLEAELDRTAHKRIAIDNEEFLAGIVCVAAPVVDGNGTCIAAVAVHAPVSRAPLSRALEFVPRLQEAARELAATF

SEQ ID NO: 49667 - protein, 370 aa, Burkholderia fungorum
MSEPQHPQPQDTDTNEGHPAPVARAVVQPVVQPGMDSLAAVGARLTQLRESKGWTIEDVSARLKVSAIKLRALESGDISHLPDTTFALGVVRSYAKMLGADPTPFTAALRREKGVAAPDLSMPASSGKDLPRGRVSLSLGGSGQKSRSWLWGVAAVIVAVIALGMWHTNGGDSSAWLARLKASANGAAGGATGASGAVAQGQAAGSEVTAGEAASTPDAQVAAENPASATPMPAPLATGTTPSSAPAVTATAAAPKAGSQAQAAAAPGASAPAAVVAGASAATVAPAAGEAIVALRVTQDSWFSVRGQDGKEVFSGLVHAGDTKEVTGVAPFRITVGNKAGLESLTLDGQPVDPSKYAAAKGNVARFALP

SEQ ID NO: 49668 - protein, 156 aa, Burkholderia fungorum
MRLVGVENEPLGIVKLADAFRMSEQQDVDLVEIAPQAVPPVCRLMDYGKFKYSEAKKQHEAKLKQKIVQVKEVKFRPGTDDGDYNVKLRNLIRFLEDGDKTKITLRFRGREMAHQEIGMRMLERLRTDLDEVGQVEQMPKMEGRQMIMVLAPKKKK

SEQ ID NO: 49669 - protein, 724 aa, Burkholderia fungorum
MLKSLTRTVTMRGAALPGTPLGEPALLLRSIQGEEVLSQIYTYTLNCCTPLASVMPEHAAANIDLKSMIGKELTVTIELEGMGDYVPGLAGIAGAANIGAGTREISGIVTKAHYVGQSNQQSHYQLILAPWIWLADQRSDFRIFQGKTVVEIIEQVFENYMYSYQMRLSEQYPVLDYQVQYGETDFYFVQRLMAEHGIYWFFEHSDGFHRMILVDQPGAHKPVESAAYQTLWYFPPGHKIDREYVDRFTLGGSLQSGRWTTNDFDFKKPNAVLIEQNELPQKTAHSNLERYEWPGDYTNPSHGEQFARLRMEEVRAHGERARGSGNVRDIVCGTTFRLEGYPHEAANQEYLVISSSIAASEADQTTGSSEYTFKSSFLVQPATTVFRPSRKPYPKPRTSGPQTAIVTGPPDQEIWTDQYGRVKLSFHWDRSGVKDQSSSCWIRVSYPWVGTNYGSINIPRIGTEVIVDFENGDPDLPIVTGRVYNAASMPPWPLPAGATQSGTLSRSTKGGGYDNANAIRFEDMKGSEELWLHAEKDQRIEVEHDESHWVGNNRLKTIDGNETVKVNMNRTEAVALNETIAVGMNRSEIVGLNETVVVGVNRMITTGIDQAVQVGVNSMMTVGAMQTESIGSNYQLTVGSNFTSQIGNSLSQSAGQSISMTAGKMVSVNSGGTAGYSASDKLTLQCGQASISLESNGNITISGTSIDVQGSQHVGINGAIVDIN

SEQ ID NO: 49670 - protein, 618 aa, Burkholderia fungorum
  MISC_FEATURE (602)..(602): X=any amino acid
  MISC_FEATURE (603)..(603): X=any amino acid
  MISC_FEATURE (604)..(604): X=any amino acid
  MISC_FEATURE (605)..(605): X=any amino acid
  MISC_FEATURE (606)..(606): X=any amino acid
  MISC_FEATURE (607)..(607): X=any amino acid
  MISC_FEATURE (608)..(608): X=any amino acid
  MISC_FEATURE (609)..(609): X=any amino acid
  MISC_FEATURE (610)..(610): X=any amino acid
  MISC_FEATURE (611)..(611): X=any amino acid
  MISC_FEATURE (612)..(612): X=any amino acid
  MISC_FEATURE (613)..(613): X=any amino acid
  MISC_FEATURE (614)..(614): X=any amino acid
  MISC_FEATURE (615)..(615): X=any amino acid
  MISC_FEATURE (616)..(616): X=any amino acid
  MISC_FEATURE (617)..(617): X=any amino acid
  MISC_FEATURE (618)..(618): X=any amino acid
MPRGKLTPTQVQNFLNGGSGNTFGNPTQKQLPQSQRSISNPGGKGGVNLKPTDPDWKEHFHEIMDMFGNIPVIGSLFNAINAGVYLAEGNVASAMENLGYVVMDLIPGAGELKSAGNIGEDIGKLAEKTGTRLTEGEAEKAGKQIAEKQAEKQAEKRAEKRAEKQAGEQAEKDGGKAEKEKQEACRNNKGVGHPVNPITGVKFLDGEEDLDFVLPCAVPLHWQRSYFSNLVGNGWLGQGWSLPFSLCLKRVGYSVLMVDAQGHETRLPMLAPGERKRMDSTGFEVHRETSARYRFTSADCSTQYVFASLTVGEYDGAGQNDGTLPLVAIGDRYGNHQRLLYDEAGMPALIHDAGGRVLRLQFTALPVDEGGTVQRLQRVVLGSQALVSYEYSPEGDLVRVRDADGQATREYRYNNHILIEHSQPGALIARYEYDQYTLDGKVLRLENNLGQTWQFRYLPSRTEVTDALGQTRCYLFNDQKMMVGQIDAAGNATRIDVDGQGNPLRVTDPAGGVRLATYDARGNMTSLTDAAGRRTEIQYHPQWQRPTLIVDAMGAATRVAYDAAGNLIRRTNALGHVTGYAYDDDGRVIRITDAHGKHRHLXXXXXXXXXXXXXXXXX

SEQ ID NO: 49671 - protein, 466 aa, Burkholderia fungorum
MKMSYTETIGSRTYRFADLKTLMAKASPQRSGDQLAGVAAASEEERVAAKMALAQVPLRTFLNEALIPYESDEVTRLVIDDHSPQAFAEIAHLTVGDFRNWLLSSTTDADALTRIAAGLTPEMVAAVSKLMRNQDLIAAARKRPVITRFRNTVGLPGHMSVRLQPNHPTDDVKGIAASMLDGLMYGCGDAMIGINPASDNLAAITRLLLMVDDFRQRYQVPTQSCVLTHVTNTIAAIEKGAPVDLVFQSIAGTEKANAGFGISLALLQEAYEAGLSLKRGTVGNNLMYFETGQGSALSADAHFGVDQQTCEVRAYAVARKFNPFLVNTVVGFIGPEYLYDGKQITRAGLEDHFCGKLLGVPMGCDICYTNHAEADQDDMDNLLTLLGVAGINFIMGIPGADDVMLNYQSTSFHDALYVREVLGLRRAPEFEEWLESMQITDARGALLSASTQQPLLEGAPDWMGIA

SEQ ID NO: 49672 - protein, 876 aa, Burkholderia fungorum
MPCKLSLKRKYQQVPMLENYRVHAAERAALGIPPLPLTAQQTAELVELLTNPPAGEEQTLLDLITNRVPAGVDEAARVKAGFLAAVAKGQTACALISRARATELLGTMLGGYNIHPLIELLSDAEVATVAADALKKTLLMFDQFHDVKDLADKGNANARAVLQSWADAEWFTSRPEVPQSLTITVFKVTGETNTDDLSPAPDATTRPDIPLHALAMLKNARPGITPEEDGKRGPVRFIESLREKGHLVAYVGDVVGTGSSRKSATNSVLWFTGEDIPFIPNKRFGGVCLGGKIAPIFYNTMEDAGALPIELDVSKMEMGDVVELRPYEGKALKNGEVIAEFQVKSDVLFDEVRAGGRIPLIIGRGLTAKAREALGLAPSTLFRMPQQPASSGKGFSLAQKMVGRACGLPEGQGVRPGAYCEPKMTSVGSQDTTGPMTRDELKDLACLGFSADLVMQSFCHTAAYPKPVDVKTHHTLPNFISTRGGIALRPGDGVIHSWLNRMLLPDTVGTGGDSHTRFPIGISFPAGSGLVAFAAATGTMPLDMPESVLVRFKGKMQPGVTLRDLVNAIPLYAIKQGMLTVAKQGKKNIFSGRILEIEGLPELKVEQAFELSDASAERSAAGCTVHLNKEPIIEYLNSNITLLKWMIAEGYQDPRSLQRRIKAMEQWLADPQLLSPDADAEYAAVIEIDLADIHEPIVACPNDPDDVKTLSDVAGAKIDEVFIGSCMTNIGHFRAASKLLEGKRDIPVKLWVAPPTKMDQKQLTEEGHYGVFGTAGARTEMPGCSLCMGNQAQVREGATVMSTSTRNFPNRLGKNTNVYLGSAELAAICSRLGKIPSKEEYMADMGVLTANSDKIYQYMNFDQIEDFKEVADTVEM

SEQ ID NO: 49673 - protein, 467 aa, Burkholderia fungorum
MNSPHTAGAPFSQLSLPPATLANLTQLGYVEMTPIQAASLPIALAGHDLIAQAKTGSGKTAAFSLALLARLDVRNFAVQAMVLCPTRELADQVTQEIRRLARAEENIKVLTLCGGTPMRPQTASLEHGAHIVVGTPGRIMDHLERGSLPLQSLNTLVLDEADRMLDMGFFDDIATVVKQCPKERQTLLFSATYPEGIVKLSQQFLRNPKEVKLAERHDNTKIRQRFYEVTEDERLHAVGLLLNHYRPVSTLAFCNTKQQCRDLLDVLRAQGFHALALHGELDQRERDQVLIQFANRSCSVLVATDVAARGLDIAQLEAVINVDVTPDPEVHVHRIGRTGRADQEGWALSLASMNEMGRVGSLEQAQKRDVEWHKLSELTATSNEPLLPPMETLQILGGRKEKIRPGDVLGALTGEAGFAGSQIGKINVTEMSTYVAVERSVAREAVRKLSAGKVKGKKVKVRLMDDA

SEQ ID NO: 49674 - protein, 269 aa, Burkholderia fungorum
MIQIDLTGQVAVVTGGSSGIGLATAELFLRAGASVAICGRDTERLAQAEAALKAQFPQAQLLARRCNVLDADDVKAFAEAVQSRFGRTGMLINNAGQGRVSTFADTTDEAWREELDLKYFSVIRPTRAFLPMLRDASASNSNAAIVCVNSLLALQPEPHMVATSSARAGVQNLLKSLAVELAPQRIRVNSILIGIVESGQWRRRYAKEAQPGQSWEDWTAELARKKNIPLGRFGRPEEAAQALFYLATTLSSYTTGSHIDVSGGVARHV

SEQ ID NO: 49675 - protein, 452 aa, Burkholderia fungorum
MEKSAPPPAPEDWIARSLRAVWHPCTQMKHHERLPLVPVARGQGAWLYDRAGHRYLDAISSWWVNLFGHANPRINAALKDQLDTLEHAMLAGCTHEPAIELAERLSALTGNTLGHAFFASDGASAVEIALKMSFHSWRNRGFADKQEFVCIANSYHGETIGALGVTDVALFKDAYDPLIRHAHVVASPDARLAQAGETAADVARRALDHVRSLFEARATKIAALIVEPLVQCAAGMAMHDASYIAGLRTLCDQYGVHLIADEIAVGCGRTGTFFACEQAGIWPDFICLSKGISGGYLPLSIVLSRDEIFEAFYHDDTARGFLHSHSYTGNPLACRAALATLDLFAADNVIAVNAQKSAKLKAALAPLAEHEQVRNLRQCGTIFAFDALIDDAQQARTFSRRFFENALRRELLLRPIGTTVYLMPPYILDDEELALLASRTRETFDATLAETR

SEQ ID NO: 49676 - protein, 378 aa, Burkholderia fungorum
MRMRSAEPPSHPSMRIDDMTQLNIAPASTDTAAASNNNAAAGTKQLARWRVADIVSLYELPFNDLMFQAQQTHREHFDANTVQLSTLLSIKTGGCEEDCAYCPQSVHHDTGLQADKLMPVDEVLAAAKVAKENGATRFCMGAAWRNPKDRHLEPIKDMIRGVKAMGLETCVTLGMLETHQAQGLREAGLDYYNHNLDTSPEFYGQIISTRTYQDRLDTLERVRDAGINVCCGGIVGLGESRRERAGLIAQLANMDPYPESVPINNLVQVEGTPLTGTEAIDPFEFVRTIAIARITMPRAMVRLSAGREQMNEALQAMCFLAGANSIFYGDQLLTTSNPQAEADRKLLERLGIRAEAAQQMPLDQSGCEHGCDKHAAPN

SEQ ID NO: 49677 - protein, 532 aa, Burkholderia fungorum
MSTILSRIDRQSDAFRNNEAHYDALLAELRERHAHVLAGGGERLVERHHARNKMLARERIDLLLDPLSPFLELSPLAAWGMYGNAVPSAGVITGIGLIAGTPCMLIANDATVKGGSFFAETVKKHVRAQDIAGHHRLPVIYLVDCGGAYLPEQDRVFPDKDHFGNTFYRQCQMSAAGIPQIAAVFGGCTAGGAYIPALADEVVMVRGQARIHLGGPQIVKAAINEIVDGETLGGAEMHTRVSGVSDYLAENEAQALQRVRDIIANLNRPRPLSGAVREVVPPRYDIGELRGILPPGLKESYDVREVIARLVDDSGFQEFKPEFGSTLVCGTAYWCGYPVGILANNGVLFSESATKGAHFIELCNQRNIPLLFLQNITGFMVGTEAERGGIARHSAKLVYAMATARVPRLTVIIGGSFGAGNYGMCGRGFDPRFLFAWPNSRIATMSADVAATVLTDLRRSSLKAAADEAEIAEIDRVTREQFTTQSDPYYATARLWDDGLIEPSETREVIGLCLALAAAEAPATGPSPVFRM

SEQ ID NO: 49678 - protein, 290 aa, Burkholderia fungorum
MSAAQSWLFVPGDSARKIERALQGDAHALIFDWEDAVAPAAKAAARQTTAAALAAAGAPAGRCWIRVNALSTAYFDDDIAALPGAAIAGVVLPKACGVRDIERLGAVLEQCERANGLAAGVLRIVAIVTESAASVLALSEFRAPVSRLHAVMWGGEDLAADLGVANNRETRHDAHAAYRAPFQLARNLTLFAAAAAECLAIDAVFTDLHAQDALLAESAAARADGFGAKAAIHPDQVAVINRTFAPTAQERMWAQQVIAALDQQRGGLAVLNGKMLDAPHLRLAKRILSR

SEQ ID NO: 49679 - protein, 166 aa, Burkholderia fungorum
MNVFVGILLFVAWAAAVAISDCRWRRISNSIVVAGLAAAFGCALFQCGPFGISPARAGIGALIGLAALLPFFVLGVMGAADVKIFAVLGAWCGMQALPGLWMAASLAAGAHALWLLITTRTRLAELVRRSGATFELAGKASTPYAACLSVAASGWLVLHGMAGGLR

SEQ ID NO: 49680 - protein, 347 aa, Burkholderia fungorum
MFGFLRGYFSNDLAIDLGTSNTLIYMRGKGIVLDEPSVVSIRQEGGPNGKKIILAVGKEAKQMLGKVPGNIEAIRPMKDGVIADFNITQQMIKRFIQMAHESRMFAPSPRIIICVPCGSTQVERRAIKEAAHSAGASQVYLIEEPMAAATGAGLPVSEATGSMVVDIGGGTTEVGVISLGGIVYKGSVRVGGDKFDDAIVNYIRRNYGMLIGEQTAEAIKKEIGSAFPGSEVKEMEVKGRNMSEGIPRSFTVSSNEILEALTDPLNQIVSAVKIALEQTPPELGADIAERGIMLAGGGALLRDLDRLLAEETGLPVFVAEAPLTCVVRGSGMALERIDKFGGAFSYE

SEQ ID NO: 49681 - protein, 297 aa, Burkholderia fungorum
MLDYALLDALAAVVRHGSFDRAAGELNVTPSAVSQRVKLLEERVGSVLVKRGQPCVATTSGALLCRHTERVQLLEAELTGRLPALPGALVEPWPALRVAVNDDSVGTWFIDAVAQFCVEREMLLDLVIDDQDHTAQRIRDGSVQGAVTTQAEPVQGCRSTRLGRMRYLAVCSPDFLARHFAGGVTRESLRRTPCVDFNPKDQLQKRFMRRITRAELDPPLHWIPHVAGFLRACVTGLGWGMCPERMIAPHLASGELVEMAPGKPIDVDLYWQSWRLSIGWLDDFGAVLRKRAAEFLD

SEQ ID NO: 49682 - protein, 100 aa, Burkholderia fungorum
MSEINKERLMSDIKTVLADAEDLLKQAASATGERASELRETALTRLKQAREKAADVQVVVVEKGKKAARATDDYVHEHPWASIGIAAGAGVLLGLLINRK

SEQ ID NO: 49683 - protein, 128 aa, Burkholderia fungorum
MTIDTQSQRGEHSPLRRIIGSVFAILQTRLELVGIELAEEKDRLLGVLFLGLAAMMLATMALIALTALIAIAFWDTYRWQALAGITAVYAIAGLACALKARSGLRNAPMVFEATIAEFEKDRDVFRKP

SEQ ID NO: 49684 - protein, 388 aa, Burkholderia fungorum
MPLPLLALAVAAFGIGTTEFVIMGLLPDVARDLAVSIPAAGMLVSAYALGVTIGAPIVAIAVANMPRKKALMSLIGVFIVGNLLCAVAPGYAVLMAARIVTAFCHGAFFGIGSVVAAGLVAPNRRAQAIALMFTGLTLANVLGVPLGTALGQAVGWRATFWAVTGIGLVAAAALAVCLPAKIEMQKASLVHEFSVLKNPQVLMVLGISVLASASLFSTFTYITPILEDVSGFTPHAVTLVLLLFGLGLTVGSTLGGKLADWRLMPSLVAFLLAIVVILTIFAGTMHSEIPAMITIFAWGVLAFAIVPPLQMLIVDRASHAPNLASTLNQGAFNLGNATGAWLGGMAIGAGAPLTTLPWVGVATAIGALALTLWSVSIERRAQRVAVAG

SEQ ID NO: 49685 - protein, 200 aa, Burkholderia fungorum
MSLKMGRHRQFDEGEALEAALSVFWQKGYEGASFEDLSQATGVARPGLYSAFGNKEALFIKALDLYDARYMGFMSEALSEPTSLKVVERILQGSANIHTMDSAHPGCLGINGALACSDDAEPIRRELIRRRAATQLALRKRLERAQREGELPASVDGATLASFVMAISQGMAVQAKAGASKKALEGLVEYVIKTWPSASR

SEQ ID NO: 49686 - protein, 449 aa, Burkholderia fungorum
MAIKQTGDIAAQRLSPEQLSCEFSDIAPLLDASAAAAAASRCHYCYDAPCVNACPTQIDIPSFIRKISNGNLKGAAVDILSANPMGGMCARVCPTEILCEGACVRNHQDAKPVAIGALQRHATDWAMARGEVLFKRAAETGRHVAVVGAGPAGLACAHRLALAGHTVTIYDAHEKAGGLNEYGIAAYKTVDDFAQREVAWLCSVGGIEIKHGVALGRDIELDTLRKQHDAVFLAIGLGGVRALAMEGEDLGGVMNAVDFIEQVRSASDLGTVPVGRRVVVIGGGNTAVDAAVQSRKLGAASVTMVYRRGVEAMSATWAERDFAQTSGVTLITHATPMRLIGDNGVVTGVEFARASNDGGEERFVVEADMVLKAIGQTLVPVGIGRELLTLDGSRIAVDANGQTSLANVWAGGDCAATGGIDLTVQAVQDGKVAAAAIDAQFARTAAKAA

SEQ ID NO: 49687 - protein, 330 aa, Burkholderia fungorum
MSSTATPSSNAASLLAPIAEDMQQVNRVIRHRLASDVMLINQISEYIISAGGKRLRPALLLLVAGALGETTGHRHELAAVVEFIHTATLLHDDVVDESDLRRGRQTANALFGNAASVLVGDFLYSRSFQMMVGVGKMRVMEILSEATNIISEGEVLQLLNMHDADVDEARYMQVIRYKTAKLFEAAAQLGAVLAGSDAKTEAAAAEFGRRIGTAFQIMDDWLDYTGTAESMGKNAGDDLREGKPTLPLIYLIERGTPEQSALAREAIEQGGTDRFDTIFEAITRSGALDHTLECAKQEAQAAAAAISSFPDSIFKDSLLELCSYSTARQS

SEQ ID NO: 49688 - protein, 278 aa, Burkholderia fungorum
MIEITNVHKSFGAVPVLKGISLNVRQGEVVCLIGASGSGKSTLLRCINALESYDEGEIRLLGQPVEQRARNINQLRTQVGMVFQRFNLFPHRTALENVMEGPVHVKRMPRADAQREASELLMKVGLGHKLHAYPNQLSGGQQQRVAIARSLAMKPKAILFDEPTSALDPELVGEVLGVMRTLAREGMTMLVVTHEMGFAREVADRVCFLHAGLIIEEGTAQQVLGSPREARTREFLRHVLTNRSDGHDAHDGGAPAGGALSGGAHDDLAPGGVGGAAI

SEQ ID NO: 49689 - protein, 271 aa, Burkholderia fungorum
MISYPHNAGSAMTRVIQGGLDGPVVVLLHGLSARADRWKHNLDALGQAGVRAMAIDLPGHGFASKHEDFDYSAHGYSRWLDQFVQTLGVEKLVLVGTSFGGFVAAHYAADHPERVAGLMAVGAIGLVPAGEARRMKTVQWLGEMQKEQIRSRMYRGVLDPQLISEELVEEDYRINNSAGAAEAFAALARYYRERLDDDAVAARLADAASRFPVSIVWGRDDPSVSPDYGARAHQIIAGSTLTFVDDCGHFPYWERPAEFNALLTNFVKRCI

SEQ ID NO: 49690 - protein, 231 aa, Burkholderia fungorum
MTESPLTIAPLLQLGPVPITGPVLITWGIMAIVTAGAVVLSRRLSLAPGKTQTALELLVETIDQQIRDTMQTEAATYRALIGTLFVFVLVANWCALVPGVTPPTAHLETDAALALIVLGATIFYGVRSRGATGYLASFAEPSWVMIPLNVVEQITRTFSLVVRLFGNVMSGVFVIGILLSLAGLLVPIPLMALDLLTGAVQAYIFAVLSMVFIGAAIGDPHHVSVKKGEVS

SEQ ID NO: 49691 - protein, 165 aa, Burkholderia fungorum
MYAEPRWTLTPRCAQPATEGIMFRHILVPTDGSDLSRKAIEGAIDLAQAVDARVTAYACLPQYPYSPFSDVVVEPPSEFLQRSEREARVHLREVEMAARRVGVAVHSRTSVHPAPYLGIIEAAEQGGCDVIFMASHGRRGLGSLLIGSETQRVLTHTKIPVIVYR

SEQ ID NO: 49692 - protein, 333 aa, Burkholderia fungorum
MAPDCNELPVELEAQIVEQLDHPFACAASEQLGKARRLDDAAGRYIEFCKSTFPAAFDLRGLKLVVDCAHGAAYDVAPHVFHELGADVIPIGVAPNGFNINDGVGATAPDALVRAVRANHADLGIALDGDADRLQVVDAAGRLYNGDELLYILVKDRIATEGKVEGAVGTLMTNMAVEVALQEAGVKFVRAAVGDRYVLEQLREHGWQLGAEGSGHILSLDRHSTGDGIVSALLVLAAMKRSDKTLAELLGGVTLFPQKLINVRMKPDADWKGSDVIRRAIAKAEDALNGRGRVLIRASGTEPVLRVMVEAENVADAVQYAESIASAVKQATA

SEQ ID NO: 49693 - protein, 334 aa, Burkholderia fungorum
MARKITFSQAINEALSQEMARDETVIVMGEDNAGGAGSPGEQDAWGGVLGVTKGLFHKYPGRVLDTPLSEGGYIGAAVGAAACGMRPVAELMFIDFMGVCFDQIFNQAAKFRYMFGGKAVTPVVIRAMQGAGLRAAAQHSQMLTSLFTHIPGLKVVCPSTPYDAKGLLIQAIRDNDPVIFCEHKLLYSREGDVPEESYAIPFGEANVVRDGDDATIVTYGRMVHYATEAAEKLAKDGIEVEVIDLRTTSPLDEDTILESANRTGRVVVVDEANPRCSMATDISALIAQRAFRSLKAPIEMVTAPHTPTPFAGVLEDMYIPSARQIADAVLKVRG

SEQ ID NO: 49694 - protein, 568 aa, Burkholderia fungorum
MTRIVTRAASPVDAEILTRHGLHPVLARLYAARGVCMPDEIETGLARLVPPVALKGCEDAAALLADAIQSQRRMLVVADYDCDGATACAVAVRGLRMFGGRIEYLVPNRFEYGYGLTPEIVALAARNAAGKPDLLITVDNGIASVDGVQAANALGIDVLVTDHHLPGDELPPARAIVNPNQPGCTFPSKCIAGVGVMFYVLLALRAELRRRGAFNDNFPEPRLDGLLDLVALGTVADVVKLDGNNRVLVAQGLQRIRKGKMQPGIAALFRAAARDARSASGFDLGFALGPRLNAAGRLSDMSLGIECLTTDDIGRAWDLAQQLDAMNRERREIEAGMQQQALEDLSAIDPDGTTTITLFNPDWHQGVIGIVAGRLKEKFHRPSFTFALADDSGRTVKGSGRSIAGFHLRDALDLISKREPGLIVKFGGHAMAAGLTLAAADVPRFTAAFEAVGREWLSEEALSRTVETDGELEDAYFTPQFVEMLDAAVWGQGFPAPVFSGEFDIVSQALVKDKHLKLQLVRGRQRFNAIWFNHTDTLPARTTVAYRLASDTWNGVSRVQLIVEHAAS

SEQ ID NO: 49695 - protein, 280 aa, Burkholderia fungorum
MAREEGDEETLLACESDAQGIEQRVADMEFRRMFANPADPNNAFLDIQAGAGGTEACDWAAMLLRQYLRYCERKGFKTEVLEQTDGDVAGIKNATIKIEGEYAYGFLRTETGVHRLVRKSPFDSSGGRHTSFSSVFVYPEIDDSIEVDINPADLRIDTYRASGAGGQHINKTDSAVRITHLPSGIVVQCQNDRSQHRNRAEAMAMLKSRLYEAEIRKRQAEQDKLEAGKTDVGWGHQIRSYVLDNSRIKDLRTNVEISNTKSVLDGDLDPFISASLKQGV

SEQ ID NO: 49696 - protein, 522 aa, Burkholderia fungorum
MRATEYQIIMTEPTQPNAAQPNVVPEVDDNKIIAERREKLRELREQGVAYPNDFRPTHHAEDLQAQYEHSDKEALEANPLEVAIAGRMMLKRVMGKASFATVRDGSGQIQFFITPADVGQETYDAFKKWDMGDIVAARGVLFRTNKGELSVRCTELRLLSKSLRPLPDKFHGLSDQEMKYRQRYVDLIVTPETRKTFVARTKAISSIRKFMADADFMEVETPMLHPIPGGAAAKPFTTHHNALDMQMFLRIAPELYLKRLVVGGFERVFEINRNFRNEGVSVRHNPEFTMIEFYAAYTDYKWLMDFTEQLIRQAAIDALGTATITYQGRELDLAKPFHRLTITQAIQKYAPQYTNEQLADSAFLRTELKKFGVDASQPQFLNAGVGALQLALFEETAESQLWEPTYIIDYPIEVSPLARASDKVEGITERFELFITGREIANGFSELNDPEDQAARFRKQVDQKDAGDEEAMFYDADYIRALEYGMPPAGGCGIGIDRLVMLLTDSPSIRDVILFPHLRRED

SEQ ID NO: 49697 - protein, 3286 aa, Burkholderia fungorum
MLVAVSETATAAGNTVSGETGWARQAARQTVLRRSLSCFALRHAAFGAMTLAGALVISTPEAHAQIVPGGAHAPSVIQTQSGIPQVNVNRPSAAGVSVNTYGQFDVQRPGAILNNSPTIVNTQQAGYINGNPNYLPGQSASIIVNQVNSNNPSQLRGYVEVAGRRAEVVIANSSGLILDGGGFINTSRAILTTGNPTYGGNGALTGFDVTAGRITVQGAGLNASNVDQVDLIARAVAANAAIYGNTLNVVAGANHVDHDTLAATPIAGSGSLPAVSIDVSQLGGMYANRIFLASNEYGVGVSNAGVLAAQAGDLTLQSNGQLVLAGKTTASGNLAATAASIQNSGSTYAQQSVTVNTSGALSNTGTLAAQQNTNISAASLSSSGTLGAGINGDGSIGHAGDLTVAASGALGATGHTAAGGNATLSGAALSLGGSQTSASGNLTLLASIGDMSLAGASVAAGGAINATARGTLTNDNGALSSAGAQTVAAGALSNQGGQIISQSTLNIGTGGALNNRQGIIQSSGNQTLGAASIDNTAGRVVMLGNGAQSVTATGALVNAPGTTATGAPGGVIGSNGALGVSAGSIANQGQFNALGDASLHAQSIDNHAGSVTAGGNLSASSTGALNNRDGTLSGTVTTVSGASVDNSSGTVEGNTLTLSSSGNLTNRGGHISQSGNAAQRIFAGGAFDNTGGSIASNATNLDVSAQSLANDAGSIQHAGSGTLAVTTTGNLSNSAGKVVTNGALDATGAAVSNQGSLSAKGDATVRAQTLDNHAGSIVAGGALVASGIGVVDNRNGTLSGAATNVSGASVDNSNGTIEGDTLALSSSGNLSNRGGRLTQYGSADQTLSAGGTLDNTGGFVATNATNLTVSSQSVTNDTGSIQHAGSGTLALASAGTLSNTGGNVVTNGALDVSGTAVSNQGSLSAKGDATVRAQSLDNHAGSVVAGGNLGANIAGALANQSGTLSGATTTVSGSSVDNSNGTIEGNTLALSSSGNLSNRGGRLTQYGSADQTLSAGGALDNTGGTLATNAANLTVSGQSITNDAGSIQHAGTGTLNVTTPGALSDVAGQIATNGALIARSASLDNSNGTVSAQGSAQVDANTSLTNRGGTLYGKAGLTATTQGAFDNTQGSVQTDGNLSVNAGGALSNTSGTISVNGASGNAATATVSASSIDNTSGKLTNSGSGATTITAATGITNSAGTMGGNGDVTLGAQTLTNTASAKFVAARVASLNVTNRVNNSGGTIYGGTALNLNQSGASVINDSGRLEGGQDVSVRVASLANSAGALRANRDITASGVVSGDGTMTAGRNLGLAVTGDYTNGASNSLHADGNMTVSATGTLTNAGTLAASGALSASGANVVNAAGADINSASTTVNATGTLTNAGRIEGDSVTTHSATLANTGTLIGNTVQVNAADVQNTGAAAAIAAAQSLNIYASNSVTNSDGALIYSGGSLAIAKDGARDGSGMLANQTGTLTNSAATIEAVGDVDIAAHTVNNLRTGVQTQAGTPQNTGTNTLTLWTAGLSGDDLGFYDSSVYPQWNWRGGAIGTATIGALMHPITVTVPKSQVASLDANAQTLSFAQPLTDTYISTSTPLVEVCNTHDFCSQQHVSQTRTITNNATQYYNSITDNGSTYTITLWPDYNPATNIRPDNVTVRTDLGSDNHDYVEMKRVSTSTTSTDQLLSAGTPALLQAQGSIRINSDGGAINNQSSTMTAGGNLIRRAVGGSVNDSGTVLQQTVTADTQSTYYWHQKTGGSDDTKIVEDGITQSTTTVAALPAIATANGAVQTSGQTISVASVNRVGQTVVGSGVTGGNATGTQLGGVNGQAADAGTAGGVTGQTASANIATGVSGLTVRPQTLGGAAGGIPNLKLPVNSLYTYQTAPGATYLVATDPRLTTYTKFISSDYLLGALGLNPQTTEKRLGDGAYEQQLVMNQVTQLTGRTFLAGYSDNLDEYTALMNSGVTYAKSFGLTPGIGLTDAQMKQLTTDLVWLVSQTVTLPDGTQQTVLVPKLYLAQANTVDLQDSGALVAGNAVSLNATGDVSNSGHIVGDMATAVLGNNIVNSGVIGSGGTTVVSAVQDVRNTSGRIGGVQTVVQAGRDVINETATASVSNTLQQAGFTSSASSQNILATGTISASENAVVLAQRDVNLAGAAIESGNSAFVGAGRNINVGTTTLGATQDAGTNDGLNGGHTTTTQNVGSMITTGGNLTTVSGGNTTLTNATVRTGGDAAMIAANNLTLTAATDTRSHKEQSLGGPQSKHTGSSYDETAQGSNLNAARDLTLGAGQTAAAAALLKEHGLVAAADAPIGAGNLTVLGSSATTGASAADGSVSGGAATLAATGNVTIGAVTETHDSQSWSHNEHSGFMSSDKTTDQTSSHQVISVGSTVSGDTVSANAGHDLTIAGSTVASTNDMSLSAGHDLTVTTTQDTSQSSRFHQEQKSGLGGTGGAGISYGTSDRKETTTDNSVTQNGSLVGSTDGSVTMTAGNGLHITGSDVIAARDVTGKAASVTIDAATGTNHHDETQETKTSGFTLGLGGSVGDAINNAIQQSQAAGSGAGDSRAKALHGIAAAGNAAMAVAGVTGGSLAGSNPSISVQLSYGTSQSKNTFTEDQTMQTGSTIKAGGTASFTATGGGDGPASPNNGNVTIAGSSVSGNNVALSAQNEVNLINTTNTDSTRSTNRSSSASVGVSYGTNGFGVSASMSNAHGDANSDAAMQNNTHVSAANNVSIVSGGNTSIVGADVSGNHVSADVGGNLNVQSVQDTTVSAAHQSSTSGGFSISQGGGNASFSSQHGSSSGNYAAVNGQAGIQAGNGGFDINVKGNTNLTGAYIASTADASKNGLTTGTLTVSDIQNHSDYSASSGGFSAGAGIGSTGKAVGPGSVSGAGGVTPMMSQHDSGSSSATTKSAISAGTISVTDAANQAQDVAGINRDTTDLNGRVSKLPDVNNLLSAQADTMNAAQAAGQVVAQGIGAYADMKRDQASDEATAASWDEGGTDRTLLHIAGGALIGGLGGGGIGTALQGAAGAGLSAAMAKQLEDIYKGVGSATGSELLGNIAANVVAGVGGALVGGGVGASTASNVELYNQAAHRKPKDLVSQVCPAGAQCSDATLNAVIQAQGDNAAVASGNMKTAAAYGAPAAAVIALGPEAVTAAALAGGLDYTGGVYSYATGLTKDAPSVTNSYIAGVVGGLAYPLAIGDAAIAGMGTAGKIAANAYNAGVTGVGAFGTAAMTGGNPDISAGFATGSVATGSLVKAMFPGPIGNFLNNLIQGAAGPIQNAVTQGGSNK

SEQ ID NO: 49698 - protein, 919 aa, Burkholderia fungorum
MGRARSSMRAGRASVLTFGYACQVALVETAATLASPVFLRIAMQSCPLRRESGAAPFNGGQPATHAAFYFSPCRSERDARRAVRPPLAARLGAWAAALCAALILCLGGMPANALAAGAATGTPVIPALQSLINSATVTAAPASSASGASAAEVASAPSPASQAELARSLDSVISTLDNDRQRTALVAQLKKLRDVSQNVAPAAPVQPSPGLLGAIASGIASFESDVHQGRTPVRYWGGRFNAAGNELYTIISGQGHESFGRIVFSMIAMLAGWGACAGALIYVQHRLYRRFGIVMGLNPNPTTRELLIFALRRVGPWIIAFLAALLFVRAMPDALGRTLGMVVAYAIVAGAVFSAICLIMFSLFGSGHRRIAVRLLIDHARRVLFVVGVCGALGDAAVNYDVAHQLGPNLAALISTAANMTAAVLTGYFALAFRRPVAHLIRNRPYEQRTTHKAATDAFDVLAALWHVPVLVLATASVVATLGGSGSSENVLQISVVTALLLVLAFFVSAIVLRLTRPRSARTRRRSPYLTRLLRFFGTLVTLFVWLFFFELAARLWGVSLAAVVEENVAARGIAHAVTAIIATVFIAWLLWILVDTAITEALNPGGPRNKSRAPSMRARTMLPLLRNVLLVTIMTIAGIVTAANLGINVTPLLAGAGVIGLAIGFGAQSLVTDLITGLFIIIEDTISVGDWIDVDGGHAGTVEHLSIRTVRLRDGQGAIHAIPFSQIKIVKNLSRDFAYAVFEVRMSFSTDVDEITQLIREVGADLMADFRYRREMLGPIEVWGLDRFDPNWMVVKGQIKTRPLQQWSVARAFNLRLKRKMDEAGIEIPVPQMRVYTSSKDSEGQPLQDDEMSGLGPRGHAESQPGASASASAARAVHPPLAVARDVSHEPRPAPPPTGQTAPVPPQIPTAGEAGGKT

SEQ ID NO: 49699 - protein, 319 aa, Burkholderia fungorum
MDIQMFKSLHRYRAIALVSAALLIGSTAASSAFADAGPPEVSSGKTALVKHPDVSVGAQYDTTHVYVASADLDAFVNSFLATFGGKASPRAVFTVTPTPSKTASQYVQTPVGMLSVFGFETPIPYPFGNERTGYLVTDIDQGVKAARAAGADVLVESFDDPIGKDAIIQWPGGLTMQLYWHTKAPNYAPLQSVPDNRVYVSRYEANNFVRRWLHFSHGKVVSDNPRADAGVIGRPGETIREIRIASGFGRMIVFVTDGKLPFPFGRETTGYNVDDVAQTLERAQAAGAKVLYPAYAVGSGKTAMLEFPGGYIAEVHDGK

SEQ ID NO: 49700 - protein, 329 aa, Burkholderia fungorum
MPIAASVSHGFAASMKYKDYYEILGLERSASQDDIKRSYRKLARKYHPDVSKHADAEERFKELGEAYEVLKDPEKRAAYDRMGSDWRNGQDFQPPPNWDEGFEFSGAGSGPGEQADFHDIFEKMFGGARGAHPHARQRSFDARGEDHHAKVLIDLEDAYRGAQRAISLQMPVVDAQGHVSLETRTLNVTIPKGIRAGQHLRLSGQGAAGATPETAGDLYLEIAFRDHPRFQVDGRDVSLELPVAPWEAALGAKVTVPTPDGSVEMTVPAGSASGRRLRLKGKGIPANPPGDLYVILNIVLPPADTESAKAAYDAMRQAFNFDPRAHFYR

SEQ ID NO: 49701 - protein, 405 aa, Burkholderia fungorum
MLLAIAIAGTTASAAHAQSSVTLYGLIDQGFNYVSNVQTGRAGGALAGKHQYAMSDGATGIGGSRWGLRGSEDLGGGLRAIFTLENGFNINTGGLAQGGLEFGRQAYVGLANPFGQVTFGRQYSIVSDMLAPLSEAGEVPGHMGANPDDFDDLGHSIRIDNTVKFRSTPYAGVTLGGMYAVGGVAGATARNQVWALAASYANGPFAAAAGYLNARDPNLSYFGTAGNSGGNTANNLGSFGSATAGQSNPIYAGFASAATLQLLIAGAKYHIGPASIGATISHAGFGGLGDTSAGPNTLHYAGSAVFNNGEVNASYAFTPAFSVNAAYSYTRKASVGVYDGATYQQGTLSSAYFLSKRTELYALAIYQKASGTDSLGQTAVASITQLTPSASDHQLLVRLGILHTF

SEQ ID NO: 49702 - protein, 150 aa, Burkholderia fungorum
MNAGDICTRDVVTCGLNATILEACKIMRDRHVGDIVAVEKSADGKLHPRGLLTDRDIVLAVLAREVDAFGLFVADVMSSPLIVAYEGEDVWQVVKRMRLHAIRRMPVVGNAGELVGLLSFDDLLDATCVLLAELSLVTARQPHFEEKQRA

SEQ ID NO: 49703 - protein, 602 aa, Burkholderia fungorum
MTFSSGLPDRGSDSPARGRSATTVKKESSMASNTIAAYLARTLAAAGVQRIWGVTGDSLNGLAYSLDQVGSIRWMHTRHEEAAAFAAGADAASSGRLAVCAGSCGPGNLHLINGLFDCHRNHQPVLAIAAHIPSSEIGLGYFQETHPQELFKECSHYVELVSSAAQFPRVLARAMRTAVEERGVAVIVLPGDVALSEGPSEAPSWTESAPPRIVPAEADLDRLAALLNASDAVTIMCGSGTQGAHDEVVALADTLGAPVVHALRGKQFIEYDNPYDVGMTGLIGFSSGYHAMMSCDTLLLLGCDFPYRPFYPPDAKIIQIDWKGSQLGHRAPLALGLVGTVKETVAATLPKLQRKTDRGFIDNARKHYASARKGLDDLATPAGAGRPIHPQYLAKMIDESASDDAIFTADVGTPTVWAARYLTMNGKRQLHGSFNHGSMANAMPQALGAQGAHPGRQVVSLSGDGGLSMLLGDLLTARQLDLPIKVVVFNNSLLGFVSMELKAGGYLDTNVDLAKTDFAAIAKGAGIFGLRVEESEDVAGALRQVFDHPGPALLDVVTSKHELAMPPTIELAQAKGFSLYMMRAILNGRGDEIVELARTNLR

SEQ ID NO: 49704 - protein, 798 aa, Burkholderia fungorum
MTAQAPDATQWEANDDWARQWVASTVDYSVFRITTDGRIASWNEGGIRIEGYRPAEIIGQHFSVLYTDDDRRDGIPEAVMESARRHGRHDSEGWRQRGDGGTFWASVVTTALRDRRGEFSGAVQVVRDVSENRRSHEAVIESERRFRLLVQGVTDYAIFMLSPEGCVTNWNSGARRIKGYTEEEIVGSHFSRFYTPEDAAAGLPQRGLQAAARDGRFEAEGWRVRSDGTTFWAHVVIDAIYEDDGTLLGFAKITQDITERRQAHELLEKTQAALFQAQKMEAIGKLTGGVAHDFNNVLQVLRGNLELLENRHSRDVWSRERLAHAIDAVERGAKLASQLLAFGRRQALRPVVVNLAAMVRGTDSMLARALGETINVETVVAAGLWNTLVDTHQLENVLLNLAINARDAMPGGGRLTIELANAMLDDRYVRPLSDVPAGQYVMLGVTDTGIGMPPEIVERAFDPFFTTKPEGQGTGLGLSMAYGFVKQSGGHIRIYSEVGHGTTVRIYLPRSMDTAVDLLARHEHPVKVGGRETILVVEDDANVQSTVVDMLTELGYSVLKADNAEQALTVLRSGIHIDVLFTDVVMPGPLRSPEMARQAALLLPHLKILFTSGYTQNAIVHAGRLDAGVELLSKPYSQEELAHKLRYILGTPGEAIAATAGSGDTVQAGAVPVPEGPLHILVAEDDTDSLDAACEILQMLGHDAAKATDATQAMERLRARRFDVLLTDLNLPGASGIELAKQAVAVHPRLHVVFASGDELPDNVLFDFSHNRLRKPYAVNELDDVLRAIQRALHAAGR

SEQ ID NO: 49705 - protein, 336 aa, Burkholderia fungorum
MSEAPSLSSSVVALRGTPLIHPARNPGVPFDASWLDGLRVNQSAAERRAVTLATRRSVKKDAQAAWLLKAVTCIDLTTLSGDDTEGRVRRLCAKARQPVRAEILEALGMEPRGIRTGAVCVYHRFVAAAVDALQGSGIPVAAVSTGFPAGLIPHPLKLKEIEASVADGAREIDIVVTREYVLTGNWQALYDEVREFRAACGPAHLKAILATGDIRTLSNVARASMVCMMAGADFIKTSTGKEGVNATLDVSLVMVRMIREYQQRTGMPIGFKPAGGVSSAKSVLAYQILMKEELGRAWLEPELFRIGASSLLADIERQLEHHVSGQYSAFNRHPVA

SEQ ID NO: 49706 - protein, 162 aa, Burkholderia fungorum
MLKNLDPLLNADVLYALRAMGHGDELVLCDANFPADSVARATVTGKLLRLDGVDAARAIRAVLSVLPLDTFVDAPALRMEVVGEPHTLPAVQREAQAEVNAAEGRDVPFASIERFAFYERARRAYCVIATGEQRGYGCFVFKKGVLLAQDAPSTALQQGARQ

SEQ ID NO: 49707 - protein, 182 aa, Burkholderia fungorum
MLRFNRCTLEARVVDITELAVDAIVNAANTSLLGGGGVDGAIHRAAGKELIRECETLGGCATGDAKLTRGYRLPARYVIHAVGPRWRGGGHGEADLLASCYQRSLEVAREAQCTSIAFPAISCGIYHFPADEAVRIALGTVLATLPRTPQIEQVVFACFDDAMFARYEAELMRRQAPPSKPV

SEQ ID NO: 49708 - protein, 314 aa, Burkholderia fungorum
MDITLPFRYRKLGYAAINVTDLDRSVAFYRDIVGLELMQTEDDVAYLRCSRDHHSILLCQAEEHGLKRVGFELEQESDVRAAFDHFERLDMAPVWVSKEEARQMKQGLGLRVRERHSGLLFELFAGNMHVARPFVQTVAKIARIGHVVIGAENFEASRDSLVRDFGFRISDLIEDRIVFMRCHPNPFHHTFAVGPASSSHFHHVNFMVTDIDDIGKALYRIRKHDVKVVFGPGRHPPSDSIFFYFLDPDGITVEYSFGMEEFAEHGARPPRSMEPVPESLDVWGAVPDGQFGRSGPIEREAVEVSTQKIQKVVG

SEQ ID NO: 49709 - protein, 263 aa, Burkholderia fungorum
MAKIFCVANQKGGVGKTTTAVNLAASLAAQGQRVLLIDLDPQGNATMGSGIDKAACTNTVYEVLVDGVAVADARVRPEAVGYDVLPANRELAGAEVELVSVQNRERQLKVALSAVENEYDFVLIDCPPALSLLTLNGLCAAHGVVIPMQCEYFALEGLSDLVNTIKQVHANLNRDLKVIGLLRVMFDPRITLQQQVSDQLKEHFGDKVFDVVIPRNVRLAEAPSYGLPGVVFDRASRGAQAYVQFGAEMIERVRALNDAPQAS

SEQ ID NO: 49710 - protein, 168 aa, Burkholderia fungorum
MEIGQYQPNLDGDGLRIGIVQARFNEPVCNGLADSCIEELERLGVTGEDVLLVTVPGALEIPLALQKLAESAQFDALIALGAVIRGETYHFELVSNESGAGITRIGLDFGIPVANAVLTTENDEQAVARMTEKGRDAARVAVEMANLAVALEQLGGDDDEEEDEEEEA

SEQ ID NO: 49711 - protein, 67 aa, Burkholderia fungorum
MEPNMNKDQVKGVTEQVKGKVNEAVGKVTDNPGKELKGDLQQGAGKVQKAYGDAKEDAKDNAKRNAP

SEQ ID NO: 49712 - protein, 336 aa, Burkholderia fungorum
MNLVTTLRRGHLLKHNDLSGVGLEIGPYDQPTVFKSEADVRYLDWKDKAQLVQECTHPDMVIDIPEIDYVVHSNRYGDYISDKFDYIIANHVMEHAPNMIQWLSDLCDMLQPGGILFLALPDKKFSFDKYRQDTALSHFVAEYLAGVEEIPREHQIECEIYYDEAFVNRPMQVSDKLDMNRIREKLKAPPHVGIHSHVFESGTIVSKVLKPILMMGFMEFNLADFVPARGETGGEMIIVLRKEPPRVELTTEEFYTAPMDTTNMSNTVDAAGRLAEAEKALAELRARLAVMQEEIASRTSTIRALESSTSWRLTAPLRAAVTKLRALGAGGRNISY

SEQ ID NO: 49713 - protein, 645 aa, Burkholderia fungorum
MSLYTITGAQLAFGHVALLDHADFSLEAGERVGLIGRNGAGKSSLLKIVADLTRPDDGLVTRQQNLTTVYVPQEPEFDTDDTVFDAVAAGLTHARALLDEYDAVANQLADEPEGAEHDALMSRMNTLQSSLDAVDAWNWSTRVSTTLQQIGLNGEARVGSLSGGMQKRVALARALVVQPDVLLLDEPTNHLDFEGIRWLEDLLVSLRAGLLFITHDRAFLDRVATRIVELDRGRLLSYPGNFSAYQTRKAQQLEVEQVEAAKFDKLLAQEEVWIRKGVEARRTRSVGRIARLVEMRNQRAERRNVQGNVKLDVGQGEKSGKIVAELTDVTKRYGSRTVVDNFTATVMRGDKIGFVGPNGAGKTTLLKLILGELAPDEGTVRIGTNLQVAYFDQMRAQLDLEKSLADTISPGSEWVEVNGQKKHVMSYLGDFLFAPERARSPVKSLSGGERNRLLLARLFARPANVLVLDEPTNDLDIPTLELLEELLTEYDGTVLLVSHDRAFLDNVATSVIASEGGGKWREYVGGFTDWQIQRDRSQQMALDAQKEAGKDAGKDAAPGKDGSAGRNTQRAAKLSFKEQRELEALPGKIAALEAEQKTIGAQLEDGSVFAKDAQEGTRLTERYAAIDEELLVALERWDELENRRK

SEQ ID NO: 49714 - protein, 286 aa, Burkholderia fungorum
MKLVRWGQPGAEKPGMLDNEGRVRSLVGVIDDWHGAALADGALARVAALDPQTLPAVAPGERLGPCVGAVGKFVCVGLNYTDHAAEAGMALPKEPILFLKATSAINGPADPIRMPRDAVKVDWEVELGIVIGKTASYVTRDDALAHVAGYCVVNDVSERAFQLERGGQWDKGKAADTFGPLGPWLVTADEVPDPQALPLWLDVDGVRRQAGNTRDMIFGVAELVSYISGFMSLQPGDVIATGTPAGVGMGFKPPVYLQAGQTVRAGIAGLGEQSSPVVAFHATAQA

SEQ ID NO: 49715 - protein, 430 aa, Burkholderia fungorum
MPGSRALASSRRRWSRSTRQRRPDMADTITCVDDLQRLARRRVPKIFYDYVDSGSWTESTYRANETDLGSLRFRQRVGCNVEAIRTASTLLGHACSLPLALAPTGLAGMVHADGEILAARAAARFGVPFTLSTVSICSIEDVAEQVAQPFWFQLYMMKDRDFIVRLIERARDAGCSALVLTLDLPIQGQRHKDVRNGLSVPPKLNVRNLSTMLSRPAWCARMLGTRRRTFGNIVGHAKGVSDTFAFAEWVSRQFDRSVTWDDVRWIKRHWGGRLIVKGILDADDARLAVAAGADAIVVSNHGGRQLDGAPSSISALPAIAAAVGRQTEVLMDGGIRSGQDVLRALAWGAHGVMIGRAFLYGLGALGEAGVTRTLELIQKELESTMALCGITDVADVGRDAIVSPAHGAAPAWPEPVGRRVGESNLPVLAS

SEQ ID NO: 49716 - protein, 260 aa, Burkholderia fungorum
MRASGSIIFLGLPIMQLSKRLAAELFGTFWLVLGGCGSAVLAASFDGPVHGLGIGFVGVALAFGLTVLTMAYAIGHISGCHLNPAVSVGLTVAGRFPARDLLPYIVAQVIGAVLGAFVLSLIATGKPGFDLVASGFASNGYGERSPGHYSLAAAFICEVVMTGFFLFVILGATDKRAPAGFAPIAIGLCLTLIHLISIPVTNTSVNPARSTGPALFVGGAAVDQLWLFWLAPILGAVIAGVLYPALAESRDSNSQKLALD

SEQ ID NO: 49717 - protein, 982 aa, Burkholderia fungorum
MSDMLNSSTGGCGSGNCACKAQAQQQRSPRSFFDDTDYGTPERHADIDVTLEIDGQSVTVPAGTSVMRAAVEAGVNVPKLCATDSLEPFGSCRLCLVEIEGKRGYPASCTTPVEAGMKVRTQTDRLQSLRRNVMELYISDHPLDCLTCPANGDCELQDMAGVTGLREVRYGFDGANHLKDKKDESNPYFTYDASKCIVCNRCVRACEETQGTFALTIAGRGFESRVAASENVPFMESECVSCGACVAACPTATLQEKTVIMLGQAEHSVVTTCAYCGVGCSFKAEMKGNQVVRMVPHKNGQANEGHACVKGRFAWGYATHKDRITRPMIRAKITDPWREVSWEEALTYAASEFRRIQAKHGRDSIGGITSSRCTNEETYLVQKLVRAAFGNNNVDTCARVCHSPTGYGLKTTLGESAGTQTFASVDKADVIMVIGANPTDGHPVFGSRLKRRVREGAKLIVVDPRRIDIVDTPHVKASHHLQLRPGTNVAVVNALAHVIVTEGLVNEAFVAERCETRAFEQWRDFVALPENAPEATEAATGVPAQAVREAARIYATGGNAAIYYGLGVTEHAQGSTMVMGIANLAMATGNIGREGVGVNPLRGQNNVQGSCDMGSFPHELPGYRHISDTVTRTLFEEAWNVTLQPEPGLRIPNMFDAAVHGTFKGLYCQGEDIVQSDPNTHHVSAALSAMECIVVQDIFLNETAKYAHVLLPGSSFLEKDGTFTNAERRISRVRKVMPPVPGYADWEVTVLLARALGYEMDYTHPSQIMDEIARLTPTFHGVSYKKLDELGSIQWPCNENAPDGTPTMHIDTFVRGKGKFVITKFIATPEKVTRKFPLLLTTGRILSQYNVGAQTRRTENSRWHDEDRLEIHPHDAEERGIRTDDWVGIESRAGQTVLRAKVTERMQPGVVYTTFHFPESGANVITTDSSDWATNCPEYKVTAVQVMPVEQPSQWQRDYSRFNTEQLDLLKQRELANATSGK

SEQ ID NO: 49718 - protein, 652 aa, Burkholderia fungorum
MLFPTEFDVIVVGGGHAGTEAALASARMGNTTLLLTHNIETLGQMSCNPSIGGIGKGHLVKEVDALGGAMAAATDEGGIQFRILNSSKGPAVRATRAQADRLLYKQAIRHRLENQPNLWLFQQAVDDLMVEGDRVVGAVTQVGIRFRGRAVVLTAGTFLDGKIHVGLNNYTGGRAGDPAAVSLSARLKELKLPQGRLKTGTPPRIDGRTIDFSQLEEQPGDLDPVPVFSFLGRVEQHPRQVPCWVTHTNARTHDIIRGGLDRSPMYTGVIEGVGPRYCPSIEDKIHRFASKESHQIFLEPEGLTTNEFYPNGISTSLPFDVQLELVRSMRGLEHAHILRPGYAIEYDYFDPRGLKASLETKVISGLFFAGQINGTTGYEEAAAQGLLAGINAGLYVQGKEAWCPRRDQAYLGVLVDDLVTRGVSEPYRMFTSRAEYRLSLREDNADMRLTEIGRELGVVDDVRWDAFSRKRDAVSRETERLRTTWVNPKTLSADEATALLGKPIDHEYSLADLLRRPGVSYDGVCALRAGACAAPETLAEDDVLLAQIKEQIEIGIKYQGYIDRQAGEIERNEAHESTRLPEGLDYAEVRGLSFEARQKLTQFRPETIGQASRISGITPAAISLLMVHLKRGLGRRPTKPAESGTDSAPVTQ

SEQ ID NO: 49719 - protein, 752 aa, Burkholderia fungorum
MGHRTMNTEIVTSTPKPLPSFEEAMAFVREHAGEVRLSSGEMLADHAAGTASIMRTLNVDPPAVLAAALFALTPHLQDPERVIADNFGEEVAQLVGDVRKLLRLGTVSLRAAQNAMPEAGRDAQAARRAQVEALRKMLLAFAQDIRVVLIRLASRLQSLRYYAAAKITPSPDVARETLDIYAPLANRLGIWQLKWELEDLALRFEEPVTYKRIAKLLDEKRVERESYVAQAIERLQKELAAAHIRAEVSGRPKHIYSIWRKMRGKELDFAELYDVRAFRVIVPDIKDCYTVLGIVHNLWQPVPKEFDDYISRPKPNGYKSLHTVVIGDDGRAFEVQIRTQEMHQFAEYGVAAHWRYKEAGTRGYAGQFAANGKYDEKIAWLRQLLAWKDEVSEGEHGEKRAAQPWEQLRQATLDDDHIYVLTPQARVIPLPHGATPVDFAYHLHSELGHRCRGARVDGAMVPLNTPLQNGQTVEIVAVKEGGPSRDWLNPQLGYLQSPRARQKVRAWFNAVEVQEHIASGRAMVEKTLQREGKTSVNLDQLAAKLGFKTTDDLFSVVGKEEFSLRLVEQALHDAPPPEPVVDAPEQFEKRSSGASVARGASTGVLVVGVDALLTQLARCCRPAPPDDICGFVTRGKGMSIHRSDCATFLRMAERAPERVLQTAWSAEVMSGRGQSVYPVDLSIEATDRQGLLRDISEVFAREKMNVIGVKTQTRRNAAFMQFTVEVSNAAQIQRACTLLGEVTGVMRASRKS

SEQ ID NO: 49720 - protein, 520 aa, Burkholderia fungorum
MSDNKRPVSTELAMTVIKQEDLIQSIADSLQYISYYHPLDYIQALGRAYELEQSPAAKDAIAQILTNSRMCAEGKRPICQDTGIVTVFVKVGMDVRWDGATMGVTDMINEGVRRGYLNPDNVLRASIVSPPEGGRKNTKDNTPAVIHYEIVPGNTVDVQVAAKGGGSENKSKFAMLNPSDSIVDWILKTVPTMGAGWCPPGMLGIGIGGTAEKAMVMAKESLMDPIDIQDVIARGPKDWIEELRVELHEKVNALGIGAQGLGGLATVLDVKIMAAPTHAASKPVAIIPNCAATRHAHFTLDGSGAARLEAPSLDAWPKVHWQPDTEKSKRVDLNTLTPEEVAAWTPGQTLLLSGKMLTGRDAAHKRIADMLAKGEKLPVDFTNRVIYYVGPVDPVRDEAVGPAGPTTATRMDKFTEMMLAQTGLISMIGKAERGPVAIEAIRKHKAAYLMAVGGAAYLVSKAIRSAKVLAFEDLGMEAIYEFDVQDMPVTVAVDSNGTSVHQTGPKEWQARIGKIPVATV

SEQ ID NO: 49721 - protein, 257 aa, Burkholderia fungorum
MRAQLPDEAILYVADSLYAPYGERDDDFIADRTLAIGEWLVRQGAKALVVACNTATAQSIAMVREKLPIPLVGVEPGIKPAALQSKTRVAGVLATQVTLRSARFQALLERYAADCRFLCQPGHGLVQAVERCDVGSAELRALLRGYLQPMLDAGADTLVLGCTHYPFLDTAIREIVGDRLALIDTSVAIARQLERVLDQHGLRAAPESAGTALPRFYSTGDGTHQQQLAATLLHVDATVEQVVIPSRRTVAPNSQAA

SEQ ID NO: 49722 - protein, 348 aa, Burkholderia fungorum
MNPADRGRERVTRHSPQSAVRIAASRTIRGRAAHRAVWPLCSSIAPYCIRSAESALERHALFQRLLIMLSYRHAFHAGNHADVLKHAVVLQLLRYLGQKDKSYWYIDTHAGAGVYSLKEGYATKTGEFRTGIARLWERNDLPPMFADYVDEVSALNPDGQLRFYPGSPYIAWRQMREQDRMRLFELHTTEIDVLRHNFRDAGRRAMLYAGDGFDGILALLPPAPRRALVLLDPSYEDKRDYTRTLRCVEESLKRFPTGTYAVWYPQVRRPESLRFPDQLKKLQDKNWLHVSLTVSNPPEDGFGLFGSGMFILNPPYTLAKTLKEQMPWLVKVLGEDNAAQFKVEYRGD

SEQ ID NO: 49723 - protein, 373 aa, Burkholderia fungorum
MNVGLVGWRGMVGSVLMQRMQQEGDFDLIEPVFFSTSNAGGNAPSFAKNETKLKDATSIEDLKKCEAIISCQGGDYTNEVFPKLRAAGWNGYWIDAASSLRMKDDAVIILDPVNLDVIKNALVKGQKNFIGGNCTVSLMLMALGGLFRENLVDWMTAMTYQAASGAGAQNMRELLQQMGTLYGAAKEDLADPSSAILDIDRRVLSAMNSDRMPTGNFGVPLAGSLIPWIDKDLGNGMSKEEWKGGAETNKILGKPAMGTPGSIPVDGLCVRIGAMRCHSQALTIKLNKDVPLDEVNSILASGNDWVKVVPNEREASMRDLSPAVVTGTLTVPVGRVRKLAMGGEYLSAFTVGDQLLWGAAEPLRRMLRIVLDK

SEQ ID NO: 49724 - protein, 79 aa, Burkholderia fungorum
MTIEFQVEGMSCQHCVAAVTNAIREHDEAAQVQVDLASGRVTVESAQPAEALKAAIDEAGYTVTGAATRATTGASGTVR

SEQ ID NO: 49725 - protein, 565 aa, Burkholderia fungorum
MAAGTDAQCPMLILLNLLAGVALLVWGSHIVRTGILRVLGADLRSVLGRSTSSRWRAFLSGVGVTSLVQSSNATAVIVTSFAAQGLLPLASGLAIMLGADVGTALMARVLTLDLSWLSPILILLGVPLFLSRKQTRLGQAGRTLIGLGLILLALRLIVEAAQPMMQGAGVRVMFGALTGDTMLDALVGAAFAMLSYSSLAAVLLTATLASSGVISLKVALCLVIGANLGSGLLALLGTVAQNAAARRLALGSFAFKLAGALLILPFTSLLARGLPVLIANPREATVGFHLIYNALRCCACLSLIDPVARICVRILPNRPVPNGELRPLHLDTAALSTPTLALAHAAREVLRIGDIVRTMLDNVADLIHHNNLDKARETVRMDDDVDELYAAVKTYLTLISREQLDEADSRRWTDIISLTINLEHAGDIIERIVGDIEEKKIAHRLSFSEEGLGELDDLQARLVSNLQLGLSVFLNNDLRCAERLLAEKERFRDLERAYSYRHLDRLAGQTLRSIETSALHLDLISDMKRLNSLFCSTAYPVLDAAGALHDTRLRKRALDTMHVKE

SEQ ID NO: 49726 - protein, 261 aa, Burkholderia fungorum
MGNGINRASSADWPYPRLAAHRCGGSLAPENTLAGFDACVRYGYRMVEFDAKLSADNQLFLLHDDTLERTTNGHGAAADHTWQQLATLDAGTWYGPQFAGTRLPTLAEAAGRCARDGIAANIEIKPCPGRDEITGTLVASGALTLWQGQTPPLLSSFSFEALAAARDAAPSLQRGMLFDEVPADWLRVVRELDCVSFHANHRYLSEPLVAEIHGAGLRVLAYTVNDPARAQLLAQWGVDMICTDRIDTLRHDMFSAPANPA

SEQ ID NO: 49727 - protein, 419 aa, Burkholderia fungorum
MLYVQVIVAIIIGIGLGHFYPDLAVDMKPLGDGFIKLIKMVIGPIIFCTVVTGIAGMEDMKKVGRVGGKALLYFEIVSTFALVLGLIATHVLKPGVGFNIDPATLDGKAVASYAAKAHGQTTVDFLMHIIPDTLVSAFAQGEILQILLIALLFGAVLATAGEKGKVVTGFIDGLSHVLFGIVRIITKLAPIGAFGAMAFTIGKYGIGSLLPMLKLIGTFYLTSVVFVVVVLGIIARAVGFNILRFVAYIKEEMLIVLGTSSSEAALPQLMLKLERLGCSRSVVGLVVPTGYSFNLDGTNIYMTMAVLFIAQATNTDLTWTQQLTLLAVTMLTSKGASGVTGAGFITLAATLAVVPTIPLSGMVLILGIDRFMSECRALTNIVGNGVATVVVSAWEKELDRSKLNAALRGDVAIKEPAGV

SEQ ID NO: 49728 - protein, 450 aa, Burkholderia fungorum
MLNHGLQVLYIEDDELVRRASVQSLQLAGFEVIGHASVESAAKTIGADFSGVIVSDIRLPGASGLDLLAQCHERAPDVPVILVTGHGDISMAVQAMRDGAYDFIEKPFASERLIETVRRALERRKLVLENLALRRELAEQSSVAPRIIGRSPAIEQVRRLIANIAPTDASVLINGDTGAGKELIARSLHELSPRRDKPFIAVNCGALPEPMFESEMFGYEPGAFTGAAKRRIGKLEHASGGTLFLDEIESMPLALQVKLLRVLQDGVLERLGSNQPIRVNCRVVAAAKGDMAEHVADGSFRRDLLYRLNVVTIALPPLGERREDIVPLFEHFLLDAAVRYQRPAPILTDRQRAGLMQRDWPGNVRELRNAADRFVLGVADDPVMSFGDDGAAAQPLKERVEQFERAVIAEALEQAGGVVAVAADRLQLGKATLYEKIKRYRLAAKGEGER

SEQ ID NO: 49729 - protein, 339 aa, Burkholderia fungorum
MNAVPETRRQSDHAGDHVLVADKLARYYTVKRGMFASGTVKALNGVSFALERGKTLAVVGESGCGKSTLARQLTMIEPPSAGRLLIDGEDVAGADHAKIAALRRRVQMVFQNPFASLNPRKTVEQTLGEPLAINTQLSATERAERIAQMMRTVGLRPEHAKRYPHMFSGGQRQRVAIARAMILDPQIVVADEPVSALDVSIQAQILNLFMDLQEQFKTSYVFISHNLSVVEHIADDVMVMYFGGVAELGDKTRIFSKPRHPYTRALMSATPSIFEADRSIKIKLQGEMPSPLNPPSGCTFHQRCPYVIDRCRSEEPKLREVDGRQVSCHRAEEVGDVDA

SEQ ID NO: 49730 - protein, 178 aa, Burkholderia fungorum
MPCTVYRDGTSLFLTDSVMAATFERKILTRDALVTLRPSLSSPVVFTNGVFDILHRGHVTYLADARALGACLVVGVNSDASVRMLGKGDDRPINNEADRMALLAALESVDYVVCFGEKTPVELISALRPDVLVKGGDYDMDALPESAIVRSWGGKALAIPFEHDRSTTALLKKVRTQG

SEQ ID NO: 49731 - protein, 344 aa, Burkholderia fungorum
MHLPPDWTERMTDVTANLAASPAPDAVPAPAAYDATAKQKAQAKTARIPIKVIPIEKLKKPDWIRVKAATGNSRFYEIKQILREHNLHTVCEEASCPNIGECFGKGTATFMIMGDKCTRRCPFCDVGHGRPDPLDADEPGNLARTIAALKLKYVVITSVDRDDLRDGGAAHFVECIRQTRELSPQTRIEILTPDFRGRLDRALGILNAAPPDVMNHNLETVPRLYKEARPGSDYAHSLKLLKDFKALHPDVATKSGLMVGLGETEEEILQVMRDLREHDVDMLTIGQYLQPSEHHLPVRSYVHPDTFRMYEEEAYKMGFTHAAVGAMVRSSYHADLQAHGAGVV

SEQ ID NO: 49732 - protein, 713 aa, Burkholderia fungorum
  MISC_FEATURE (697)..(697): X=any amino acid
  MISC_FEATURE (698)..(698): X=any amino acid
  MISC_FEATURE (699)..(699): X=any amino acid
  MISC_FEATURE (700)..(700): X=any amino acid
  MISC_FEATURE (701)..(701): X=any amino acid
  MISC_FEATURE (702)..(702): X=any amino acid
  MISC_FEATURE (703)..(703): X=any amino acid
  MISC_FEATURE (704)..(704): X=any amino acid
  MISC_FEATURE (705)..(705): X=any amino acid
  MISC_FEATURE (706)..(706): X=any amino acid
  MISC_FEATURE (707)..(707): X=any amino acid
  MISC_FEATURE (708)..(708): X=any amino acid
  MISC_FEATURE (709)..(709): X=any amino acid
  MISC_FEATURE (710)..(710): X=any amino acid
  MISC_FEATURE (711)..(711): X=any amino acid
  MISC_FEATURE (712)..(712): X=any amino acid
  MISC_FEATURE (713)..(713): X=any amino acid
MDQFAKETLPISLEEEMRRSYLDYAMSVIVGRALPDVRDGLKPVHRRVLYAMHELNNDWNRAYKKSARIVGDVIGKYHPHGDTAVYDTIVRMAQDFSLRYMLVDGQGNFGSVDGDNAAAMRYTEIRMAKIGHELLADIDKETVDFTPNYDGSENEPAILPARIPNLLINGSSGIAVGMATNIPPHNLNEVVDACQHLLKNPEATIDELIEIVPAPDFPTAGIIYGVAGVRDGYRTGRGRVVMRALTHFEEIDRGQRMAIIVDELPYQVNKRSLLERIAELVNEKKLEGISDIRDESDKSGMRVVIELKRGEVPEVVLNNLYKATQLQDTFGMNMVALVDGQPKLLNLKEMLSCFLSHRREVLTRRTVYELRKARERGHVLEGLAVALANIDEFIAIIKAAPTPPIAKQELMARAWDSSLVREMLSRAETENATAGGREAYRPDGLNPSFGMQSDGLYRLSDTQAQEILQMRLQRLTGLEQDKIIGEYREVMAQIADLLDILARPERITAIIVEELTSIKAEFGDARRSKIELNATELNTEDLITPQEMVVTMSHAGYVKSQPLSEYSAQKRGGRGKQATAMKEDDWIDTLFIANTHDHILCFSNRGRVYSVKVYEVPQGSRNSRGRPIINIFPLQEGEKITVVLPVKEFSADKFVFMGTALGTVKKTPLEAFGRVLRKGIIAVGLDDGDYLIGAAIXXXXXXXXXXXXXXXXX

SEQ ID NO: 49733 - protein, 124 aa, Burkholderia fungorum
MSLFVMASSLASSTSVAGYDDLPVDTIVPLADLFRLLGDPTRLRIVLACLDERRAVGAIAEALGLSSSLVSHHLRLLRAARIVRAERQGKQVFYLAADRHISAMLAGMLEHVAEPAGNDSQDAS

SEQ ID NO: 49734 - protein, 154 aa, Burkholderia fungorum
MLKNLDPLLNADILYALRSMGHGDELIICDANFPGDSVARESVLGKLLRLDGVSAPRAIRAVLSVMPLDTFIEHPASRMEVVGEPHTLPAVQREAQTEVNAAEGRDVPFAPIERFAFYERARKAYCVIATGEARGYGCFVFTKGVLLAPDAPQS

SEQ ID NO: 49735 - protein, 109 aa, Burkholderia fungorum
MGSNQRGTVMSKIKTARFDASHYLDSEEMIAEYLNAALEEGDADLLLAAIADIAKARGIAKIAADAGLGRESLYKTLAPGSKPRMDTVFKLLRALGVKLNAVPEGVAAA

SEQ ID NO: 49736 - protein, 781 aa, Burkholderia fungorum
MKNRTRVSSAALLLFALAAHVHAATDEGSVTGAVTDTAGQPVNNATVIVQDASGAAVGEAKTNAEGRFVIAHVTPGTYAVVVTATGFASGNNITTTGTGTQSAVSVSLAKSGTLDVQVNAKRLDRARNGLSPETGSSVYRFSQADIDALPAGQDTPLNQVLLQAPGVASDSYGQLHVRGDHANLQYRINGIIIPEPISGFGQALDTRIIDQVNLLTGALPAQYGYRTAGVVDIRTKTGEAGNGGSIDVFGGSHQTLKTSADVFGTQGPFSYYFSGSLGVNNLGIENPTASANAVHDHTRQGDAFGYMSYIINPLTRVSLMFGTTSNQFEIPNTPGLQTNFTLNGNSTFDSSQLNETQSELNNFAVVALQGTNGGALDYQVALFTRYTRTQFNPDPVGDLLFNGVASQDFHSNSANGAQVDTTWRLNDKHTIRAGLFFQQEHAVFDDSVNVFATDADGNQLSDQPFNIHDSSSKTGYLYSAYVQDEWKITSKLTLNYGLRYDKMDEYVSASQLSPRIGLVYALTPTTTVHAGYARYFTPPAFELLSGSTISRFNGTTNQSPSSQNDPVQPERSHYFDLGVTQRLGSNVTIGVDAYYKKSTNLLDEGQFGSALIFTPFNYQYGRVYGLEFTANYKQDNVSAYLNLAYSRAQGKQIDSAQFNFDPDELAYINSHWVYLDHDQRVTASFGGTYDLGRTTFTFDGLVGSGLRSGFANTDRLPVYAQINLGVIQHFNQPLVGKFDARLLVVNAFNRVYELRDGSGIGVGAPQYGPHFAVYAGITKHF

SEQ ID NO: 49737 - protein, 318 aa, Burkholderia fungorum
MSTMKTLDIIDSHTGGEPTRLVVSGGPDLGGGTLAQRLDVLRTGFDEWRAGVVTEPRGSDVMVGALLCEPDDPTCAAGVIFFNNVGYLGMCGHGTIGLVVSLAHLGRIGPGRHRIETPVGVVEATLNEDGSVAVRNVPAYRYRESVRVDVPGHGVLTGDIGWGGNWFFLVADHGRALEASRIGELTAFSGAIRDGLIAQRITGAEGALIDHIELFGPASRDGIDSRSFVLCPGNAYDRSPCGTGTSAKVACLAADGKLAEGAVWRQESIIGSVFEASYRHAGDGVHVIPTITGHAYITAQARLCFDERDPFAWGIRTA

SEQ ID NO: 49738 - protein, 471 aa, Burkholderia fungorum
MKRFELLANTMADEIRSGRRLVGSRMPSLRQITTQHGVSQSTVFRAYYLLEEWGLIRARERSGYYVAPGAALKQPLASNPPPALASARVEISDLVFSVLEAAKHPNVVPFGSAFPSPKLFPLQRLARSLAHSTRLISPWSTVVDLPPGNEQLRREISLRYMAMGIAQPMEELVVTNGALEALNLCLMAVTRPGDVVAIESPGFYAALQALERLDLRAVEIPVDPVSGLDLEALAHAFETQPIRACWFMTNFQNPTGTTMSQEKKKALVELLARHDVPLIEDDVYGELHHGAANPLPARVFDQKGLVMHCSSFSKTLAPGYRIGWVAAGRFAGKVQRLKLMTTLSASIPAQAGIADYLQHGGYDRHLRKLRGALRNQLDTMDAALHRWMPADSHWTRPSGGYFVWVRLPHHVDAMQLHRLAIENGISIAPGPIFSAQHAFRDHIRLNFGHPWDERTELAVKTLCSLIKLSSQ

SEQ ID NO: 49739 - protein, 140 aa, Burkholderia fungorum
MSGRAARVESMLRYFNPVGAHESGLIGEDPAGELKHGPLALVTDAMPVVTIAPNDALLEKLKSNLQEVKARGGELYVFADADTRIGSEPGIHVIRMPEHYGPLSPILHVVPLQLLAYHTACARGTDVDKPRNLAKSVTVE

SEQ ID NO: 49740 - protein, 417 aa, Burkholderia fungorum
MTGRTLVTARSLRALDWLNFFVANVQTGFGPFIASYLASHKWTQGEIGMALSVGTISAMVSQVPGGAAVDALRNKKGAAAWAIIAIILSAVLLAVSPTVLPVIAAEVFHGFASCMLTPALAAISFALVGRANLGDRLGRNARWASIGSAVAAGLMGVFGEYYSPRAVFWLTAALAVPALFALTMIQRTDTVELPKAAPTPQQIERRESLRELLRDRRMLLFAACIVLFHLSNAAMLNLAAGEVTAGMGDNVQLVIAACIIVPQAIVAIMSPWVGRSAERWGRRPILLLGFSALPIRALLFAGISSPYLLVPVQMLDGLSAAVFGVMLPLIAADVAGGKGRYNLCIGLFGLAAGIGATLSTTAAGFVADHFGNAVSFFGLAAAGALAVLLVWAAMPETRDAAAEDEAPVADGGKSAAR

SEQ ID NO: 49741 - protein, 327 aa, Burkholderia fungorum
MQKRKLGNGGLEVSAIGLGCMGLSFGYGPATEKAAGIQLIRAAYEQGVTFFDTAECYGPFVNEELVGEAVAPFRDHVVIASKFGFQDGDTKKPTDSRPENIRAVADASLKRLKTDRIDLFYQHRVDPNVPIEDVAGTVKDLIREGKVKHFGLSEAGELSIRRAHAVQPVAALQSEYSLWWREPEHKVLPTLEELGIGFVPFSPLGKGFLTGAIDADTTFDATDFRNLVPRFSEENRKANAGLVEVLGRLADSKGATRAQIALAWLLAQKPWIVPIPGTTKLHRLQENVGAAALELSADDLSAIEAALRPIEVAGDRYPAQWQQRVDR

SEQ ID NO: 49742 - protein, 486 aa, Burkholderia fungorum
MTTLTLKDPSLLKTHAYIAGEWQGADDGSTFEVKNPATGEIIATVPRMGTAETRRAIDTANAAWPAWRATTAKQRAVILRKWHDLMMENADDLAKILTTEQGKPLAEAKGEIQYAASFLEWFAEEGKRVNGDTIPTPANDKRIVVTKEPIGVCAAITPWNFPAAMITRKVGPALAAGCPIIVKPAEATPLSALALAVLAERAGVPRGVFNVVTGEPKAIGAEMTGNPVVRKLSFTGSTPVGRLLMAQCAPTVKKVSLELGGNAPFIVFDDADLDAAVAGAIASKYRNSGQTCVCTNRFYVHDKVYDAFAEKLRVAVEQLKVGRGTEDGVTQGPLINEAAVLKVESHIEDALAKGARIVTGGKRHVLGHGFFEPTVLADVTPAMKVARDETFGPLAPLFRFSSDEEVIRLANDTEFGLASYFYSRDIGRVWRVAEALEYGMVGINTGLISNEVAPFGGVKQSGLGREGSHYGIDDYVVIKYLCVGGI

SEQ ID NO: 49743 - protein, 380 aa, Burkholderia fungorum
MEARTGRWRSLWPEYGALTLRHRAVQASHRPYRMSGGRSRPVSSAHARPGSKHAVERVRRGNIMKLRIKAVLAHLACLAAAIAAPLAFAQDPAACRTVHFADIGWTDITSTTALASTVFEGLGYQPVTTVASVPISFAGLKSKQLDVSLGYWWPVQEKAIAPFVDSKSIQVLQPPNLSGAKATFAVPSYEYDAGLKTFADIAKHRDQLDGKIYGIEPGSSANAAIQKMIASNQFGLRGFKLIESSEAGMLVSVDRAIREKKWVVFLGWEPHPMNIQIDMKYLTGSEGVFGPNDGEARVYTLTSPDFLTRCPNAGKLVSNLRFSTQLENVVMQSVMNKEKPADAARAYLKKNPQVLDAWLAGVKTYDGKEGLPAVKSYLGL

SEQ ID NO: 49744 - protein, 248 aa, Burkholderia fungorum
MDNPKRILIVEDDVDIANVLSLHLRDERYEVVHSADGNEGLRLLEQGGWDALILDLMLPGVDGLEICRRARAMTRYTPIIITSARSSEVHRILGLELGADDYLAKPFSVLELVARVKALLRRVDALAKDSRIEAGNLRIAGLSIDPLTREAAANGKPIELTPREFDLLYYFAQHPGKVFSRMDLLNAVWGYQHEGYEHTVNTHINRLRAKIEADPAQPERILTVWGRGYKLAVPGETPAPTGAPKDAS

SEQ ID NO: 49745 - protein, 308 aa, Burkholderia fungorum
MTAFDVRIGINPLSWMNDDLPSLGGETPLEVALTEGRQIGYQGFELGNKFPREPQALKALLAQYDLALVSGWYSGRLARRSVEEEIAAVGPHLELLAQNGATAMVYGEVADSIQGAAQPLYQRPRFFSDAQWAAYAARVDEFARYTLSRGVRLAYHHHMGAYVETPADVDQLMSRTGEAVGLLFDAGHITFAGGDPLAVLDKHIGRVCHVHCKDVRPAVMKLARNRNWSFLDAVIAGAFTVPGDGAVNFAAIIERLKRHGYRGWLVVEAEQDPVVAPSFEYAQKGYQTLRALVDAPLDAADRSRQEAA

SEQ ID NO: 49746 - protein, 313 aa, Burkholderia fungorum
MSAAGVAMQIGAPGGGAADAAAADAGAAGTRVAGAGAADAGMMSAPMSAVDADRGGAPVSHRPLGILAALPQELGDLLEAMRAEAGVRTITHGQRDYHLGTVHGAPCVVTLARVGKVAAAATVSALIHAFDVEAIVFTGVAGGVGAEVRVGDIVVADALLQHDLDASPLFPRFEVPLLGVSHFSADAALAGQLAAACERFVAEEGAASAARFGTREPRVHRGLIISGDQFVASAEGVRALRDALPNALAVEMEGAAIAQVCHEYGVPCAVVRTISDTADDHAPASFVSFLTEIAGTYSNAILTRFLQARGSRV

SEQ ID NO: 49747 - protein, 959 aa, Burkholderia fungorum
MSETPSDTTSTLAKSFEPQTIEAHWGPEWEKRAYATPVIQENRKDFSIQLPPPNVTGTLHMGHAFNQTIMDGLTRYHRMLGENTLWVPGTDHAGIATQIVVERQLDAQGVSRHDLGREKFVERVWEWKQQSGSTITNQVRRLGASIDWSREYFTMDDKMSAAVRDVFVRLYEQGLIYRGKRLVNWDPALLTAVSDLEVVSEEENGSLWHIQYPLTDGSGHLTVATTRPETMLGDTAVMVHPEDGRYAHLIGKTVTLPLSGREVPIIADDYVDREFGTGVVKVTPAHDFNDYQVGLRHKLPQIEILTLDAKINDNAPEQYRGLDRFEARKQVVADLEALGVLESVKPHKLMVPRGDRTGVVIEPMLTDQWFVAMSKPAPEGTFNPGKSIAETALDVVRSGEIRFVPENWTTTYYQWLENIQDWCISRQLWWGHQIPAWYGENGEIFVAKTEEDARAKATAAGYTGALKRDEDVLDTWFSSALVPFSSLGWPNETLELKHFLPSSVLVTGFDIIFFWVARMVMMTTHFTGKVPFDTVYVHGLVRDAEGQKMSKSKGNTLDPIDIVDGIDLDALVAKRTTGLMNPKQAASIEKKTRKEFPDGIPAFGTDALRFTMASMATLGRNVNFDLARCEGYRNFCNKLWNATRFVLMNCEGHDCGFGKPEQCGECGPDGHLHFSQADFWIVSRLQRVEAEIARGFADYRFDNVANALYKFVWDEYCDWYLELAKVQIQTGQPNQQRATRRTLLRVLETVLRLAHPVIPFITEALWQKVAPLAGRYPEGKAEGEASIMVQPYPVAEPSKIDEDAEQWAADLKAVIDACRNLRGEMNLSPAVKVPLLAAGNAERLRTFAPYAQALARLSEVQIIADEAALDAQADGAPIAIVGNDKLVLKVEIDVAVERERLSKEIARLSTEIIKCNGKLQNESFVAKAPPAVVEQEQKRLAEFEATLGKLKAQLVRLPV

SEQ ID NO: 49748 - protein, 293 aa, Burkholderia fungorum
MLKVTKAVFPVAGLGTRFLPATKASPKEMLPIVDKPLIQYAVEEAMAAGITEMIFVTGRSKRAIEDHFDKSYEIEAELQARGKDKLLELVRSIKPSHVDCFYVRQPEALGLGHAVLCAEKLVGDNPFAVILADDLLYGTPPVMAQMIEVFDHYHSSVIGVEEIPAQETKSYGIVDGKEWEDSIIKMSGIVEKPEPNVAPSNLGVVGRYVLKPRIFEHLRALKPGAGGELQLTDAIQSLLADEQVLAYKYHGTRFDCGSKLGYLKATVEFALRHPEVAADFEEYLRTRSPVLEG

SEQ ID NO: 49749 - protein, 569 aa, Burkholderia fungorum
MNTERNDAPAASNFIRNIIDEDNRTGKWGQRVETRFPPEPNGYLHIGHAKSICLNFGVARSYGGVCHLRFDDTNPEKESVEYVDSIIDAVRWLGFEWEKDGKEQLYYASDYYDKLYEFAELLIQRGKAYVDSQSAEEMRANRGSATEVGTPSPFRERSVQENLDLFRRMKAGEFKEGEHVLRAKIDMSSPNFNMRDPVIYRIRFAHHYRTGDKWCVYPMYDYTHCISDALENITHSLCTLEFEDHRPLYDWILNELAEAGIFTRPLPQQIEFSRLNLTYAITSKRKLLQLVTEGHVDGWDDPRMPTIVGVRRRGFTPESIQLFCERIGITKVDSWIDMSVFEGALRDDLDEKAPRTAAVLDPVKLIIDNFPEGVTEPCNAPVHPHHPEMGVREFPISRELWIERDDYNETPPKGYFRLFPGNKVRLRYGYVIECIGADKDENGNIVAVHCNYFPDSKSGTEGANNYKVKGNIHWVSAAAACPAEVRIYDRLFKEPQPDAGGRDFLEALNPDSKRVVNAYLEPGAREALPEQRYQFERHGYFVADRVDSKPGKPVFNRIVSLRDSWGKPA

SEQ ID NO: 49750 - protein, 350 aa, Burkholderia fungorum
MFASASPGGPMKVAAHRRASIELTTPAATRPAARRASGIGARATCGGARGARSARGALMALAAFGAVSLAGSVHADELTGTLKKIHDDGVVVLGVREASIPFSYFDGKGTVGYSQTIALQIVDEIKKTLGMPQLKVHEITVTSSNRTPMLLNNQIDLECGSTTHTVERESVAAFSDSFFQYAVRMIARKSSGITDFQDLAGKTVVTTAGTSDERLLRRLNTDKHLNMRITSARDHLEAFGAVKDDRAVAFVMDEPIVYGFKSTDPRPDDFVVTGTPLGYEVYACMFRKGDEPFRNLVNGVIARGQTSGEAERLYRQWFTQPIPPHGINLNFPLSEQNRALFAHPNDRALD

SEQ ID NO: 49751 - protein, 242 aa, Burkholderia fungorum
MSFDSTAPAAGAQAQIVADATLTRAEVEQLIAASGAGNQAPLHFTDCDFEGVDLSRLDLRGAGFQRCTIAETSFFGANLSHSRWVRCRGREADFGSADLVDAQFQSSDLNNTSWRRAKLASASFHGCKLTGANFEACAALGLSFVESLLVGAHLRGLSFRKATLHQLDFSDADLAGVDFREAIFDGGSLKDAHLKGARFDGADLREADLSGVRLVDAALFKGATISHAQAAVLVTELGLRVL

SEQ ID NO: 49752 - protein, 600 aa, Burkholderia fungorum
MDSSANSLINPDARMGLAGAQPGAGAAGAGQAGGADLGGLSGGLGGNFGQRLSGLAQMRGNPRAPLIFAVALLVAVVAGLFLWSRAPDYKVLYSNLSDRDGGAIITALQAANIPYKFSDAGGAILVPAEQVHEMRLRLASQGLPKSGSVGFELMDNQKFGISQFAEQINYQRALEGELERTVESISSVKSARVHLAIPKPSVFVRDKEAPSASVLVNLYPGRALDEGQVLAITHMVSSAVPDMPVKGVTILDQDGNLLTQPSTGSGLDASQLKYRQQIERSTQQRIDAILAPLFGSGNAHSQVSADIDFSRSEQTSENYGPNGNPQQAAIRSQQSSSATEMSQGGASGVPGALSNQPPQPASAPINAPTGASGVTTTPVSDRKDSTTNYELDKTVRHLERPMGGIKRLSVAVVVNYLRVVDAKGHATMQPVTADKLAQVNQLVKDAMGFDAARGDSVNVVNSPFTTDLDPNADLPWWRTPDMIALARQVATYLGIGAVALFLYFVMVKPALRRAFPPPEPVVAGALPSPDEPILLDGIPAAERAGAGGSSVAELESDSELLALENSKHKYERNLEFARNIARQDPKIVATVVKNWVSDER

SEQ ID NO: 49753 - protein, 331 aa, Burkholderia fungorum
MSAEGVMKSALLLMSIGEEEAAQVFKFLGPREVQKIGVAMAALKSVTREQVDEVLQEFVREAEQHTGMSLDSSEYIRSVLTKALGDDKAGAIIDRILQGSDTSGIEGLKWMDSAAVAELIKNEHPQIIATILVHLDRDQASEIVACFTERLRNDVLLRIATLDGIQPAALRELDDVLTGLLSGSDNLKRSPMGGIRTAAEILNFMSSNHEEGVIENVRQYDAELAQKIIDQMFVFENLLDLEDRAIQLLLKEVESEALIISLKGAPPALRQKFLSNMSQRAAELLAEDLDARGPVRVSEVETQQRRILQIVRNLAEGGQIVLGGKAEDAYV

SEQ ID NO: 49754 - protein, 347 aa, Burkholderia fungorum
MTTAAARLRVGVVGLGRLGKRHAENLAYRVPGASVVAACSPVEEEREWAREALPAPRLYDDYAALLADREVDAVWLVTPSSLHAQQIVDALRAGKHVFCEKPLSLDLAECERVLAEAARYPHLQATIGFMRRFDPSYKDAFDRIAAGKIGRPFLVRSQTADQNDRDGFFVRFAATSGGIFLDCTVHDIDVARWLLGKPRAKRVFAAGAAVMHEGLREFGDVDNGVAICEFEDGKLAVFYASRTQAHGNDTHSEVMGTAGALAIGHNPRANRVEIYDATGIRNECTANFFDRFEDAFLFEARAFVVAVRDGVASSAARAGASLADALEATRIAVALRESLLTGQAVMV

SEQ ID NO: 49755 - protein, 444 aa, Burkholderia fungorum
MFFNARTQRHRVSDQYAMRAVPAVKAPRIRTNFLAMMVWQVGNYLVPLATFPYLTRVLGAANFGVLGYAMAIATYGMLVTEWGFFLSGPKAVVDRRERPEALNELVWSTMIAKGCLCALSFAVLLTVVHFDRKLASVFPVVLAAWPMAIGNVFTLNWLLQGLERFPVFATVALAGRFAALPLTFIFVRDSGDVAFAAGIQGGAAVLTGLFSLVAARRLGVLRLPSASARSVCQRVRESADMFISSASVSLFGITNAVILASMATPYQVGIYTAADKLKTVANMVPAQINTVCYPRIASLFKAQPRSAARLTVIGALATMATTLAGLAVVACASAPLTALILGAGYAGSASLLKLLCGATVFGNLAYFLGLQVLVPFGRARTRSLLMLAAGALNVGLALVLTPRFGAEGAAMSVLAAEAALLAVFVAMILSRPSLRHHFTQLLIR

SEQ ID NO: 49756 - protein, 1154 aa, Burkholderia fungorum
MKRDDPAQTTSQAHSSAATGGVAKARTHRRGKPAALSDDPLWYKDAIIYQVHIKSFFDANNDGVGDFPGLIAKLDYIAELGVNAIWLLPFYPSPRRDDGYDIADYRNVHPDYGNLSDVKRFIQEAHARGIRVITELVINHTSDQHPWFQRARRAKPGSNHRNYYVWSNTDQKYLETRIIFIDSEPSNWTHDPVAGAYYWHRFYSHQPDLNFDNPAVLREVLQVMRFWLDMGIDGLRLDAVPYLVEREGTNNENLPETHAVLKKIRATIDAEYPNRMLLAEANQWPEDVKEYFGDEDECHMAFHFPLMPRIYMSIASEDRFPITDIMRQTPDLAETNQWAIFLRNHDELTLEMVTDSERDYLWNTYASDRRARLNLGIRRRLAPLMERDRRRIELINSLLLSMPGTPVIYYGDELGMGDNIHLGDRDGVRTPMQWSSDRNGGFSRADPEQLVLPPVMGSLYGFDAVNVEAQSRDPHSLLNWTRRMLATRRAKQTFGRGTIRFLKPENRKILAYLREMPGEPPILCVANLSRAPQAVELDLSEFDGSVPIEMTADSVFPPIGQLTYLLTFPPYGFLWFMLCPGGQRPTWAQAPSEPLPEFVTIVIREGQVGPTPENVRLLESEVLPSWLSRRRWFASKDQKLNAVRLAALTTIPNGGFAFTEIEADVGKHTERYVVPIAITWGGETTFPLFKQLALARVRRGRNVGHLTDAFALPIFAHGVMRKLRERAVVPTVQKSEIRFLPTERFAELEGLGERPEIRWLAAEQSNSSLIIADAAVLKLVRRLVSGIHPEAEISRYLTQLGYANTAPLYGEVVRVDPEGVPHTLCILQGYIDNQGDAWNWSLDYLRRSVDELAIAVDTETQSVPDRSNEAILVEGYSTLAGIIGRRLGELHVALASPTDDPAFAPEPASAEQVKAWVDGTQAMLASALDLLAPRIEQMSDTETRALAQSLIDRRAALVAAVDSLVSANAGALRIRIHGDFHLGQVLVAQGDAYLIDFEGEPARTLEQRRQKSSPLRDVAGLLRSLSYASAAAQSTTEAAPQQTADRKRALFDRFRAHAAEKFLNEYRAAAAEAATPLVAPEAEQALLDLFLIEKAAYEIRYEAANRPTWLSLPVRGLAALTSRLLGDTGAPGHDSSNQAPGAATPPNPAEGDYE

SEQ ID NO: 49757 - protein, 1862 aa, Burkholderia fungorum
MKASTRTALRQLEQSRLVRGDMPDRTAQSSRLRWFASMPSRSYCWWQRAVSALVAVTLFAGPLSVTFEQSRDAADVLAAGNRRLDDEAWQRIIDLAAVRVRFAMQEAQATPMVDPTAPISFQPKITQSTGAGGGVPVVNITAPNAAGISLNQYQSFNIDPVGLILNNSLMSGTSLTGGNVQANPNLSGRTASVIVNQVTSTGTAYASLLNGPLEVFGAPATVIIVNPNGIATQGTGFTNTIGVTLSTGTPQFLTGVGGTPTSFDSAQAIGYNVTGGHIQIEGNAGVNGPGSGIEGTVGTIDLIAETIGVNAPLYAGTRINAIAGDQFVSPSAVDATGTTYTTAANGSANTAAAINAANGNANNGLAIDATAYGAMTAGQIQVIGTAAGMGVRTDAQLAANAGDLSLSVNGDVTMAGSAAQQQASVTSSGNVSLTGTHIGVGGYAISANGDVTSTGSIQSGNTLSINAGGNINVANTQSNGDTTLVAGANATTGDTQSGGALSVTAQGKDGTGDITLNGTSVITGATTLVAAQDTNINGQTSSGTLQATAQRNVNVNAAVQTSGDLALSATNGNLTTSANVNSAGNLALNSGQTTTIAGQATGQNAVTLTAGQGASVTGSLASGMTLTASTPGAFSVTGSLLVGTNATIGSGSLDVPGVLIVQNNGTVTAQGDITGSGSMAFGQNGTLTSGQDVNVTGKLLANGLQVSAANSVTLNGVQAGGAFTVTANGASGNGDVTFNGNAAAVGVTTAQAAGDVVVNGTLAGGAQVALTGQGNVTVAAAGTVQSVGNALLTANTGSVNSTGTVNSAGTLVAQAAQNVSLTGATSVTGDTTLTAGSDVTTGGTFAGQGNGTITAGQDVNLGGTNGFTKDVTVTAGNNVNVPGALQGNNVTLNAGNSATLGNVQANSALAVTANGSGGTNGNGGAITVNGSVTSQTGSTLNAGGSVSVAATGTLGTSATMSVTAAGNTTNAGTIVSNGNMNLANTAGSLTSSGTIESGTDLNINAAQSIDLGSNSTTALGNLTLTAGQNITMNGSIVSQGNGTLNAGGTIGGVGALAFGNAATLTSGRDTDLTGSLRGATIQTGAGGSGTFADVQAGSTIALTASNDVNLTGTLAGGSTVALTAGQDVNVSGTLQSSSDTNLTALYGSVGVTGSVNSNGALNVLAGTDINLGGTTTVALDTTLQSARDVNVTGSLSGQGNGFVTAGRNIGGAGSLAFAQSAVLNAAGAISQGGLIQGQNVQVSAVGNVAVNNIESTSTLALSAGTGGSGSLTVNGAAAAASAITATANGDVTVASAGKLAAGTTVGVTALNDINVAGAIESNGDAVLNAQQGSLNATGGINSGAELTITTGLDLSLGASTSAVGDVTLNAGRNAILNGTLVGQGNGYISAGQDVTGPGTQAFTNAAVLGAQGDIALTGSLQANSVQATGGDNAALNNVTSSTTLTLTANGNAGNGDAAITGTATAPGLVTLNAARDVLISGALGGGTTVTLAAQRNATVSGTVQAVGDLDVTATNGSAALTGTATTTGALNVTSGLDTQLGGQIAVTNSLTVQAGTDVELTGTVAGQAAGSLTAGQDITGGGSAAFAQAATLSAANNVALTGALQGSGISVTGGNNAGLGSAQATTGNLDVTANGNAGQGDVTFGGAVTAIGTTTLQAARDVSVAGAINSGGTASITAARNAATADVNSAGDLTITATSGNLSAGNVTTQGNLNESAGQALSASGQTEAGGNATLASGGDMTLTGGIAAQNTGTLTSGGTLTAGSVAFGQQATINADGSINVSGSVATNGNLAATATDSLSMGSVQAGVPLCGSSSVRGGFRLIEGAVAEHREQHVAASSGKSNERLIVALALLDLASVVVP

SEQ ID NO: 49758 - protein, 319 aa, Burkholderia fungorum
MGRLIDIAWPQLNVKVVAELNDERNPELCEEFWQQLPFKVTQAHPVVSGASMYAWTPVVSSAPVHHRELITECPIGRLRYSQSTGNKMSVQYGKGQEPLAQPVLGQVLPEYCHLLPGVGKAVWNNLFYEKDVIFLEVSAHEGQGHSGKPAKPMNLAPLAQKLYDEAERIQLVEPEEIRALRLGEVEDAGTYGQYFSAWDFANGMLRDYIMYTIYPILTLAGKLEPKALSQVLNELDVPYSSYLSVVGFKKLEALAGELREYVATAETKEEIQQVLRAFLKYGNRLCAWSYQMFPWYLGMFYNRSKDGQERPGRWKPDAE

SEQ ID NO: 49759 - protein, 933 aa, Burkholderia fungorum
MNFSRLFILRPVATSLLMVALVLVGLVAMRFLPVSSLPDVDYPTIQVQTFYPGASPNVMATTVTAPLEVQLGEIPGLQQMVSYSSEGASVITLQFDLSLNLDIAEQNVQQAINAANSFLPTGLPAPPTYAKVNPADQPILTLAVTSKSMSLTQLQDTANNRLATKISEVPGVGLVTTAGGNVPAVRVEADPQKLAAYGLNLDDLRTLLANVNVSQPKGNFDGPELDYTINANDQIVDPQDYLDSVIAYQNGAPVYLRDVARVSQAAQDVERGAWYNRTPAIVLNVQRQPGANVIATVNQIMKQLPALESTLPAGLQVTVVANTTGVIRSSVSDAAFELVLAVVLVVLVIFVFLRNVPATIIPSISVPVSLIGTLAVMYQLNYSIDNLSLMALIIATGFVVDDSIVMIENIVRYLEEGKTPLEAALEGAGQIGFTILSLTVSLIAVLIPLLFMGGVIGRLFSEFAITLAVTIVISAVVSLTVVPMLCARLLRAQAQRHPSRFERFSEGLFDRTLAAYERGLNWVLDHQMLTLAVALITVALTAILYIVIPKGLFPVQDVGVIQGISVADNSVSYTAMVRRQSALADAILKDPDVVSLTSYVGIDGTNPTLNNGRFLINLRPRDDRSVTAEEIGRRIQQEVANVPGIRLYLQPEQDLTLDTSVSRNQYNFVLRGPNQQAFNQYVPALIARMKQISSITDVTSDLNTNGLSVNVEVNRQLAARYGITAATIDNALYDALGQRIVSTIFQQSDQYRVILVAKPETLPTVQSIGNLYLPSQTSSSGQVPLSGIAKISITQSPLMISHLAQFPSVTISFNLAQDASLSAAVAQIRDAERAVQLPPSITTSFQGAAQAFEDSLSSEVYLLIAALVAVYIVLGVLYESYIHPVTILSTLPSAGIGALLALMIAGSDLDVIGIIGIVLLIGIVKKTAIGWSD

SEQ ID NO: 49760 - protein, 497 aa, Burkholderia fungorum
MRHQYATPWIWIFLIPLAFDYKATDANTGHFAQFIFVLPAIAAGIALLLIAPRFHERSRLRSAVTWSMMLCVFGSIVAQLVQDNDSGNYLRVLLPFILFMLGYLVACRPWSEFRIAQFEKALFIANVISLVFTMVYGLATGGDLEDVRFRILSVTLLGLQGVLLHEFVVAKRFSFFTVGVFALSILIELLSVTRSVLVGTVLLFLIAVALSAPSIQHIWRAMSRSIIIGAVLAGIAGVAALSFPTVAEHWTQRIFASEETRSGKDPTTITRLAEMRDQYDQVTADPAALWFGEGYGHYYRYSPVYLPDLAGQISEKDFYAINEWAAGHNFWVYQFFAGGLLFGLAMPLVTLAALAICFFSYRYWRSVVPDAPMLPVLGRAIMLFAALPATSIGGNPLGPRFSGLIFGVALGLMIATHARLQRALPARARRLRRPPYVRPDAMPELPGRVQPGMGRADLPSTLGMSRTAHTARDSGQFGALVPHTPPRHRSNRPDIVR

SEQ ID NO: 49761 - protein, 304 aa, Burkholderia fungorum
MKFTTFACDGQPCLGVATENDTVLSLTHTWGAGPLIDGAAPRDIGQLIELGDNALKVVRTIIEDQAGSEVYRHAAHTLQFLPPLGVPRKNVFCVGRNYREHIIEGNLAAGRDPHDFPKALELFTKPPTAIVGHRAPVKLHAHVTKLLDYEIELGIVIGKRGIDIPREAALDYVFGYTIVNDITARDLQKRHGQWFKGKALDTSCPVGPYVLHGSAVRDPQAFELDLDVNGELRQRASTASMLFGVAEIIEQLSAGLTLEPGDLIATGTPSGVGFAMQPPRALAAGDTVRARIGGIGELSNTIVE

SEQ ID NO: 49762 - protein, 486 aa, Burkholderia fungorum
MQNVSNPVDAGTAARLSDWMRNRSWAIAMTVAIVITVGGLVILETARERIAAEYETALEARDVTVQLSTLASQLSHLSAQQSDFLLTRQDASAREFCATAVRIRQSEQQLNRFYRSGKADSAELASFTQILALIEARIGAGASALQRAAPHPLDLAACGGASEANPADASLVDSTLTLLRDNEERRAQHALAASRGDQRISTLCAAGLSALNIVLFILLFRNLGIQIDRQARVQRQLITQQEGLDQLVNERTRQLEALGWHLQAVSENEKTQLARELHDELGAILTASKMDVAWANRKLKDSEPDISEKLRRALANLDQGIALKRRIIEDMRPTVLANFGLVTALRTLADEAAQRNNWTLDLHLPADDIQLDEQTEIALFRVAQESLTNAAKYARASKVSIALQVGDGQVALHIADNGVGIMPADLKRTHTHGLLGMRQRVAAHGGRFEIRRGVPNGTDIHVEMPSVSTATPSVDLPPATPTRTPV

SEQ ID NO: 49763 - protein, 668 aa, Burkholderia fungorum
MEHAYVHLLHLLAGHPGWTLTVVFLAAFLEAIAVIGTFIPGSTAMFLAGALTGTGSLSLGWVFVWAIAGAIAGDGMSFWLGSRYKHRIVQFWPFCKHPEVLEAGHRFFRKHGAKSVVLARFIGPLRAIVPVVAGMLGMPPLRFYGMNVLSALIWAPAHILPGMIFGASVLLAGAVSFRLVVIIALLVGIVWLSFRAARVLLSHANVWSTAAGRQVGSWACRHPGPFGRFARKMLDPRTPDAGSILLTSLVVLVSGALFFGVLDDVISGDPLTQVDLSVYHFLRSVRTPWSDTVLAGLSTLGSNMTLMALIVTVVVWMLLERRWRTIGYWLAAVVFSQLLIFVLQFAMHRAPPNELMVGAYVFPSNHVAATVIVYGFLAFLLARRVGMLEGVLVAAASTIVVIVVALAGLYFGRYWVSDAIGGAALAYVWVAIVALTAMWRHPEAPPERTFMPVVVLLVMLVSVGVQLGVAMPAPPPDTALLPPPVLVTQAQWTLSTWKHLPCYRSDMGGDRKEPLTLQWASNLDSIRGRLRAQGWVEGTDVSAHSLLSLASPNVAAVSLPVLPKLNNGVPSSLVFMRPGNTRDERDVLRFWPSGYAVATGTSTQPLWVGAFAHERLSRASWPINILRVDREMTSVDAHARSSAGLDAAIVARVSCHGVPVSLLASPVE

SEQ ID NO: 49764 - protein, 284 aa, Burkholderia fungorum
MARYKKDIPMLLAQISDLHIKRPGALAYRRVDTGAYLARCVAALNALEPRPDAVIMTGDLVDQGDPEQYEHLKTLLAPLEIPYFMLVGNHDERAALRAAFPDRKELASGGEFVQYAVDLGALRLIALDSMVPGQSAGDLCDARLAWLAAQLDAAQGKPTIVALHHPPFVCGIGHMDELRLDPAAAGRLAALIARYPNVERVICGHVHRPMFVRFGGTIASAVPAPAHQVALDLREDAPSAFMMEPPAYALHHYDPATGIVTHHAYVDAADGPYPFYEPEGDLID

SEQ ID NO: 49765 - protein, 232 aa, Burkholderia fungorum
MPRAFADPPCSICAANQSGASQVTYAYKLMDSPVGQLKLVANGERLAAILWQNDKPNRVRLGELIEANDRPVLIDTERQLNEYFAGTRREFDLPLAFQGTEFQKQVWAALLTIPFGQTRSYAEIAVQIGNVNAVRAAGAANGRNPISIVAPCHRVIGASGDLTGFAGGLANKMFLLSLEAGQTSLEAQADRQTDMFAEEGKAKVEAQARPEAQTKPARHAPRRGTQSSLFGT

SEQ ID NO: 49766 - protein, 568 aa, Burkholderia fungorum
MTLRIGRRAYAEMFGPTTGDRVRLADTELLIEVERDFTTYGEEVKFGGGKVIRDGMGQSQRVHADVVDTVVTNAVILDHWGIVKADIGIRNGRIAAIGKAGNPDIQPNVTIAIGASTEVIAGEGLIVTAGGIDTHIHFISPQQIEEALASGVTTMLGGGTGPATGTNATTCTPGPWHLERMLQAADGYPMNLGFLGKGNVSQPQPALEQIAAGAIGLKLHEDWGTTPAAIDNCLSVADDTDTQVAIHTDTLNEAGFVEATVAAFKGRTIHTYHTEGAGGGHAPDIIKVCGEANVLPSSTNPTRPYTVNTLEEHLDMLMVCHHLDPSIAEDIAFAESRIRRETIAAEDILHDLGALSMLSSDSQAMGRVGEVIIRTWQTAHKMKVQRGALPEDNARHDNFRAKRYVAKYTINPAITHGIAHEVGSIEPGKWADLVFWEPAFFGIKPSLILKGGMIAMAQMGDPNASIPTPQPVHYREMFATRGGALSRTSLTFVSQMAADAGVAERYGLNKRIVAVRNCRNISKADMIHNAWRPAISVDPETYQVIADGQLLTCEPATVLPMAQRYFLF

SEQ ID NO: 49767 - protein, 225 aa, Burkholderia fungorum
MRTIDKLIAPHLKLAPVLVKRAPTLTLAFDDRRKSRLAATLDSGEEVALLLPRGTVLRDGDVLVADDGGLVRVIAAPEAVLYVRAKDALTLTRAAYHLGNRHTPVEVGADYLKLEFDPVLADMLKRIGATVDQVSMPFQPESGAYGGGHKHGHDETFAEDYALAQQVFGEHHGHEHSHDHEHGHSHAAHEHSHGHDHTHGHDHDHGDHVHDESCGHGHHHHHAHR

SEQ ID NO: 49768 - protein, 226 aa, Burkholderia fungorum
MRIAELTALLHLASPALPIGAFSYSQGLEAAIEAQLITDADSAREWIASGLTDVLARGELPFLAHQMERWRTHDAESLRVANSEFLASRESAELRRETEQMGWSLRQLCVSLEWGDADRRATLASMTPLAQPTAFAFAAYAHDAAVDATLAAYAFSWVENQAAAALKAVPLGQLAGQRIIVALREPIDAAVTRALATSPDNINTFAPQLGILSARHESQYSRLFRS

SEQ ID NO: 49769 - protein, 217 aa, Burkholderia fungorum
MNAPHHPAHSTVRTKKLPPLRVGVGGPVGSGKTTLLEMLCKAMREQYDLVAITNDIYTKEDQRLLTVAGALPAERIMGVETGGCPHTAIREDASINLEAVDRMLTRFPDADIVFIESGGDNLAATFSPELSDLTIYVIDVAGGEKIPRKGGPGITKSDLLVINKTDLAPMVGANLEVMAADAKKMRGERPFVMCNLKALDGLDVVVKFIEKKGLLKV

SEQ ID NO: 49770 - protein, 333 aa, Burkholderia fungorum
MSVQKILIVRVSSLGDVVHNMPVIADIRRRHPEAQIDWLVEESFVGLVQLVSGVRRAIPVSLRRWRKRILSLDNWREIGAFRRALAAENYDLVIDCQGLIKTAWVANMARGPLVGLANRTDGAGFEWPVRFFYDRRVPIEPRTHVVERTRQLVAAALNDPPPQPTDHIDFGIDTGRAALALSEANLNLPVPYVVFVHATSRADKQWPDTAWIELGQSLVRRGASIVLPWGSEAERATSERLAKEFGAAAIVPPKLSLPAVVGLIEGAAATVGVDTGLVHIAAALKRPTIELYNFATAWRTGGYWSPNVVNLGTAGQPPTLQQVKSALAGFGLL

SEQ ID NO: 49771 - protein, 317 aa, Burkholderia fungorum
MSVIVLCYRQDEYVGACLQSVVDQHLDVPFEIIVGDDNSPDNSLAVIESFRARYPDLIKVVAHDTNVGCAANFADTVAIAKGEFIANIDGDDVMLPGKLQRQLDFLKAHPECGLVVHRMRTVDQDTLEPVLYPLPKKKPATFDAAYLIRNGPYFFHSSEMYRARLRRRGPVDVGLKAVCDLAHLLQVVVGTQGCYLDEELGLYRVNRTGMTSMRIRNPERHRESMNDMIETCLIAANLGVESDAVNRGRARFYLTSAIFYLEHGREDSFEDCIEASRRSARIGMKQLVLYSMRRWPRVLCTVYTRAKQVAGRQRMNA

SEQ ID NO: 49772 - protein, 121 aa, Burkholderia fungorum
MSQPVPHGTAATTVATLRTYSMKLTPREKDKLLIFTAALLAERRRARGLKLNYPEAIAFITAALMEAARDGKTVAEVMHYGTTLLTRDDVMEGVPEMIPDIQVEATFPDGTKLVTVHHPIP

SEQ ID NO: 49773 - protein, 1246 aa, Burkholderia fungorum
MLNKSYKTVWNKTTRTYAAASEVTKSRGAKGASVRGSLVAASAGLLGALAFSQPAAAAECASSEPDCLSVAQALAQVAASSAASVPPAADDAAKPADLAAALDNARVFTGNPALDAAAAPVTVSSNRAGLLGATVPTPVTDYIAVSPNVVQGTRTSASTDLNAMAIGPTAAASGFNALAVGSASIAGSDASTAVGSAAGVGSVNSTAVGAGAMVVALSNNSVAVGYNSRSAAMNTISLGSFASAASSGSVAIGYNSFINPGAKGAVVIGANASASGTGSVALGSDSIADRVNVLSVGNLTQGRQITYVAAGTRPTDAANVGQLSGVAEALGGGALIDPNGAVVAPAYTVGGTTYHDVGAALAAVVSGSAAGSADALRYDTPAHDVATLGNKVTPVKLTNVADATLSAASSDAVTGAQLYGTNQAVGKNTADITNITNNVNNISNGKAGLVQQDAVTHDLTVAKGTDGKHVDFTGLTGSRELVGVAAGTAAGSAVNLAQLSPVVAALGGGATVNANGSVAGPTYHVQAGTQTTVGNALSSLDTGLSSLQSQISGGTVGLVTQNAASHDILIGASTTGTRISVAGTGGNRVIGGLTAGAVGAASSEAINGAQLYANTAGTAAALGGGSTVNADGSLKRPAYSIGGSTYSDVGSALAAAVTTSVQAGANSVQYDSAAHDIITLGNGAAPVRLTNVRAANLAADSTDAVNGQQLFATNQAVAQNTGSITNLDQRVTDNTTNISSLDQRVTDNTTNISHLDQRTTTIEGDVTNITNQITNGEIGLVQQDQASRNLTVAKGTDGARVDFTGTGGARELTGIAAGTTDASAVNLAQFKPMVAALGGGAQINADGSLTGPSYHMQGGTQTTVGDALGSLDNGLSTLQQNMENGGIGMVTQDPVSRVISVGATTNGNLINMAGTAGNRVVTGVAPGAVSSTSSDAVNGSQLHAQAASTAVALGGGATVNADGSMTAPSYSVGGTVVNNVGSAITNLDGRVTRNSSDIAGLQTTIGNLNGAVANAVQYDGSAHDRITLGGTAANAPKVQLTNLKDANLSATSTDAVTGAQLWNTNQDVSTLNQLVQTVRNNQTTGTPYVSVNSSGNAAQAIGNGSVAIGGGAKASAPNSVAIGEGSVADVTNTVSVGSSGSERRITNVAPGQAPTDAVNMQQFQGGLSDMARNAYSGTASALALTAIPEVDSSKNLAIGVGTAGYKGYQAVAVGLSARVTQSLKVKLGAGISSATTAVTAGAAYQW

SEQ ID NO: 49774 - protein, 471 aa, Burkholderia fungorum
MRTAIRQPAGRNFADVDSMLARLLDVMLIALGAALASFALTPHAGLSIFEGAFVAFDMAFAILLLPWFGVYDSWRGRSKWRLATNIVFGWIAVQICGLAMLFLLHRAASVSRLWCVSWTAITAVGLVASRLLVHAVLGRLRRAGGNLRLVAVVGAGAHRDRVIANIVRSPDAGFRAVATFNTRQARECDFPGLPSFGRLREFAEWVRREQIEEVWLALPMSEEDTVLRILDEFSGDLVNLRFIPDVRSLAMFDRNVIDLVGAPAINLMASPMTPYALIQKALFDRLFAAAALLALTPVMLSIAVAVKVTSKGPVLFTQRRKGADGRVFRIYKFRSMREHASRPGVVRQATRGDPRVTRVGAFLRRTSLDELPQFLNVLRGEMSVVGPRPHAIEHDDQYRSIVDGYIHRYRIKPGITGWAQVNGFRGETDRIEKMQARVEHDLYYLRNWSFGLDMRIVFATVVRGLRHRNAY

SEQ ID NO: 49775 - protein, 736 aa, Burkholderia fungorum
MKLLDQERSGEAPGEKEITLSDVIALLGENRLLIVLTTAAMLFLGVAYAFVATPLYKADVMIQVDSDPGNQTLNDKLGDLASLFQSKASTDAEIELIRSRMVVEETVRSLHLDIKATPRRFPLIGALIARYMSAGAPANPVLGMSRFAWGGESLEVTQFDVPVTLYDQSFKLTVGLNQTFELRDSDGRAVLHGDVGVAAQGMTRYGLVQLKVNRMVARAGTSFNLARASTQLTAADLRSALDISEKAKQSGIIAISLEGADAAKTAATVNRVASIYVQRNVDRKSAQAQQMLQFLGEQLPQLRGDLDEAEAKYNAFRTENGTVDLEAEGRLLLQSIVDSQTRLVELQQQRSALAQRYTTQHPSVQAIDAQIADLKKRQGAFNEKVAALPNVQQQALRLMRDVRVNTDLYTKLLDSTQQLHVLKAGQLGNVRTVDYAEVAERSVKPKKTLVIVLSGVIGLLLGCSIAFVRSTLNRGLETPSEIEGAVGVPVYAIVSKSTRQRALQQAARGSAPGLNVLAAVQPDDIAVEGIRSLRTALQFGLLKSRNNIVMLTGPRPGVGKSFLSVNLSAVLSAGGRSVLLIDSDMRRGNVHRYFSLPSKPGLSDVIGGVEPSSAVHRQVLPNLDVLMSGSVASSPAEMLMSDSFGRLLTQFSKQYDVVIVDSPPVLAVTDPVLVGKHAGLTLLVVRHGRHSAAELQESARQLSSAGRAVDGVLLNDVPLRASTYGAFSEYGAQKAR

SEQ ID NO: 49776 - protein, 469 aa, Burkholderia fungorum
MSKQAIGVVGLAVMGRNLALNIESRGHAVSVFNRSREKTDELIAEYPDRKLVPAFTLEEFVESLEKPRRILLMVKAGEGTDATINQLKPLLDKGDILIDGGNTHFTDTIRRNQDLAKSGLHFIGTGVSGGEEGALKGPSIMPGGQRDAYDLVAPILTEIAAKAPDGEPCVAYMGPDGAGHFVKMVHNGIEYGDMQLIAESYAVLKQVVGLSNEELGKVYTEWNQGELDSYLIEITSKIFSKKDEETGKDLVDVILDRAAQKGTGKWTSQNALDLGAPLPLITEAVFARVLSSLKTQRVAASKVLEGPAARPLGAEREAFIESVRRALYFSKVISYAQGFAQLRAASEEYKWDLDYGTIAKIFRAGCIIRARFLQKITDAYTKDKAIANLLLDPYFRDIAKNYQSALREVVIAAINAGVPVPAFASAIAYFDAYRSERLPANLVQAQRDFFGAHTFERIDKPGSFHANWS

SEQ ID NO: 49777 - protein, 310 aa, Burkholderia fungorum
MDVMARIPKLTTTLAYDRYMAGQKLVSSVNRPWRHLVLRSYLEPVEQELLEAPGLQELTLMTLASGAEHLERNLNGRWESADLRVGDVWFVPPAPISWRWRSISDEPLSTVHLHIERSLIDSVAEQMELGGSRELVLGDAMQFRDPLVAAMLAALHRAAADPADSRLFVDALVHALAAHLLQHYSRGRSAAAGSPAGLPACPERFVPRRIRRVTDYIRANLAGDLAISELAAQAGLSSFHFARVFRRETRETPHRFVTRLRLEEAARLLHATDQTVLQIALAVGFENASHFSVQFKRDYGVTPLAYRLRG

SEQ ID NO: 49778 - protein, 234 aa, Burkholderia fungorum
MDAATMDETVATIMTRVDAGRFTQHVVVNVAKLVHMQADKELAKSVQDCDLISIDGMGVIWAARMLGHAVPERVAGVDLFDRLLAEAARLGLPVYLLGATDEVVTRVATICTARYSGLQVAGYHHGYFGDDQQSVVDRIRESGARLLFVAITSPTKENFINRWQAALGVDFVMGVGGTFDVVAGKVSRAPRWMQRSGLEWFFRVLQEPRRMWRRYLVTNSKFALMLGKALIVQR

SEQ ID NO: 49779 - protein, 561 aa, Burkholderia fungorum
MLFMKWVTHQHFKNWYDHFPQPSTAARAAATISLATRPRARAHGHSDRFRQAPAKRGLRRHPMSYQYDERVDGPLATHDKATVVAQLQALIPDLPLLHEQEDLRPFECDGLAAYRATPMMVALPDKVEQVEALLKFANAHKIPVVARGAGTGLSGGALPLDKGILLVMARFNRILEVDPEACVARVQPGVRNLAISQAAAPHGLYYAPDPSSQIACSIGGNVAENAGGVHCLKYGLTVNNILKLEILTIDGERITLGSDALDAPGFDLLALFTGSEGMLGIVTEVTVKLLTKPQSAKVLLASFDDVEKAGAAVAQIIGAGVIPGGLEMMDNLAIRAAEDFIHAGYPVDAEAILLCEVDGVESDVREDVACVEALLRAAGATDIRLAKDEAERQRFWAGRKNAFPAVGRISPDYYCMDGTIPRRELPRVLKGIEDLSKEYGLQVANVFHAGDGNMHPLILFDANAPGETERAEAIGARILELCVAVGGSITGEHGVGREKINQMCAQFNSDELTFFHALKAAFDPQGLLNPGKNVPTLHRCAEFGSMHVHHGALPFPELERF

SEQ ID NO: 49780 - protein, 374 aa, Burkholderia fungorum
MRRLSNIYRLGVKELWSLWRDPTMLVLIAYTFTVAIYSAATAQPDTLHMAPIAIVDEDASPLSARIASAFFPPQFGIPRLIAPAQVDHGLDTGEYTFALDIPPNFQRDVLAGKPASIQLNVDATRMSQAFTGSSYVQQIVTDEISGFVARYRDTAPPPVDLAVHMRFNPNLDQTWFGALMEIINNVTMLSIILTGAALIREREHGTIEHLLVMPVTPAEIMLAKVWSMGLVVMVVATASLTFVVRGALHVPIEGSVALFMVGTALHLFATTSMGIYMATLARSMPQFGMLLVLVLLPLQMLSGSITPRESMPKIVQDVMFFAPTTHFVELGQAILYRGAGLDVAWRPFLILIAIGSVLFAMALRRFRRTIGQMA

SEQ ID NO: 49781 - protein, 241 aa, Burkholderia fungorum
MKLKQAVTGIAALACMTTAAHAQSAGSFYVTTGWFHLAPQSNSEPLKVTSIGGSPTNITEANTGASLSSADTIGITAGYFVTDHIAAELVVGYPPSFDLEGSGSLAQFGKLGQAKQWSPTLLFKYYFNAPTAAFRPYLGVGVSRIWFTDEKITNSAFEANVLHGPTSVTTDSSWEPVFNAGFTYAFNQHWFAGFSVSYLPLSTTAKLSTAANTPVGTLNVQSQTKIKLNPIVTYVNIGYRF

SEQ ID NO: 49782 - protein, 295 aa, Burkholderia fungorum
MAVRTTGRHAGDTKSRILDAAETLFIECGYEAMSLRQITSRAEVNLAAVNYHFGSKESLIHSMLSRRLDRLNQERLKLLDRFDAMLGERLTCEHVLGAMFIPALRLSRDPRVGGKAFLRLLGRAYTDPSSFIRDFLNGHYASVAVRFFDAFQRALPHLPREELGWRLHFAIGALSGVLAGTDTDSLISEFSQGKSMNDLQLIARLASLMVAALKAPLPDGSQLAAFAAVLGDATEGGSECPIDGSAQGAASTARASGESASASASASASAGISEGERRGDNMEAGAFQHALHGTA

SEQ ID NO: 49783 - protein, 406 aa, Burkholderia fungorum
MIISALCPLSRPVYSRSMPYAVSPDGRSSVPLAIAWYVSHMSHMAHVQRVERVAHFEHALRHVRASAFSEPVARGVPLMASVFRAGNRLASGSVGFVTRRTALTLALSAAGGAAALALGAGFALGTHWPVHAARSGEPATAHVEHDYAIDQLGKLNASVAQIEPRIARLSAQVGDLRDFEARLNTPRSAPRAPVVSATPAAAPASDAAATDSEDEGEGGPSLPPLRCSELAPALSRHADAGRTAQQLDCIAATLSALEQQTASHAVAFAAFPGRMPADGARFGSPFGNRIDPFTHRLSFHPGLDLVARTGTPILAAAGGRVVFAGEKSGYGNAVEIDHGNGLMTRYGHASRLVVHVGDLVLPRQYIADVGSTGRSTGPHLHFEVLVNGAPVNPVAYLALFSPAPHG

SEQ ID NO: 49784 - protein, 220 aa, Burkholderia fungorum
MTSAPALHTTNEARVREEICVTGASLYQRGYTVGTAGNISARLDDGWLITPTDACLGRLDPADIAKVDLDGNAVSGARPSKTLALHRGIYARNGEARGIVHTHSTHLVALTLAGVWRETDVLPPITPYYVMKVGHVPLIRYRRPGDPQVAEQIAALADSVRAVLLERLGPVVWERSVAQAAYALEELEETARLWLTTNPRPAPLDEAALEELRTVFGARW

SEQ ID NO: 49785 - protein, 90 aa, Burkholderia fungorum
MDDTSHQSDPLRRARLRWRARRGLLENDLIFERFFGRYEHDLSDADVGALTRLLELSDNDLMDLLLARKEPEGDLADPDVVRVLELLRNA

SEQ ID NO: 49786 - protein, 470 aa, Burkholderia fungorum
MTDNSTAHRAAPLGETLDALRAALGEDSVRVGEQISERAMTDWTRHEPTRPAALLLPRTTEQVSRALAICHAAHQPVVPQGGMTGLAGGAIARATDIALSLERLDGVEEVDAASATLTVRAGTTLQAAQEAAAEAGFELALDLGARGSCQIGGNLATNAGGNRVIQSGTARDQVLGLEVVLANGDVLTSLGKMVKNNTGYDLKHWFIGSEGTLGVITRAVLRLHPPRAARHTALVALDGYDAAVNLLRRLSTRFGNDIGAFEIMWPDFYDFGVKLTGTRSPFADAHPLYALIEHASFDSDDDGERFSAALTEALEAGAIRDAVIAQSVADVRALWAIRECTAEFPVRLDAINFDVSLPIGAIGAFVDRCRAALDQRWPGNASYFFGHIGDSNLHVTVDGHSIPGVNHHAVYAFVYDMLGPLHGSVSAEHGIGLLKREFLPISRSPAELAAMAAIKHALDPHGILNPGKLF

SEQ ID NO: 49787 - protein, 389 aa, Burkholderia fungorum
MSDRSAEHLRRGRCTDQHGNARVTANGGGRNAGDAAKPYRIRERPSAIDWMVNFSRNFTMNKKFASSRVSMIVAASVLAFSTVSAHARVFRVSDVHGDTYPTNMAVKYMGEQINKATGGKDSVKVFGNSALGSENDTIDQVRIGALDMARANGAAFNEIVPESMIPSLPFLFRDIDHFRKVMYGPEGQKILDAFKAKGMIALTFYESGARSIYTKKPIHSPADMKGLKVRVQPSDLMVDEIRAMGGTPTPMPFAEVYTGLKTGLVDAAENNLPSYEETKHFEVAPVYSETQHSMTPEVLVFSKKVWDTLTPQEQDIIKKAAADSVPYYEKLWTAREADASKTVTKGGATIVASSQIDRAAFVKAMQPVWAKYEKTPQMKQLVDEIQAVK

SEQ ID NO: 49788 - protein, 522 aa, Burkholderia fungorum
MFHCCFFLPAFFCPSPTPYPSRRCDRAMTTHHASATPDLPLDMIIFGGTGDLSFRKLLPALYMAHLHCNLPPDTRILTIGRKPWSREEYINEFMEQKAKPFIEKKAFDAAAWDKFLALFEYVRMDVDSVEDYQRLKEASREGVRRVFYLATSPDLFTNICDNLAAAGLVDGNSRVVLEKPLGHDLASAQEINTAVGKHFSEAQIYRIDHYLGKETVQNLMVLRFGNPIFGPLWQAPYIKSVQITVAETVGVGSRAGFYDKTGALRDMVQNHLLQLLCIVAMEPPVSLDPDAVRDEKLKVLRSLRPMTPEDIARDTVRGQYTAGAVDGEAVKGYLEEDNVPAGSRAETFVALRAHINNWRWAHVPFFLRTGKRMQKKVSEIVIEFSELPFSIIPNGNSGRNYGNRLVIQLQPEESIQLQVLAKEPGSGMHMLPVNLNLDLQQAFTERRAEAYERLLIDVIRGRLTHFMRRDELEAAWAWAEPILAGWSKSGEKPRGYTAGTFGPAASTALMARENAVWAEESQ

SEQ ID NO: 49789 - protein, 168 aa, Burkholderia fungorum
MSGLEDLTHMDFRIGQGYDVHALVPGRPLIIGGVTIPYERGLLGHSDADVLLHAITDALFGAAAMGDIGRHFSDTDAKFAGADSRVLLRECFARVTAAGFSIANVDSSVVAQAPKLAPHIEGMRANIAADLGLPVERVNVKAKTNEKLGYLGRGEGIEAQAAVLLIRN

SEQ ID NO: 49790 - protein, 270 aa, Burkholderia fungorum
MDARSYLFVPGDRPERFAKALGTGADAVVIDLEDAVVPAAKLAARDGLRRWLPTVDPARLIVRVNAVGTPWHLEDVEMVRASGVSVMMLPKSDSARQLAEVAARLPSTVRIVALIETVAGVVAMREIAGVPSVARLAFGTVDFCGDAGIEGLGAELDYVRSQMVIESRYAGLAAPIDGVTPELDHLERLTEHVAGARRFGFGGKLCIHPRQVEPVNRGFAPSEDERRWAARVLAACSEHPEGAFAVDGKLVDRPVIERAKKIAEFDTLIH

SEQ ID NO: 49791 - protein, 595 aa, Burkholderia fungorum
MGQYAAPLRDMQFVLHELLNVEAEIRQMPKHADLDADTINAVLEEAGKFCSEVLFPLNHSGDQEGCTYVGDGVVTTPKGFKEAYAQYVEAGWPALGCDPEYGGQGLPAFVNNALYEMLNSANQAWTMYPGLSHGAYECLHAHGTPELQQRYLPKLVAGVWTGTMCLTEPHCGTDLGILRTKAEPNSDGSYAISGTKIFISSGEHDLAENIVHLVLARLPDAPKGTKGISLFIVPKFVPNEAGEPGERNGVKCGSIEHKMGIHGNATCVINLDNAKGWLVGEPNKGLNAMFVMMNAARLGVGMQSLGLTEVAYQNSLVYAKERLQMRSLTGPKAPDKAADPIIVHPDVRRMLLTQKAYAEGARAFSYWSALHIDKELSHADESVRKEAADLVALLTPILKAFLSDNAFEGTNHAMQIYGGHGFIAEWGMEQYVRDARINMIYEGTNAIQALDLLGRKILGDMGAKMKKFGKLVAEFVEAEGVKPEMQEFINPLADIGEKVQKLMMEIGMKAMQNPDEVGAAAVPYLRTVGHLVFSYFWARMARIALDKEASGDPFYKAKLATARFYFAKLLPETAMTIRQARAGSKSMMEVDEALF

SEQ ID NO: 49792 - protein, 837 aa, Burkholderia fungorum
MAPASATCREASNQASRPRISPRRNDVSNLIIRKVAVLGAGVMGAQIAAHLINAKVPVLLFDLPAKEGPKNAIALKAIENLKKLSPAPFGVKDDAQYVQPANYDDDIGKLAECDLVIEAIAERMDWKHDLYRKVAPHLAPNAIFATNTSGLSITALSEGFPDELKARFCGVHFFNPPRYMHLVELIPTATTRPEILDQLESFLTSVVGKGVVRAKDTPNFIANRVGIFSILAVVTEAAKYGLRFDEVDDLTGARLGRAKSATFRTADVVGLDTMAHVIKTMQDTLKDDPFYPVYETPAVLAELVKKGALGQKTGGGFYRKEGKAIKVLDAKTGEYVDGGAKADELVGRILKRPPAERLKLLRESEHPQAQFLWAIFRDVYHYIGVHLESIADNARDVDLAIRWGFGWNEGPFEGWQTAGWKQVAEWVQEDIAAGKALSNAPLPSWVLEGPVAEKGGVHTNEGSWSPASKTFVPRSSLSVYDKQVFRAPLVGETAADPKTYGKTLFETDAVRAWVDDRAGENDVLIVSFKSKMNTIGPSVIDGLTQAIELAEKDYKGLVVWQPTSLKLGTPGGPFSAGANLEEAMPAFMMGGAKGIEPFVKKFQQGMLRVKYASVPVISAVSGIALGGGCELALHSAKRVAHIESYLGLVEVGVGLVPAGGGLKEAALRAAEAATQVGATNDLLKFVQKSFENAAMAKVSASALDARAMGYLKPSDTIVFNVFELLDVAKKEARALSAAGYRPPLRVTQVPVAGRSAIATIKASLVNMRDGRFISEHDFLIASRIAEAVCGGDVEAGSLVDEEWLLQLERRAFVDLLGTQKTQERIMGMLQTGKPVRN

SEQ ID NO: 49793 - protein, 170 aa, Burkholderia fungorum
MEEQDRVAVMQQFGRTYRTFMSAFEAHVGHPLPRWRILLALHEQGGESSQKRLVERLRVDPGALTRQLKTLEGMGWIARSMDTRDNRVTNVRLTEAGQSATEASLPRRNAFLHDTMAGLPDDALGALSAALKLLEARIGEVAAMAGAAGAGSIDITQPPAAVAGEAPRQP

SEQ ID NO: 49794 - protein, 343 aa, Burkholderia fungorum
MPARSGALRTDRLSISADQKKRQLTTIYVRISYMKPIPPLTALRCFEAVARLGGVTQAARELHVTHSAVSQQIKVLEESMGVALFMRAARGLRLTEEGRLYALDIRMALRDITHATRRAQARPHESELVITTLPSFAQHWLVPRLASFRDAHPYYRIRLLTSLQVEDFRQGVSDIGIRMGQGHWPDVAQQKLFDDEMVVVAAPHFALAPDGRFPVTAADVMACPLISSPDTPWHEWCQAAQVSEPAEGAVVLSANDSNLVIAAVLQGQGVALERRSLVAYALARGELLQITDIRVPYPYPYWLVWQQREILDAAQAHFAQWIEGEVDAYLRNGSAPAAAIRAG

SEQ ID NO: 49795 - protein, 131 aa, Burkholderia fungorum
MTNLLQLPQKHCALRVVPQPSDANVHGDVFGGWIMAQVDIAGSIPASRRANGRVATIAVNSFVFKQPVFVGDLLSFYADIVKTGNTSVTVEVEVYAQRMSLTEDLVKVTEATLTYVATDSDRRPRALPTLD

SEQ ID NO: 49796 - protein, 243 aa, Burkholderia fungorum
MSKTHFGFQSVDEQDKAQKVAGVFHSVAANYDLMNDLMSGGLHRAWKMFTIAQANVRPGYKVLDIAGGTGDLSKAFAKQAGETGEVWHTDINESMLRVGRDRLLDKGVITPALLCDAEKIPFPDNYFDVVTVAFGLRNMTHKDIALAEMRRVLKPAGRLLVLEFSKVWDPLKKVYDVYSFKVLPWLGEHFAKDAGSYQYLAESIRMHPDQETLKTMMEQAGLDGVKYYNLSAGVVALHVGTKY

SEQ ID NO: 49797 - protein, 360 aa, Burkholderia fungorum
MSITSTSFQPPKVSICLPTCDRAELIATCIDSCLTQSYGNLEIVIGDDSKDTRTEQLIAARYAHEPRVRYRKNQPALGQARNVASLFERASGDKILLIHDDDLLATDGVEKLVSLWTRHPQLDAAFGDQYEADHGGAIDFEASARLNMAFRRTKEAEGLQALPGRTGLVQMFPNNGWMANAELVKRIGYEEAYGVCCDFVFGTQLCLAAREVFYLHDYVSVYRKTASSISHSTRGTTLAATLSAYAFVRALKLPAELEPSRRLALRRLAPIVVSVHAKNRQALPGFKVAFTHLFAYRYGLNMRLYYHLLMLTRSALSVHRQAVAAAAVAAVTTAPAVAADPAGAVKEFVSEFVSDRSEPV

SEQ ID NO: 49798 - protein, 599 aa, Burkholderia fungorum
MSMRSEYCGLVTEELLGQSVSLCGWVSRRRDHGGVIFIDLRDREGLVQVVCDPDRAEMFKAAEGVRNEFCLQIKGVVRARPEGTTNAALKSGKIEVLCHELIVLNPSITPPFQLDDDNLSETTRLTHRVLDLRRPQMQHNLRLRYRVAIEVRKYLDAQGFIDIETPMLTKSTPEGARDYLVPSRTNPGQFFALPQSPQLFKQLLMVANFDRYYQIVKCFRDEDLRADRQPEFTQIDCETSFLSEQEIRDLFEAMIRHVFKETIGVTLDEKFPVMLYSEAMRRFGSDKPDLRVKLEFTDLTDAVRDVDFKVFSTPANTKDGRVAAIRVPKGGELSRGDIDSYTEFVRIYGAKGLAWIKVNEVAKGRDGLQSPIVKNLHDEAVKAIIERTGAQDGDIIFFAADRAKVVNDSLGALRLKIGHSEFGKANGLVESGWKPLWVIDFPMFEYDEEDNRYVAAHHPFTSPKDEHLEYLETDPARCLAKAYDMVLNGWEIGGGSVRIHREEVQSKVFRALKINAEEAQAKFGFLLDALQYGAPPHGGIAFGLDRIVTMMAGADSIRDVIAFPKTQRAQCLLTQAPSEVDERQLRELHIRLRQPEPKA

SEQ ID NO: 49799 - protein, 277 aa, Burkholderia fungorum
MSTSRQQQGRHQGHIARKRFGQNFLVDMGVIDSIVDVIRPQRGERMVEIGPGLGALTEPLIERLATPEAPLHAVELDRDLIGRLKTKFGDLLELHAGDALAFDFGSLAAPGDKASLRIVGNLPYNISSPLLFHLTAFAHCVIDQHFMLQNEVVERMVAEPGTKAFSRLSVMLQYRYVIDKQLDVPPEAFNPPPKVDSAIVRMIPYELHELPPVDERVLGELVTAAFSQRRKMLRNTLAAYRDSVDFEGLGFDLQRRAEDVPVAEYVRVAQIVAASKA

SEQ ID NO: 49800 - protein, 318 aa, Burkholderia fungorum
MTDRASNAPALDAAIRWAVRLAAGNASEAEFREFLDWKAAAVEHQLAWGSIEQQLHLFSSARERDGGTAHRALAATRVSRRKLLRDALATVAVVGVVGAAVRRFGLFDSLYADVATDVGARRQLSLADNSMLVLDARSAVDVNFGERERAIRLLEGRLFVRVARDSARPFVVYTRDGSFSALGTAFGVGLSSEGSRLAVTHSAVRARCAAGATLDVVASQVATLRAGAQPVVERWHADSEVTWMKGYVTIVDRPLHEVVESLNRYVRGFISMSDDVAALKISGLFPLDDAQMAIRQIAQTLPVIVTYHTDYFIRITAR

SEQ ID NO: 49801 - protein, 437 aa, Burkholderia fungorum
MNIIWARSIVSVVLLAVLCVVVGALVNVKAALVLAIVMLLAQSVFSTFHKQRLWRLLDAPVYGEVPSAPGIWGEIYYRLHKLAKRWHAQVRQVEQQHSRFIQAIQASPNGVAMLDDHDQIEWCNAISELHFGLDAKRDLRQHITHLVRQPDFVRYLNSHRYEEMLIMRGMGDKRQNVLSVQVFPYGENRKLVLSQDITELERTDAMRRDFVANVSHELKTPLTVLSGFLETMRELPLSEGERSRYLELMEQQASRMRHIVSDLLVLAKLEGDNKPPSDQMIDMRAVLRHLRDDAQSLSSDHHKIVFDADEGLTVTGVETEILSAFGNLVTNAIRYTPDGGAIRVSWHAQGGHAVFSVTDSGLGIPAADIPRLTERFYRVDRSRSRDTGGTGLGLAIVKHVLQRHDAQLDVKSEEGRGSTFTVRFPVYRTARRQPAPV

SEQ ID NO: 49802 - protein, 265 aa, Burkholderia fungorum
MLPIVDKPLIQYAVEEAMAAGITEMIFVTGRSKRAIEDHFDKSYEIEAELEARGKDKLLELVRSIKPSHVDCFYVRQSEALGLGHAVLCAEKLVGDNPFAVILADDLLHGTPPVMRQMIEAFDHYHSSMIGVEEIPSQDTGSYGVIDGSEWGDSIIRMAGIVEKPEPNVAPSNLGVVGRYVLKPRIFKHLRAIKAGAGGELQLTDAIQSLLADEQVLAYKYHGTRFDCGSKLGYLKATVEFALRHPEVRSEFRAYLEKHLSLLQM

SEQ ID NO: 49803 - protein, 459 aa, Burkholderia fungorum
MLGIRGLLARLVDVSLIVGGAMVASQIRFQDLGQSWGDGAFITFSVAFALVSFPVFGVYESWRGRSMLRLASQVSIAWLVVQVCGLVLMFSLHRTDFISRLWVAYWTAITGGALIASRLLLHAVLRSVRYAGLNLRNVAVLGVGAHCHEVVGKLVASPASGFRASAVFNTEPGGGAAWKGVPLFDDFPTFAEHVRSHGVQEVWLALPLSEASTMLHFVNEFRNDLVNIRFIPDVRSMALFEGSVIDLIGAPAISLVASPLPARAIVQKEIFDRLFAALALLVLMPVLTIIAVVVKCSSRGPVFFTQYRKGADGRVFKIYKFRTMRPHAEKTGVITQATKGDPRITRVGALLRRTSLDELPQFFNVLRGEMSVVGPRPHAIEHDELYQKVINGYIHRYRIKPGITGWAQVNGFRGETDRIEKMQMRVEHDLYYLRNWSFALDMRIVMTTVARGLVSSNAY

SEQ ID NO: 49804 - protein, 734 aa, Burkholderia fungorum
MASVNKNRFIDSSDGDEIHLSDYLSVVAESWKLIVAIAATVLIIGTLYAFIARPVYRADAMIQVEDSANATKDALGELASIFDTKQTADAEIELIRSRLVVGQTVQSLHLDISAQPRYFPLVGAILARHAGDNQLTPPLFGLVRFAWGGEKIDVSLFDVPHDRYDVRYTLVARGGDKFDLLDPDGDVVLHGQVGSVAHGSDPAGPVELRVARLEARPGTHFILSRASTLLTIDQLQNALVIAEKTKQSGVIGVSLDGADSRRTAEIINTIAATYVQQNIDRKSAEAEHTLSFLDQQLPQLRTQLDQAEDRYNAFRNQKGTVDLTEESRLLLQQIVDSKTKLVDLQQQQIEMAQRFTPSHPGVVALDAQIASLEEQQTQLNKRVSTLPDTEQSALRLLRDVRVNTELYTNLLDSAQQLRIVKAGQVGNVRVVDRAVAGEVPVKPKRALVVVLAAVLGLIAGTAAAFVKNALFGGVENSEEIEQALGLPVYAAVPHSETQVRLYQAMRRGRSGHHVLASIASHDVAIEGIRSLRTALQFGLLDAANNIIVIAGPRPEVGKSFMSVNLAAVLASGGKRILLIDADMRRGDLHGYFGVSREPGLSDVIAGLDISGAVLRDVLPNLDVLPKGLLPPNPAELLMSERFKTVLEQVSSLYDIVIVDTPPLLAVTDAALIGKNAGTTLLVVRHGRHPMAEILECTNRLRNVGVALKGVLITDVPQRRLGYGTYYYSYESNAK

SEQ ID NO: 49805 - protein, 604 aa, Burkholderia fungorum
MSTESMAGEACGDARALAKPVCLPAGTGHDSPALHAGVRASLRAAAQLARPFWMSERRYQAWALLAVLAGETVASAYMTVWLNAWNGRFMDALARYDAVALADIMGEFAILLATFVVLGVVAMLTGSMLQIVWRQWMTERFLDAWLGDSAFYRIERDQQVDNPDQRIVQDIDQFVTASCTLSVGLLSTLVRLVSFSLILWRLSGPLNMHVAHRVVSVPGYMLWAALIFASLTSCVTHWIGRPLMRLNFNKEGAEAHFRFMAASIREYAEQIALYRGASAEGRRMRASFDAIRGNFWQIVRFNLRFNPLTTAIIYISMIVPTFVVLPRYMAHAVTLGGMMRLSGSFAAVNGALSWFVQNYQALQGYRAIVARLDGLERAIASRQSQGAEDAGSIVCSVDTQRCLCAKQLTLRTPDGRVLTRDVNLAVHPAERWLIRGPSGVGKSTLIRALAGIWPYGSGQVTVPAGGGVLFLSQKNYVPAGTLKAALCYPGTDDAFDDDVCSNALTACRLERYAGSLYEVSRWGHRLSPGEQQRLAFARVLLQRPDFLLLDESTSALDPEMESGLYQTVIDRLPDMAMVSIAHHRGLDALHTHSLWIEQAHMASV

SEQ ID NO: 49806 - protein, 433 aa, Burkholderia fungorum
MKNALIQSGPDTTGRRPSRKVLIYGLNYAPELTGIGKYSAEMAESLADVGYEVRVICAPPYYPEWRIGAGHSAWRYRTEQRAAVRIQRAPVWVPSRPSGLKRLLHLASFAVSSLPTVFAQLFWRPDIVIAVAPSLMNIPAALMFGKMARARTWLHIQDYEVDAAFELGMLKGKRLRQFALGVESWLMRRFDVVSTISARMIEHGRNKGVDSPRLFALPNWVDVNVIFPLDRPSLYRTALNIPDEAIVVLYSGNMGAKQGIEVLAQAAASLAHRSDIHFVLCGDGPYKVNLVEQCGHLANCTFLSLQPFDKLNDLLNVADIHVLPQRADAADLVMPSKLTGMLASGRSIIAMARAGTELFDVVSPRGVTVPPEDVQALVAAIENLADDVDQRTRLGAAARAYAETELSRRAVIERLDGRFQMLCDRVRGRSVFT

SEQ ID NO: 49807 - protein, 396 aa, Burkholderia fungorum
MCQLPMSRREWLKLASMFTVAGAAPLLAALNARAAENPDAPVRIGYLPITDAAPLLVAHNNGYFDASGLAVEKPTLLRSWAQLVEAFLSGQVNVVHLLAPMTIWARYGSQAPAKVVAWNHVNGSALTVAPDIGKLGELGGKTVAVPFWYSIHNVVVQHMLRAQGLVPVLEKDGELKANEVRLIVMSPSDMPPALASRQIAGFIVAEPFNAAAEELKVGKVLRFTGDVWKNHACCVVFMHERDLTERAAWSQKVVDAVVKAQVWTRAHPQEAAQLLSKSGRNHYTPHSANVLTNVLAPPPGDEGRYLADRAITHADWHAKRIDFQPYPYPAYTEELVRRLKATQVEGNAQFLHQLDPAFVARDLVDDRFVKKSIESAGGMKAFGLAESFTRTETILV

SEQ ID NO: 49808 - protein, 191 aa, Burkholderia fungorum
MNRTHGFTAATLEWTAWLDTVALDKASPEQTAVLEASHPKASTSDYYLLLVHEPEVLAQRSGAFNSIMYAPGGLSRAERELASTVVSRVNGCVYCASVHAQRFTQLTRRSDVIEQVFADPATAGTNERERAIVRYAIDLTLHPEAVDRRSLDALRVVGLTPAEILDLSQAIAIFAWANRLMLTLGEPVFPQ

SEQ ID NO: 49809 - protein, 232 aa, Burkholderia fungorum
MIHSPLLTTPLFHAGPVPVTAPVVTTWAIMAVLVSGAALATRRLSLSPSKFQSVLELLVTTIDAQILDTMQAEPHRYRSLIGTLFVFILISNCSSLIPGVEPPTAHLETDAALALVVFCATVFYGVRTRGVLRYLATFAEPTWIMIPLNVVEQITRTFSLTVRLFGNVMSGVFVVGIVLSLAGLLVPIPLMALDLLTGAVQAYIFTVLAMVFIGAALADSPNPKKPTAEGTS

SEQ ID NO: 49810 - protein, 464 aa, Burkholderia fungorum
MKRMSLTTRLALLFACLAFGAMAVVGFLLYSKLEAQLIARDDAALVTRVDQLRTLMQDMDVRNLIHEKPHLFANMLGNTESLLVVQSPGDAPLIVVNPGHRAVPDVRPVPADAVLSPGAVRHAVTADGTPFIYVAADARGVAGQRDLQIISGRLMTERTRMLHAYRNQILLFASTAALLAAMLAYVLVRRGMAPLQRLAAQTASIGVASLSTRIEGREAPPELDALIAGLNGMLDRIERGFTQLKQVSADMAHDLHTPIGNLLGQTEVGLSHPRDVAYYQRLLGSNYEELQRLSKMIANMLFLARSEQADNAIEHKALPVADEFERVAAYFEGLAEERDVRLERRGEGLVWADPVLFRRALANLLANAVRYANPGTAILTVAEQSPDGMIVYVENRGPMIEPHHLERLFDRFYRVDKSRQRSSESSGLGLSIVRSIMLLHGGTWHVMSNEGVTRFTLVFPAREV

SEQ ID NO: 49811 - protein, 218 aa, Burkholderia fungorum
MKHPEHTGLKDVKGNSLIVRYTPNERTNHWITAITFVLLALSGLAMFHPAMSWLYAIFGGGQWTRILHPFVGCVMFLSFLILALRFWHHNYLNKADIQWMKQIDDVLNNREEKLPAIGKYNAGQKLLFFTMVICLLLLLASGIVIWRRYFSFYFPIGIIRLAALVHAAAAFVLIVGIVVHIYAALWIKGSIGAMTRGTVTYGWARKHHPNWFKEIIGK

SEQ ID NO: 49812 - protein, 331 aa, Burkholderia fungorum
MVQRILEAGDIESLDHSAIPRIRTPERLAVFSARAARLRQLAALNNPIAGYLRLMAVLADAQQAVMAGFKARPPSPELIASAQQHSMPLIPALSGVRDPAWRDVLRQLLDKVAAAGPLTPPLEALIDHLRTLDTAALEFQSDAIFAQRFEEVDPASAPFIVAALQVVWTDLAADIDKREVPYIETLGLCPVCGSHPVASIVRVGGAYDNYRYLQCGLCSTEWHMVRAKCSNCDSTKGIAYHTVGSPDADEATRETESKNAALKAESCDECHTYRKIGIQSKDYDFEPFADDLASLTLDLLMGAEGYRRASPHPWLWPEQAAGADELSGESD

SEQ ID NO: 49813 - protein, 364 aa, Burkholderia fungorum
MLETRFRNTTPTRSLAFAVATLATAATAFALAASTAYAAAPMAYVTSEKAGVGVIDLDQMTLTKTFPVGADGPRGLSLNTDGTRLLVANKNTGDLAVIDTASGQVVQRVKIGKNPEYVRVHNGFAYVTYEPGEDGGPPAANAKPGADDDDANKPPAQIAIVDMKTWRVIRSVTSGHETEGIEFSRDGNMMLVTNEGDDTVSVYHVRTGAPVRTVKLVAGGRPRGIRLSPDGKDYVVTLESLSKFVVIDARTYQVTKTVDTKLGPYGVAFGPDGKRLFVAAARDRTVQVFDGHSYEHLADVPVGQRCWHFSFTPDGAKLLVACGRSDAVYVLDAQSYQPIKQIGELPLAWGIVTYPHSDGSIESH

SEQ ID NO: 49814 - protein, 680 aa, Burkholderia fungorum
MSAVAESVAIPATRLMADALRMLAIDAVEAAKSGHPGMPLGMAEIAVALWDRHLKHNPRNPAWPDRDRFVLSNGHGAMLLYGLLHLTGYDLPIDELRRFRQLYSRTPGHPEVGVTPGVETTTGPLGQGLANAVGMALAEALLAREFNRPGHSIVDHRTYVFVGDGCMMEGISHEAASLAGTLKLDKLTVLYDDNGISIDGHVSQWFSDDTPARFAAYGWHVVREVDGHDVDAVDRALSRARAAGRPTLICCRTVIGKGSPSKAGTHDVHGAPLGADEVANTRRALGWPHAPFAMPAEVRTLWDASERGAATEADWNTRFEAYRKHYPHEAAEFERRTQRTLPVQWRDTVRAMVSDADHAGESIATRKASQQAIAVLARALPELLGGSADLTGSNLTNWKTAVDVHADDSGLQGGNYLHFGVREFGMSAVMNGIALHRGHIPFGGTFLTFSDYSRSALRMAALMKTRAIFVFTHDSIGLGEDGPTHQSVEHAASLRLIPGLDVWRPCDTVETAQAWASAVERDGPSCLLLSRQNLPFAARSAEQIDAIERGGYVLRDWPAERAQTRIVLIATGSEVSLALDAVAPLAQAGIAARVVSMPSTSVFDRQPAAWRDAVLPPRVPRVAVEAGVRAFWRQYVGLEGGVVGIDTFGESAPAAALFEHFGLTARAVVDEARRVAQLAR

SEQ ID NO: 49815 - protein, 355 aa, Burkholderia fungorum
MTRSDFEEFAMAFIALRQLLDHAAEHGYGVPAFNVNNMEQIHAIMQAAEATSSPVILQASAGARKYAGEPYLRHLVLAALEAHPDIPLVLHQDHGASPAVCQQAIRSGFTSVMMDGSLLPDQKTPAAYEYNVDVSRRVVEAAHAVGVSVEGELGCLGSLETGTAGDEDGVGAEGQLSRDDLLTDPREAQIFVEATGVDALAIAIGTSHGAYKFSRQPTGDILAIDRIVEIHERIPNTHLVMHGSSSVPQEWLAVIREYGGEIPTTYGVPVEEIQRGIAHGVRKVNIDTDIRLAMSGAMRKSMANARAEFDPRAALKAATAAASAICVERFEAFGCAGQASRIKPLPLDAMARRYH

SEQ ID NO: 49816 - protein, 1510 aa, Burkholderia fungorum
MARHVPIYASMTSAPALPAAAPGAASGNASGPVATPATGRSTAHALDDFHPAVASWFLKTFPAPTDAQAAAWPQIRRGRSTLVAAPTGSGKTLTAFLSALDDLVQQGLAAGGALPDETLVVYVSPLKALSNDIRLNLQLPLQGIAAELEARGLPALDIRTAVRTGDTTQQERNALKKRAPHILVTTPESLYVLLGSDSGRRMLSTVRTVIVDEIHALAGSKRGSHLALSLERLDALCQRRLPRIGLSATQKPVSAVARFLVGGASIDSGIPADCAIVDVGHVRERDLALEIPPVPLEAVMPNEVWERVYDRLAELVAMHRTTLIFVNTRRMAERAARHLTERLGKEAVAAHHGSLAREHRFDAEQRLKRGELRVLIATASLELGIDIGDVDLVCQMGSPRAIAPFLQRVGRSGHHVGGMPKGRLFPASRDDLIECAALLDCVRRGELDALRIPRAPLDVLAQQIVAEVSSAEWSEDALFDMMRRAAPYADLTREQYDAVLRMLVEGYTSRNGPRGAYLHRDVLSGTLRGRRGGKLVAVTSGGTIPENADYAVVLEPQAINIGTVNEDFAVESLAGDVFQLGNASYRILRIESGRVRVEDAQGQPPNIPFWLGEAPGRSDELSFGVARLREQIGRLLDGKDPAMPATVANATGTEVQAEEITTLPVRLDHATQWLTDNLGLDEAAARQIVDYLARARAALSVLPTQNTLVMERFFDESGGTQLVIHAPFGSRVNRAWGLALRKRFCRTFNFELQAAATEDAIVLSLTGSHSFVLDEVWRYLHSNSAEHLLIQALLDAPLFGVRWRWNATTALGLPRYTGGRKTAPQLQRMRSEDLLASVFPEQAACLENVVGERELPHHPLVDQTVDDCLHEAMDSERWLALLRRIEQGEVQLVARDLPAPSPLAAEILNAKPYAYLDDAPIEERRTQAVLNRRWTDPSSADDLGALDAGAIESVRDDAWPQARNADEMHEALTGLACITDTEARHHEGWPAWLASLAESGRATRLQIADDAGVWLPIERLTCFESLYPEARFSPPLAAPKGYTDSWNADDALLDVLRARLTGFGPLPASAIAAALKLPAASVEQSLMRLEAEGYVMRGRFTPQAAEEEWCERHLLARIHRYTVKRLRREIEPVERHDFMRFLFEWQHLTPDTRSEGRDALAAVLEQLEGFQAAAGAWEEDILPARVKAYANTSLDELCRAGKIVWTRLTERARGTAGPVRSTPIVLLPRARVRVWSALLDPSKQPELSARAQSVYDVLAQHGAMFFDELLTEVRVLRMELESALGELVAAGLVNSDSFAGLRALLKPVAKRNAFSGSRRARSSALIGGMDDAGRWALVSRPATAAAEVAPERRRQLPPDVLEHVAMTLLRRYGVVFWRLLEREADWLPPWRDLLRVFQRLEARGVIRGGRFVNGLAGEQFALPEAIPVLREVRRHANDGAFVCVAGTDPLNLAGTLLVGERVPAVAGNRILYRDGIVVATLVAGTFWFGPALEAVPSAREQARAWLARRF

SEQ ID NO: 49817 - protein, 731 aa, Burkholderia fungorum
MRTVGKSQQLQCKKALKATVALTVNLSKPERQPLRYNGDSLKYDEDCLPTPPSGGQRHTPPGDLMNDDQHDQVLFAQFGTSSPCWRLSNDSNALELTPVTGDVPANVAIPLNPQQASQIRCLTGVTSHLVLDVRLFGEPLRLHLVGKKLTSNSWAGTASAYDDTESVARDLVHGLSFAEQVVSEVNSVVVILDRHGRIQRFNRLAEELTGVKEENIIGRNVWALFMSTEDGAASSQNIAGFFNRGVSYEVERRIKTVHGERLFLFRNKFVHSGSGVEEQFLICSGTDITEERLAQERLTELANTDSLTGLANRNAIQDRIRAAIEDATPGEAVGVLFLDLDNFKKVNDHYGHVFGDRLIRDVSSAISLCLNEGDTLARLGGDEFIVLAARGTAHELEVTAQRILERMRTPFSLGLVEVYTGCSIGIARYPEHGDSLESLIRSADTAMYVAKDEGKRTHRVFSPEMNRKVAEYMWLDTNLRRGLDEGQLTLHYQPKLSLATGVVQGAEALVRWNSPERGQIMPTKFIRYAEESGLIGVLGRWVMETAAKQAAKWKADGYNLRIAINVSARQLVDTAVVRHFSEALQHANLDPCLIDLELTESCLIEDETAAIDLIKQFRQLGAQVHLDDFGTGYSSLSQLGRIPLDVIKLDRSFVRSINADPKAQALVRSMVVVAQELNFKVVAEGIETESEELFMRGLGVDYVQGFLYGQAMPAAEFERWLQDRQKLRLIA

SEQ ID NO: 49818 - protein, 200 aa, Burkholderia fungorum
MMKFGSPPAPAAPCGKPRRKFPGALATDAETAKHPGGTVAAGIRSGRGAREAGHKQERAMKRKASAVWQGGLQDGKGSISTDSGVLKETQYSFSTRFADGIGTNPEELIAAAHAGCFSMALSAELGKAGITPERIGTTATVTLDKDGGGFAITAVHLDVAVKIPGGDKAAFEKATADAKAGCPVSKVLNATITMDAKLET

SEQ ID NO: 49819 - protein, 100 aa, Burkholderia fungorum
MVLNPGMREEYERRHAQIWPELVDALHNAGVRDYRIFFDPDSHHLFAMLTRHNHHTMNELPQLDVMRKWWDYMADIMQTAADHTPLQQPLEPVFHLNSLS

SEQ ID NO: 49820 - protein, 884 aa, Burkholderia fungorum
MRKLFQACCFVLLALGVSPVFAAAAPAASASAASSPGVTLTPEQARQALAVLNDPKRRAQVADTLQAIAAAGALSAPPASAPTAASAPAAASGAAALVPAAFKSNGLASQLARQGAHWAVRLGKSLRGSVGALLDVSSVRAWWHWQSTNPQARAVLGQVAWSLLAALIPALALEWLARRLLRRAYKAVAARREAGDQDSAPQADLPVDVAPQPADAPNAAPPLPVSPASPLTAAQAKAAAVPPGTSAATSASGKVIEAKGKQNARHHWTLLQRLPRALLSLVLRLLPLVVFVGAASALMSIFTDDGTPQDRALDSLIDIYVLCRVIVIVSGFFLQPAAPRLRLLRMSDAWAAFVQRWMVRIVSVVGAGSAVAEIAQSLGLSDAAHLALMKVVALAGHVMISILLLQCANPVGELIRKRVAARKSLEMAGNVFAEVWAWFAVFVVMALWFVWALDVRNGYQTLLHLGGISLAVLVGARVVSIVLFGALARLFHVQDDVAKSLVHQHAYRYYPLVRRVVAWIIGIVTALALLQVWGVHVADLFRAGTIGHRLASAIVTIGVAAVIALLVWESVNVSVEQRLDRWTTSGDLVRAARLRTLLPMLRSALFCAIALVVVLTGLSELGVNIGPLLAGASIFGVALGFGSQKLVQDFITGIFLLMENAMQVGDWVTLAGVSGTVEYLSIRTVRLRGGDGSLYTVPFSSVSTVNNTNRGIGNAAVKVNIVFGQDVDLAIGTLKEIGAALREDDSFKDGILSDFSFWGVDALDGSAITLTGQIQCRDSARWGVQREFNRRILDQFRERGIEIANPQRNLLTWDPQSAPARIEADEAPGTAPEEPPSEEPRADAPPSAAARQGDAPVEDQLPVDPKPAGGPGTPANPGATSPHE

SEQ ID NO: 49821 - protein, 246 aa, Burkholderia fungorum
MHLVNFWLDPRYLGWLAHGFLITLVLSACVSVCATLLGFGLAMAQIAQQRSVAAAARLYVLVFRNSPLLVQLLFWYFGAATLLPQPWMTWLNTPHVLGAAPFALHWPSFELFAGWLGLTCYSTAFIAEEFRAGIRGVGIAQYQAGAALGMTRYTTLRHVILPQAVRIATPPLAGQYMNIVKNSSLTMAIGVAELSYMSRQVDTESFRTFQAFGTATVLYIGTIALIEIAQVIWQNTGVRALQRGQA

SEQ ID NO: 49822 - protein, 131 aa, Burkholderia fungorum
MKSRVIVPFLIVSLFGTSAATFAQSHHDDHGGQPSHNRPNPGHGAPHGNGHGPAFHDASRGGPGGPIPHNDWHKGERLPAEYRDRNYVVDDWHGHGLQAPPRGYQWVGVNGDYVLAAIATGVIANVLLSGH

SEQ ID NO: 49823 - protein, 493 aa, Burkholderia fungorum
MPFLFYRFKLTCGAIGAIPPKASQRTRHAMNVSVFDLFKIGIGPSSSHTVGPMIAACRFASHIEDANLLGFVRSVKAELFGSLGATGKGHGTDKAVLLGLEGNLPDSIDPDVIEPRLAAIRAMKQLVLLGKHPVKFDEREHLGFFRKLMPGAPGSGIVHPNGMRFQAFDENGQLLVEKEYYSIGGGFVVNREGDRVNGVRAGAQVPYPFRTGDDLMRICRETGLSIAQITLRNECAARPEQDVRDGLLAIWRVMSACVERGCKVRGELPGPMHVKRRAADLCAQLRSRSEESLRDPLSMLDWVNLYAMAVNEENAAGGRVVTAPTNGAAGVIPAVLHYYVKFMHASNDEGVVDFLLTAAAIGIIYKETASISGAEVGCQGEVGVACSMAAAALAAVMGGTPTQVENAAEIGMEHNLGMTCDPVGGLVQIPCIERNAMGAIKALNAARMAMKGDGQHYVSLDNVIKTMRETGADMKTKYKETSRGGLAVNVIEC

SEQ ID NO: 49824 - protein, 139 aa, Burkholderia fungorum
MNPSAIPSSQQLPRATHFDRLGGEPAVIRLVDAFYRRMDTRPDAQRIRAMHHPDLSSTKAVLVLYLCEWLGGDKQYSAQRGHPRLRMRHAAFAIGLAERDAWLTCMRGALDETGVDPALRDELMQAFFKTADWMRNTPT

SEQ ID NO: 49825 - protein, 638 aa, Burkholderia fungorum
MRPAVTRHARILGESQAGGRAPCPWERTVRGTPPYRLPYRPRATCHAYAMVLSMRTFLALRRQIAPISRDRTFPKRLDLADQGDTAMNISSLAGKPLPPALLVNVPRLVASYYTGTPDPSLAAERVKFGTSGHRGSSLQRSFNEWHVLAITQAICRYRKLQGIDGPLFLGIDTHALSEPASASALEVLAANGVEVMIAPDGEYTPTPAISHAILTYNRGRSSGLADGIVITPSHNPPGDGGFKYNPPSGGPADETVTGWIEVAANSLLENRLDGVMRMPLANALRASTTHYHDFLRIYVADLDSVIDMSVLRGAPIRLGVDPLGGAGVHYWAAIAERYRLNLTVTDEDVDPTFRFMSADWDGQIRMDPSSPYAMQTLIGKADRFDTAFACDTDHDRHGIVTPTAGLLPPNHYLAVMIDYLCAHRPDWPAHAAIGKTMVSSRLIDHVAAKHGRALYEVPVGFKWFVGGLLDGSLGFAGEESAGATCLRLDGRAWTTDKDGMVPALLSAEIATRTGRDVAEHYRALTERLGEPRERRVQAAASASQRALLGRLSPAQFAHTELAGEKIDSVLDRAPANQAPLGGIKVSTKSGWFAARPSGTENIYKIYAESFLGDDHLARIVGEAQSMVDNALAASGGDA

SEQ ID NO: 49826 - protein, 237 aa, Burkholderia fungorum
MKLTDFKVLTFDVVGTLIDFERGVLGSVRRLGGPAAKDLTDDQIFEPYLRGRAAYPGRSSHEMANVYLSLAKELGLPDDPQSAAAFQRDVLEWPAFADSVAALKRLRKHFRLVAMTNADRVALSAYAHTLGDPFDDTVCCDETGVAKPDPQFFAYNRGRQAAFGYKFGEILHTAQSQYHDIGVATRLGYATCWIERRQGVKGFGGTPVPEAVTTPTFRFATLGALADAVEAEARLAA

SEQ ID NO: 49827 - protein, 64 aa, Burkholderia fungorum
MALKIIASTCTGCSACEPECPNVAISEKGGIFVIDPKKCTECEGHFDDPQCVAVCPVDGCIVQV

SEQ ID NO: 49828 - protein, 436 aa, Burkholderia fungorum
MKKPSQFDAIVVGAGPSGNAAAYTMARAGLKVLQIERGEYPGSKNVQGAILYAKALEEIIPDFRDDAPLERHIIEQRIWMLDDTSFVGTHMRSEEYNKPPYNRYTIIRAQFDKWFSSKVREAGALLICETTVKQLIMDGDQVVGVQCDREHGDVYADVVVLADGVNSTLARKAGFHGEIEAGNVALAVKEILFMPEETIRQRFNIGEDDGVVIEMVGRITDGMTGTGFLYTNKESLTIGVGCMLGDFKKNPNRTSPYVLLEKMKQHPSIAPLIAGGEMKEYCAHLIPEGGFHAIPRVYGNGWMIVGDSGGFVNAAHREGSNLAMTTGRLAAETVIHAKAAGLGYRAATLKAYKAALDQSFVMKDLHKYRDMPAVLHQNPQFFTTYPDLVARAARTMLTVDGKDKKSKEREIFSSFRKARSLAGMVGDAYKLLRAFR

SEQ ID NO: 49829 - protein, 424 aa, Burkholderia fungorum
MSNPNPFFEESLATRDTAVRGAILKELERQQSQVELIASENIVSRAVLEAQGSVLTNKYAEGYPGKRYYGGCEYADVIETLALDRIKQLFNAKFANVQPHSGAQANGAVMLALVKPGDTVLGMSLDAGGHLTHGAKPAMSGKWFNAVQYGVNRDTMLIDYEQIEELAQQHKPALLIAGFSAYPRALDFARLRAIADSVGAKLMVDMAHIAGVIAAGRHQNPVEHAHVVTSTTHKTLRGPRGGFVLTNDEDIAKKINSAVFPGLQGGPLMHVIAGKAVAFGEALQPGFKTYIDSVLANAQALGEVLKAGGVDLVTGGTDNHLLLVDLRPKSLKGNQVEQALERAGITCNKNGIPFDTEKPTITSGIRLGTPAGTTRGFGMSEFREVGRLIVEVLDALRDHPEGHAATEQRVRREIFALCERFPIY

SEQ ID NO: 49830 - protein, 323 aa, Burkholderia fungorum
MSTLHDNSIIIDGLNISKFEHSVFEDMRKGGVTAVNCTVSVWESFQKTVDNIAEMKQQIREHSEILTVVRTTDDIFRAKKENKTGIIFGFQNAHAFEDNLGYIEAFKDLGVNVVQLCYNTQNLVGTGCYERDGGLSGYGREVIQEMNRVGIMVDLSHVGGKTSSEAIAASNKPVCYSHCCPSALKEHPRNKSDEQLKEIADAGGFVGVTMFAPFLKRGPDATVEDYIEAIEYVVNLIGEDQVGIGTDFTQGYSTEFFDWITHDKGRYRQLTNFGKVVNPEGIRTIGEFPNLTAAMERAGWSETRIKKIMGENWVRVFGEVWKV

SEQ ID NO: 49831 - protein, 419 aa, Burkholderia fungorum
MMRDHATLQLSPEPAPDHAASRVTQPRFWETLPARWNSDTDDTLVCCQVRQETHDVKSFLFRAPSGRAFVFEPGQFITLELEIDGEPINRCYTISSPPTRPHTISITVKRVPGGKVSNWLHDNLHAGAEVRVLGPAGEFTCARHPARKFLFLSAGSGITPLMSMSRAHHELGEDSDIVFVHSARTPDDIIFARELDLIASNQAHFRTAFVCERLGARTNWPGVTGFLTLPLLKLIAPDFLEREIFICGPAPYMQAVRKLLDEGGFDRRHYHEESFSFGTVSEVAAQLTTAHVADALQSASAPVTAGSFTEAREEAAGFTPASAPTPADVEAETRFKVSFAKSHREIECGSGQNVLDAAKKAGVRLPASCTQGMCGTCKVKLVSGEVAMKHAGGIRQREIDQGMVLLCCSKPLTDLVVDK

SEQ ID NO: 49832 - protein, 513 aa, Burkholderia fungorum
MQLNPSEISELIKSRIQGLEASADVRNQGTVISVTDGIVRIHGLSEVMQGEMLEFPGNTFGLALNLERDSVGAVILGEYEHISEGDVVKTTGRILEVPVGPELLGRVVDALGNPIDGKGPINAKKTDAIEKIAPGVIWRKSVSEPVQTGLKSIDAMVPVGRGQRELIIGDRQCGKTAVAVDTIINQKGKNLFCIYVAIGQKASSIMNVVRKLEETGALEYTIVVAASASESAAMQYLAPYAGCTMGEYFRDRGQDALIVYDDLTKQAWAYRQISLLLRRPPGREAYPGDVFYLHSRLLERAARVSEDYVEKFTNGEVKGKSGSLTALPVIETQAGDVTAFVPTNVISITDGQIFLETDLFNAGIRPAINAGVSVSRVGGAAQTKVVKKLSGGIRTDLAQYRELAAFAQFASDLDEATRKQLERGRRVTELLKQPQYQPLQVWELAVALFAANNGYLDDLEVAQVLPFEKGLRDYLKSKHADLIKRIEDTKELSKDDEALLHTALKDFKKSGAY

SEQ ID NO: 49833 - protein, 389 aa, Burkholderia fungorum
MFSQTDFVHMERALALARRGMYTTDPNPRVGCVLVKNGAVIGEGFTQPAGQDHAEIRALKDARSRGHDLRGATAYVTLEPCSHFGRTPPCVNALIEAQVALVVAAMEDPNPLVSGRGLAILRDAGIEVRCGLLANEAHELNIGFVSRMTRGRPWVRMKVAASLDGRTGLPSGVSQWITGEAARADGHAWRARASAILTGIGTVREDDPRMTVRAVDTPRQPQRVLIDSQLDVPPEAQILAGAPTLIFCGNLDQRHTDRANALRDRGAEIVQLANPAGKVDLPAVLKVLGERNVNELHVEAGYKLNGSLLREGCVDELLVYLAPSLLGMDSMSMFSLTTPETLDDRVKLHFHAVDRIGDDLRILARFMAPPAPQAIPEPGGEPAPQPVSN

SEQ ID NO: 49834 - protein, 508 aa, Burkholderia fungorum
MDFSIKACDWTKGSSNGFLTGKSDCIVIGVFESQTLSGAALEIDAATKGLLTRIIKAGDMDGKAGTTLFLHEVSGIGASRVLLVGLGKQDAFNQKAYGDAARAAWRALLSTKIVQVTFTLAQLPILERSADWAVRAAILALRELTYKFTQMKSKPDTSARALKRIVFSVNTGDEKAAKLAAKQGAALANGMDLTRDLGNLPSNVCTPTYLANTAKKLAKDWKLKVEVLGEKQCEALKMGSFLSVTAGSVEPAQFIVLQYQGGAAKAAPVVLVGKGVTFDTGGISLKPGEGMDEMKYDMCGAGSVLGTLRAVAEMGLKINVVGIIPAVENMPSATATKPGDIVTSMKGLTIEVLNTDAEGRLILCDALTYAERFKPAAVIDIATLTGACIIALGHHNSGLFSKDDALAGELLDASREASDPAWRMPLDDEYQDQLKSNFADLANIGGRPAGSVTAACFLSRFTEAYPWAHLDIAGTAWKSGAAKGATGRPVPLLAQFLIDRAADGRATQ

SEQ ID NO: 49835 - protein, 508 aa, Burkholderia fungorum
MNNDTNQRAVQTPANSFPTESFEDATEAVTRLSAIYEANTSFLRDAFARYRRNELFQSRVRACYPFVRVCTEVNTHIDSRRSYGFVAGPGVFETTVTRPDLFGNYYREQLRLLAKNHHVQIEVGVSDQPIPIHFAFAEGIHLEGDLDRERLFLMRDVFDTPDLALLDDRIVNGTYEPQPGKPHPLALFTAARVDFSLHRLKHYTATSPTHCQNYVLYTNYQFYIDEFVKLGRTMMAHTDDEELRAYRSEYTSFVEPGDVVTYNENLGEQAQEGTAPPRLPQMPAYHLKRADGSGITMVNIGVGPSNAKTITDHIAVLRPHAWIMLGHCAGLRNTQRLGDYVLAHGYVREDHVLDDDLPLWVPIPALAEVQVALERAVAQVTQLDGVELKRVMRTGTVASVDNRNWELRDHREPVQRLSQSRAIALDMESATIAANGFRFRVPYGTLLCVSDKPLHGELKLPGMADQFYRAQVDQHLQIGVKAMELLRMNGLHRLHSRKLRSFAEVAFQ

SEQ ID NO: 49836 - protein, 176 aa, Burkholderia fungorum
MRLTTKGRFAVTAMIDLALRQEQGPVTLAGISQRQHISLSYLEQLFGKLRRHEIVESVRGPGGGYNLARRAEDVTVADIIIAVDEPLDATQCGGKGSCEGTKQHDGHCMTHELWSTLNQKMVEYLDSVSLKDLVDQQRSREGSPAVLRDRRNEAPVVEPVRVAPKGPNSVFNMAGS

SEQ ID NO: 49837 - protein, 507 aa, Burkholderia fungorum
MMNLKPGHLTLPQLRQIAREHVALQLDPASHAAIDACAQAVADIAAKGEPAYGINTGFGRLASTHIPHDQLELLQRNLVLSHAVGVGEPMSRPVVRLLIALKLSSLGRGHSGIRREVMDALITLYNADVLPVIPVKGSVGASGDLAPLAHMSAALLGVGEVFAKGERMPATEGLALVGLKPLTLQAKEGLALLNGTQASTALALYNMFAIEDLYRTALVSGALSVDAAMGSVKPFDARIHELRGHQGQIDAAAAYRSLLEGSAINVSHADCDKVQDPYSLRCQPQVMGACLDQMRHAANVLLLEANAVSDNPLIFPDTGEVLSGGNFHAEPVAFAADNLALAAAEIGALAERRIALLIDATLSGLPPFLVRDGGVNSGFMIAHVTAAALASENKTLAHPASVDSLPTSANQEDHVSMATFAARKLGDIAENTANILSIELLAAAQGVDLRAPHKTSPSLQKAMDTVRKDVAHYELDHYFAPDIAAVTRLVQNGTIAKLSPFSFASEQ

SEQ ID NO: 49838 - protein, 551 aa, Burkholderia fungorum
MYNRQLHPDERQWAKDNAKQFAQFYEDKTGQSITADQAQNMLLANGYRLVDAAASKGPGGDATAVAFISQNAGGMFTATSAEYNSPFLYGNKDGSLTPEQRALPGAVANPKLGLAIAGALAAPAVLPALAAIPGAPIFGIDGALGSGTWTSSVGTGAISAGINAGSQYCQNGTVNPIDVAVAAISGGVGASGGLGWNVFVNGVGGSAGTAINNAIQQSQAAGSSQDGRAKALHTIAAVGNAGSAVGSLAGGGAPDISVQLSYGTSRTKNTFTEDQTTQTGSTVKAGGMASFTATGGGDGAASSNNGNVTVAGSSVSGNDVMLSAKNDVNLLNTTNTDSTRSTNESSSASVGVSYGTKGFGVSASMSKAHGDANSDAAMQNNTYVSATNNVPISSGGDTNIVGSNVKGNHVAADVGGNLNIASVQDTTVSSAHQQSSGGGFSISQGGGGASFSSQHGSANGNYAAVNGQAGIQAGSGGFDVNVKGNTDLKGAYIASDADPSKNTLATGTLTYSDMQNHSDYSASTSGFSAGTQGVMPMLGQSASGSSSATTK

SEQ ID NO: 49839 - protein, 652 aa, Burkholderia fungorum
MSARCISSGGDTNIVGSNVKGNHVSADVGGNLNIASVQDTTVSSAHQQSSGGGFSISQGGGGASFSSQHGSANGNYAAVNGQAGIQAGSGGFDVNVKGNTDLKGAYIASDADPSKNTLATGTLTYSDMQNHSDYSASTSGFSAGTQGVMPMLGQSASGSSSATTKSGVSAGTITITDSANQKQEVASLNRDTSNLNGTVSKLPDVNTVLGNQADVMNAANAAGEAVAKDIGTYADYRQKAALDGAKAANALGETGTAAQYGQDAADWGEGGADRVGMHIVAGAVLGGLGGGNFGSALGGAAGAGVSAGLAPRLNELSNSIANGDPTGNATADRMLGQVVSNLVAGAAGAAVGGGAGAFAASNADMYNRQLHQPEKTKAQQIAAAAKDQGLMNPDGSPITAAQIENAMRGANNSQYGEIAATGVVVPLNAGTPAGAVYDTAGMKLVADSTGSYLVQDPSMLATPSKALQDLITQNTGGSNSPYSWNAPSTQNAAGPRIDATGPFTPAANGCITAECAAGMPNSDPRSNPDVTVQAGFHVPVSPGIAVGPNFSYTPSDGSASLKPDVTIGSLGDFGASINFSGDSRYSGPTSVGVGIGKYFGVQVVPSNVTAWQEKSWYDATRYINGVSVGIGAGFSTPVNASVDPTYQSPVKR

SEQ ID NO: 49840 - protein, 1061 aa, Burkholderia fungorum
MNISKFFIDRPIFAGVLSVLILLAGVISLFKLPISEYPEVVPPSVVVHAQYPGANPKVIAEAVASPLEEQINGVENMLYMQSQANSDGNLTLTVTFKLGTNPDLATQLVQNRVNQALPRLPEDVQRLGITTIKSSPTLTMVVHLISPNNRYDMTYLRNYALLNVKDRLARIQGVGEVQLWGSGDYAMRVWLDPQKVAQRGLTATEVVNAIREQNIQVAAGVIGASPSVPGTQLQLSVNARGRLRTEGEFGDIIVKTAPDGGVTYLRDIARIELAASEYGLRSLLDNKPAVALAINQAPGANSLAISDQVRSAMKELAEDMPAGVEYKIVYDPTQFVRSSIEAVVHTLLEAIALVVIVVIVFLQTWRASIIPLIAVPVSIVGTFSLLLAFGFSINALSLFGMVLAIGIVVDDAIVVVENVERNIENGLSARDATYKAMQEVSGPIIAIALTLVAVFVPLAFMTGLTGQFYKQFAMTIAISTVISAFNSLTLSPALSAMLLRSHGAKEDFVTRVMNRLLGGFFRRFNKVFHRGSAEYGRGVTGVLRRKGAMLAVYAILLGATVLISRVVPGGFVPAQDKEYLIAFAQLPNGASLDRTEKVIRDMSSIALKQPGVESAVAFPGLSVNGFTNSSSAGIVFVTLKPFKDRGDKKLSAGAIAGALNQQYGAIKDSFVAVFPPPPVLGLGTLGGFKMQLEDHGALGYAELNKAAEAFVKKAAQTPELGPTFSSYQINVPQLNVDLDRVKAKQLGVPVTDVFNTMQIYLGSLYVNDFNRFGRVYQVRVQADAPFRQRADDILQLKTRNAAGDMVPLSSLVTVTPTFGPEMVVRYNGYTAADINGGPAPGFSSGQAQAAAERVAAEVLPHGVKLEWTDLTYQQILAGNAGLWVFPISVLLVFLVLAALYESLTLPLAVILIVPMSVLSALTGVWLTGGDNNIFTQIGLMVLVGLSAKNAILIVEFARELEHDGHTPLSAAIEASRLRLRPILMTSIAFIMGVVPLVLSSGAGSEMRHAMGIAVFFGMLGVTLFGLMLTPVFYVVLRTLAGGTIHVAQKDSPHYGAPVTDA

SEQ ID NO: 49841 - protein, 381 aa, Burkholderia fungorum
MNLLKRYAVPVACAMTVFTLAACSSTKDERRVPTPLTEFKPVLDVQQAWKASVGKAGRYLFSPVAVGNAVYAAGANGSVAKIDAQTGQDIWRVKLHDDLSAGVGSDGTLTAVGGLKGDVYVLGADGKQLWTAKAPGEIISPPLVGNGLVVVRTVDGQIVAFNAQTGEQRWNYRNRAVPLNLRVSSGMTFAGDAAVLAGFPGGSFAAINLQTGDNYWQTPVSYPKGVTEVERINDVTGPPTLVGSETCAVTFQGQIGCFDANSGRAVWEKAFSSTSGLAQDDRAVVAADDWSVVSAFDVSSGAPLWKNDKLKNRDLSVPFILGHAAVLGDYQGYVHFLSRDDGTLVARVKTDGSPITAAPVLAGETLVVLTHDGDLYGYRPR

SEQ ID NO: 49842 - protein, 230 aa, Burkholderia fungorum
MRGCFSERAVDTRQAAYVAEQVMGMEREIKLALPPAQVEAATQWFVARTGAQGTPIKLVNIYFDTSDLTLAGSKSALRLRQTPEGWLQTFKTVGKAEDGLHSRHEWEMPVAGERLEIDALLRECDEPSAADALRQAAPELIELFRTNFTRTLWQLQTDSAQVEAAIDQGDVLAEVDGQTRRAPISEVELELKSGDEATLQALATELGKQIAALAPDNISKAQRGYQLRAG

SEQ ID NO: 49843 - protein, 501 aa, Burkholderia fungorum
MSAASPLSTAPPTNPAVTLKKTLEQALALASPRIVPRRTTALSAVIHLSVVVLWLLLFARAFFLQGALAWSTGIAYVVYDTLLLAFVTWKTLPLMRRTPPLEPEFERRSLPGMGVIVASHNEAAVLPVTLAALLRQTHGPAQIVIADDGSTDSTRELLTGRFGLTAAADGVLSAPSSLYPNLFWLRVPHGGKARALNAAITVMTTETVMTVDADTLLDDDATYAMRAAFASDPKLVAAAGILVPVCGKSVSGRVFQWFQTYEYMRNFIARFAWMRADSLLLISGAFASFRRDALVDVGGFDPQCLVEDYELIHRLRRYSVDHDLGWDVRVVGDAHARTDAPDNLASFLRQRRRWFAGFLQTQYWNRDMTGNPRYGTLGMLMLPVKAIDTMQPIYGLTAFALLLAFLFGGHGAIVVSIFGVIGLKTAIDLAFYLWSIHLYRRWTGERTANSVWMAVFAAIAEPFTFQLVRHVGATLGWLHFLRGGRSWGVQRRSGLVAPDEG

SEQ ID NO: 49844 - protein, 270 aa, Burkholderia fungorum
MKRIALGVQYDGSVFCGWQSQPHGNTVQDELERALREFAQTPVQTIVAGRTDTGVHGLGQVVHFDTELDRADVSWVRGTNSFLPKTISVQWAKPMPDEFHARFSAFERTYYYVLYVHPVRSPMLAARAGWVHAALDVDAMQAAAAHLIGEHDFSAFRSSQCQSKTPVKHLYQIDVRQQGDFIHFRFRANAFLHHMVRNLMGCLVYIGRGRRPVEWMAEVLASRDREFAAPTFMPDGLYLAQVGYPEQFAVPAPQTGSVPWSTVWTEQAQT

SEQ ID NO: 49845 - protein, 297 aa, Burkholderia fungorum
MRVFVTGASGFVGSAVVAELIAAGHTVLGLARSEASAGSLAEAGAEVHYGSLEDTGSLKAGAAAADGVIHTAFNHDFSRFVENCELDRRAIEALGAALAGSERPLLVTSGVALLAPGRLATEDDAPVADASAYPRVSEATALSLAVRGVRASVVRLPPSVHGDGDHGFVPHLIGVAREKGVSAYVGEGQNRWPAVHRFDAARVYRLALERGAAGSRYHAIAEEGVPFQQIASVIGRRLNVPVVTQSVEQAAGHFGWFALFAGIDAPTSSVQTRALLNWEPEQPGLIADLDRPRYFQT

SEQ ID NO: 49846 - protein, 350 aa, Burkholderia fungorum
MTSSAEGSMPVSLLDDFLAYTLAGTRPAASEAQGTCAGGVRWSWLDDGVLLMEPAVQEEGMRSVLVSAGVHGDETAPIELLAFLVRDIAHGTAALTGRLLVILGNVDAMRDACRYRDDDLNRLFSGRHLQLPQSHEAPRAAALERAATRFFAAAPDNPGARWHIDMHTAIRASAFEQFALLPHTGKPFSRAMFEWLGEARISAVLLHTTRGNTYSHFTAQACGALACTLELGKVRPFGQNDLTRFAGADHAVRHLLAGMRGEVRAPMPRAFTVIDQITRQSEAFELLVAPDVANFTPFAKDTVLARDGDYRYVVRHDEERLVFPNATVKPGLRAGLMVIETTQDTLSKLV

SEQ ID NO: 49847 - protein, 402 aa, Burkholderia fungorum
MTSYHPLRNFFEHHLGRAAADRLHTGIAHHSLDRRFTHIAEAAVKLLACVHHFVDEFSAQRLDHRDFRDDRLPLRIAPCSVVKELPRRFHLREQHRHLLTDRLFLPQRLAESGALGNVIERDLDGSGCFAQRLRAKRDALVLQIPDQRIKTLVLFAKQVLHGHAAFVEHQFRRIGRQPALLAQRPRDGEARHALLDNEHGDAAMTAARSAGFGRDEIDVAVNAVGDEHLRAVQHVMVTVQTRRGAHGRQIGTRARFRHGDGGDLAARDEIGHQPFELRGIARMLQMRRRHVRMNQHRDRKTAEGGAAQFFGKHHCAEHIHCRTAKCFGLPDSEKTLLAHLAQQLARHIAIDLPLIREWQHLFGDEATYHVAQHAVFFAEIGRTLLLIREILCAHECLRCLTI

SEQ ID NO: 49848 - protein, 489 aa, Burkholderia fungorum
MIMSELFIGGEWAAGTGPAFASRNPGTGAAVWEGNSASADDVDRAVRSARRAFAAWSASSVDERCAVVRRFAALVTERKEALAEAIGRETGKPLWEARTEAASMAAKVEISIQAYNERTGEKRSAMADGTAVLRHRPHGVVAVFGPYNFPGHLPNGHIVPALIAGNAVVFKPSELAPGVAALTVQIWRDAGLPAGVLNLVQGEKDTGIALANHRQIDGLFFTGSSDTGTLLHKQFGGRPEIVLALEMGGNNPLVIGPVADVDAAVHHTIQSAFLSAGQRCTCARRIFVPNDAAGDRFLERFTEVTSRITVGEYNADPQPFMGAVISVRAASRLVAAQERLLADGAKALLKMEQRDPKLGFVTPAILDVTNVANRPDEEHFGPLAQIIRYGSFNEALEQANDTEFGLSAGLLADDEALWAHFQRTIRAGIVNWNRPTNGASSGAPFGGPGRSGNHRPSAYYAADYCAFPMASVESAQLQMPASVSPGLQF

SEQ ID NO: 49849 - protein, 70 aa, Burkholderia fungorum
MASVDHDAATIERANARRSYAVRPVLAQNFGEQQKIADTFFQAGLLPARVDTVQAQRWDFGAKRAETAGS

SEQ ID NO: 49850 - protein, 321 aa, Burkholderia fungorum
MSMHKVIYDTDPGVDDAMALVFQALHPDIELLGLTSVFGNATIETTTRNARFLAGRFAAGVPVARGAAAPLRRAAPEPLAWIHGDNGLGNIALDTTEQAPLDARPAHRFIIDTVRAHPGEVTLLAVGPLTNLALALAGDPQIAPLVKQVVIMGGAFGTDGVLGNVTPAAEANILGDPDAADIVFGAAWPVAIVGLDVTQRTIMSHDYLASLRARGGAAGRFVWEVSRHYEAFHEQSAQLAGIYVHDSSAVAYVLAPHLYTTRSGPVRVLTDGIAVGQSIQKPSAMPVPAPDWDSRPDCKVCMAVDVPGMLALYENTICGTL

SEQ ID NO: 49851 - protein, 317 aa, Burkholderia fungorum
MTTALDQLKQYTTVVADTGDFQQLAQYKPQDATTNPSLILKAVQKDDYKPLLEKTVKAHASKPVGAIIDQLLIAFGTEILKIIPGRVSTEVDARLSFDTEGSIAKGRELIALYKEHGIGRERVLIKLASTWEGIRAAEVLQKEGIHCNMTLLFSLAQAAACAEAGAQLISPFVGRIYDWYKKNAGSAWDEAKDGGANDPGVKSVRRIYAYYKKFGYKTEVMGASFRTPGQILELAGCDLLTISPDLLQKLHESTEKVERKLSPDIAKESDIERVPVDESSFRFLVNDEAMATEKLAEGIRAFAADAIKLEKLIDALR

SEQ ID NO: 49852 - protein, 432 aa, Burkholderia fungorum
MNSKTHATLSFSDSDQTIDLPIYQGALGPDVIDIRKLYGQTGKFTYDPGFMSTAACNSAITYIDGDKGELLYRGYPIDNLAQNADFLETCYLLLKGELPNAQQKEEFVKTVTQHTMVHDQMHFFFRGFRRDAHPMAILVAAVGALSAFYHDSLDISNPEHREISAIRMIAKLPTLVAMAYKYTVGQPFVYPKNDLSYSANFMRMMFANPAEEYKVNDVLVRALDRILILHADHEQNASTSTVRLAGSSGANPFACIAAGIACLWGPAHGGANEAALNMLEEIGSVDNIPEFIAQVKDKNSGVKLMGFGHRVYKNYDPRAKLMRETCHEVLEELGLHDDPLFKLAMALEKIALEDDYFVSRKLYPNVDFYSGIVQRALGIPTAMFTCIFAMARTVGWIAQWNEMIADPEQKIGRPRQLFVGETQREAKPLAKR

SEQ ID NO: 49853 - protein, 457 aa, Burkholderia fungorum
MKVTIVGTGYVGLVTGACLAELGNDVLCLDVDAAKIEELNNGGVAIYEPGLSEVIARNRDAARLTFSTDIAKGVAHGDIQFIAVGTPPNEDGSADLKYVLAAARSIGQHMDSFKVVVDKSTVPVGTADKVRETISRELAARGHGAQFAVVSNPEFLKEGAAVEDFMRPDRIVLGYDPDVAGLRAKSLMEQLYAPFNRNHQRTLCMDVRSAEFTKYAANAMLATRISFINELANLADRVGADIEHVRRGIGSDPRIGYSFLYAGCGYGGSCFPKDVQALMHTANENGMELNILASVEYVNTLQKTVLFDKIKQHFNNALNGKHFAVWGLAFKPNTDDMRAATSRQLIAALIRGGASVSVYDPVALDQARRSLAADLGPDNFEHVTFAKERDMALQNADALVILTEWKEFRSPDFEQMNEALNDAVIFDGRNLYDPTAMRDSGWKYYTIGRDAAHSTSR

SEQ ID NO: 49854 - protein, 2457 aa, Burkholderia fungorum
MQAAGALTASAGSFDNTAGRVASLNADGLTLASTGVLNNGTGGNIGGNGNVTVQAGQIVNAGSITAVQNLIAAAVQTLFNGGTLAANGNVNASAGTTLTNANTITAGRQAAVSAATFDNSGGSASADQFTLSATNLVNHGGSITQTGNGATSVNVSGMLDNTGGTIQTNSTDLALGPATLLNDNGKIASSGSGTLSVKTGTLSNNGGTIATNGALMIDGGAVSNRGGTLAGQSSATLRLVSLDNSAGGYIGAHRASVIDTGTLNNAGGTIQADDALAVSAQSVTNDGGTIANGGTGATTVNAAGALTNTNNGLIGGNGNVSVSGASIDNSGGTITAAGATTVQSGSTLGNRAGMIQGTGNVSASAQGAIDNTGGQIEVDGTNATMQLLAASLDNTNGRVANTGNGATTISAAGITNSNTGGVAGAGAIGGNGDVTINATTLSNTNGAQLVTGHDLTLNIAQFANNTNAILSGANNVTLNGLNAAVINAGGSIHGNGAIGLNVASLDNTTGRIGNDAGSGGSIAIATGSLANQGGAIGSDQNLSVTTNQLTGDGRIIAGNDGAVTVNGDYTLDGTNQIQANHDLTFTTSGNFTNQGTLGAVNALTVNAANVDNQAGADLNSTNTTVNAAGSISNAGRIEGDSVTTHSAALVNVATIVGNTVTLNAGSIANTGAAAAIAAATAVNLYSPGDISNTGGANIFSLGDISIAADATRDANGLLANRSNSVTNDQSTIEAQGNIEVATQTLTNTRPAPAVETVTTDVETEHQTKRDKYMACTTENGDKGFCTTDMWNNGYLAPINTTFSNSDVVSQNSGPNATDKVLVVNVNGQPQTIYYNSITTNADGTITANYWDGYDPNVNYDPATEYTSRNDAHKGYQRVEIARDTTTTTQQDQVTGPQAQQAQLLAGGSMTLANVGTVNNAYSAIAAGSAIAIGSDAYGGTLVNNTGQTLYQYQKQDIVSTYAWNENISRDVGTVVEPSIVLSPVAIGGTGGTIIANNAVQINATDINNTNVAAANSATGATGGTLGANGIVGGVTGGGAQTVNLATGQTQTINAPQSIAGPTGALNITLPASGLYTFNTSPGASYLVVTDPRLTSYTSFISSDYMLGALGLDPSKTIKRLGDGAYEEQMVRNQITQLTGRVYLQGYTNKEDEYRALMNSGVNVAKEFNLEPGMALTAAQMDALTSDIVWMVNQTVTLPDGSTQTVLAPVVYLAHANANDLQPTGALIAADDVEIHATGSATNSGVIKGGTQTVISATNILNRGGSIGSSGENGTTVIAATNDVVNASGRITGNRVAVLAGHDIVNTTLVDTVGVSSSAGNSKVNQSLVGAQGTIASTGDMVIAAGNDLMVHGANIAAGGNAQIAAGHDINVDTVQSDTSQSVTKNDQHHWEASSTLNQTSGIGAGGDLAMQSGNDMTFRGATVAAGGGMAVVAGGNLTATTVTNTATYNNVATDDRTRKQADRSYDEQAVGTSFTAGGSGTLAALGTDTTKGNVTLTGSSLSTGTGTANIAATGNVNINEAREEHDSYTATESKRGSAFHGSTTNTSQTTQANIGVASTVSGDSVNVSAGRDLTVKGATVAGTNDVNLAAGGNVAITTSQDTQNTSTYYQKHESGFGTGGGIGISVGSQTQTNTGSMSQVTNTGSTIGSLNGNLNIVAGNDLHVTGSDLIAAKNVTGTGANVTIDSATDTYRHDEKQTVSKSGFTLAIKAPVIDAISNTVDQAHAASHSQDDRAAALHGIAAASSAVDALGAGGAAAGALANGAQPEAKIELSYGSSHSENTYSEASTTNRGSNVTAGGTAAFVATGNGESGSGNVTIAGSNVNASDVILAAKNQVNLVSTTDTDSTRSTNQSSSASVGISYGTSGFGVDASMSKAHGNSNGDTAIQNNTHVTAANTATIISGGDTNIIGANVSGNQVNADIGGNLNIASVQDTMTTAAHQESTGGGFAISQGGGSASFSHTNANANGSYAGVNEQAGIQAGDGGFNISVKGNTDLHGAVIASDADASKNTLSTGTLTYSDIQNSSSYNAHTGGISGGVTTGDGGANYSTTGSTSGRNAGGVAPMLSQNDSGSDSATTKSGVSAGSISVTDADHQTQDIASLNRDTSNTNGTVAKLPDVNNLLDRQGDMMAAAGAAGEAVSRRIGDFAQSKYKEAEANGDQAGMDAWKEGGTARAEMQAAGAALVTGLAGGNAIGGAAGAGIASIAAGKLNELSGTIAGSNPTGNASMNEALGNIVADAIATGAGGAIGGDAGAFSGYNVDRFNRQLHPDEYARAKKDAKVVAQQLGISEQEAEGRIVAEMLRNSDKQTADDSGGIHDYQVRAIIGCQNLNCDGYKSDPQYANHDYNSQYIASNQSAYNAGQSQLGKGVTYNDLVKNNVKNNPVSTAIAGAGMMALGGVAAGGLPSIGGALIGGGIGGTVNAGAQYMYGGGQVSVVDVAIAGLTGAITYGTSLLPGL

SEQ ID NO: 49855 - protein, 450 aa, Burkholderia fungorum
MKILIYGINYAPELTGVGKYTAEMAVLLADRGHEVRVVCAPPYYPEWRVSEGYASWRYQHETRDGVAVWRAPLWVPSRPSGLKRMLHLATFAATSLPLLAWQALWRPHAVMLIAPTLMCAPASLMLARITRASAWLHIQDYEVDAAFDLGLLKSSRAARTARWIESALLKRFDAVSSITRQMSARATTKGVDASKVVCLPNWVDVSTIFPLARPSEFRRLLGIPAEQKVVLYSGNMGAKQGIETLADAAVALAARPDLTFVFCGSGAARENLLERCSGLTNCVFMPLQPVERLNELLNLADIHVLPQRGDAADLVMPSKLTGMFASGRATIAMARRGTALYEAVAPRGVVVPPDNVKALAAAITVLAGDAERRTALGKAARNYAERALSPESTIRTFEERLAVLLRESGLEDAEDAKRAKGAPPSFGPRPSGAAGRRRRKPATAEEAAPD

SEQ ID NO: 49856 - protein, 368 aa, Burkholderia fungorum
MKPTPIMLDRKRVIQAMLLAAILVLGYVVLWPFVIPVAWALIIAYVTWPLYCRLHALIRGRAWISALLMTLLVGVVAFIPIASLISPVFREFLALYRNVAEYAASGPLRVPDFIARIPWLGHSLQQLVSEFADDPQRLHAYITQSGDRWVGELASMVGSVGRNAVKLGFATLTLFFAYRDGRALLLQVQGVMRPVLGDRLDGYLSAIGGVTRSVVYGLALTAVVQGALAGLGYWAAGVKAPLLLTIITTLAALIPFGTPFVWIPVGVGLIANGNMFAGVGLLLWGALVVSWVDNLIRPMVISNAVRVPFLLILFGVLGGIGAFGFIGLFVGPVVVAILLALWREWCTSETGTGSVDSTGQPSSFTRRT

SEQ ID NO: 49857 - protein, 149 aa, Burkholderia fungorum
MNKQLLPLQRPSDCPCGGAAPDQRSGARAPRFAQCCGRYIDGGEAAPRAHELMRSRYSAYVVGATDYLRATWAAHTCPADLDADPAAPDAPRWLGLQIKAFAETDAHHATVEFVARYKVGGRAHRLHELSRFVRGEDGRWRYVDGDVSE

SEQ ID NO: 49858 - protein, 319 aa, Burkholderia fungorum
MLPFEAGPPQVFSPLGGLARSDRSGSAFKEHRVSAPNLIPHIRSALANLRPAERKVADMVLSDVDFAMRASITELAQRAEVSEPSVTRFCRAIGAHGLRDFKMQLAQSVAGGVPYASTAVARDDDVQTLMDKVGEAAIGGITHARGALDPAVVESAIAALSSARRVFFFGVGSGSGLVAQDAALRFLRLDIASTAFTDGHLQRLYAGLMEPGDVAFAISHSGRSVEVNESIQIAKERGATTIALTNVGSRLAWLVDIPLLLRVPSPIDPNTPGVSRLVHLCIMDALAIGVALKAGPKTLEKMRHAKARLASHAPEAAGE

SEQ ID NO: 49859 - protein, 460 aa, Burkholderia fungorum
MNDYNERSIWLRMRAMLSLNDPRWGRGDGNGDRQRPNEPKRPPTKDGEGPPDLDEMWRDFNRRLSRVFGRKGGGAGGGRPDNGRGARIGLGIVIGVLLAIYLGSGVFVVQDGQAGVVMQFGKYRYTAGQGVHWRLPYPFEAHELVNIGQVRQVEIGRNNVVRLANVKDASMLTHDADIVDVRFAVQYQVKKPTDYLFRSVDPDQGVMQAAQAAVRSIVGARSTNDILYQDRETIRQQLMAAIQQSLDEYQSGLAVTGVTIQGVQAPDQVQAAFDDAAKVRQENERAKRDAEAYAADLLPRAQADVARQIDEAKTYSDKTVAQAQGDAERFKQVYAQYSKAPAVIRERMYLETMQQIYSNTTKVFVDSKSGNNVLYLPLDKLVEQTRQRAADAASGAVAAAAPQAASGAALPSAVPSASATGAAASAPAAVATPASQAAASSDALRSRDSFRSRMREDDVQ

SEQ ID NO: 49860 - protein, 300 aa, Burkholderia fungorum
MAGVLALPAVAFAQSQAYTNGTVNVRAGPASDYPVVTQLPGGVPVSVMGCISTYQWCDVAAPNLRGWVYAGRLSYPYQGSNVPVMTYGTVIGLPIVTFSIGTYWGNYYRGRPWYGQQGRWAHHPPPPAPRPGAGGPPGGPPPGHGGGRPPGGQPGNVGGRPPGGQSGNVGGRPPGGQPGNAGGRPPGGQPGNVGGRPPGGQPGNVGGRPPGGQPGNVGGRPPGGQPGNVGGRPPSGQPGNAGGRPPGGQPGNVGGRPPGGQPGNAGGRPPGGQPPQGGGGRPPGGENGGGGGGRPPDQHG

SEQ ID NO: 49861 - protein, 380 aa, Burkholderia fungorum
MAMVAGEPSGDLLAASLLDGLASRLPAGTQYYGIGGPRMIATGFDAHFPMEKLTVRGYVEALKHIPEILGIRTELKRQLLAEPPSVFVGVDAPDFNFGLEHPLRDAGIPTVHFVCPSIWAWRGGRIKKIAKAVDHMLCVFPFETALLEKAGVAASYVGHPLADEIPLVPDTLGARRALGLAEEGPIIAVLPGSRRSEIDLIGPTFFAAIEMMQHQEPALRFVMPAATPALREMLRPLVDSHPGLALTITDGQSQLAMTAADAILVKSGTVTLEAALLKKPMVISYKVPWLTGQIMRRQGYLPYVGLPNILAGRFVVPEILQHFATPQALAEATLKQLRDENNRRTLTEIFTEMHHVLKQNTAQRAAEVVASVIEKRKARP

SEQ ID NO: 49862 - protein, 164 aa, Burkholderia fungorum
MVPARQGTSGIAALELCVILFNESGGRRLAVLTGTQFTAASVAMSDVRHHLSPRDRLELLCWLTCGSLGAYYLNEDWPDAAFHVQAAHKWLDRRAREADWLSVAKLSATAVEIARRHAQFIEADWARDAVEEILDTDELDPQARLVRQVIADCQSALADKRLAD

SEQ ID NO: 49863 - protein, 212 aa, Burkholderia fungorum
MKQVNGAAASGSPLKKVVLASNNAGKLREFAALLGAAGIELIAQGELNVPEAEEPHPTFVENALAKARHAAKLTGLPALADDSGLCVRALGGAPGVYSARYAQLAGGEKSDAANNAHLMSALRGETDRRAYYFCVLALVRHADDPEPLIAEGRWHGEMLDAPRGTHGFGYDPYFFLPALNASAAELDPAVKNAGSHRAIALRQLLARLTEEA

SEQ ID NO: 49864 - protein, 434 aa, Burkholderia fungorum
MENESKLVEVDEKHLQFRVAREAFVSEQILSGEYEKIFDRCWLYVGHVSEFSKPGDFVTRTIARRNLLVTMGTDNRINAFFNTCPHRGATVCRDRAGNSKNFQCFYHGWVFGCDGNLKSQPGKDRYCADFIASGAGNLVSVPRFDIYAGFCFVSFNAEVEPLPDYLAGAKEYLDLVSRYSESGMAISSGTQEYAIRANWKLLVENSVDGYHAVSTHATYLDYLKNTNGSLSSTKLEGTSYDLGNGHAVLEYTAPWGRPIASWVPLWGEQGKKEIDQIYARLVELHGEDMADRMAHKNRNLLIFPNLVVNDIMAITVRTFYPQAPNYMLVNGWSLAPREESEWAKKFRLSNFLEFLGPGGFATPDDVEALESCQNGFSNYRLVPWSDISKGMGKASPNYDDELQMRAFWTRWNQYISGSPSPQATIRRLPSATAA

SEQ ID NO: 49865 - protein, 351 aa, Burkholderia fungorum
MRHSSTHPAPVHPPVAKRTAGSPGGFAASIAKSRETTLFVVLILLIVGTGLAKPQFLNLQNLRDVLLNVSIISLLTAGMTVVILMRHIDLSVGSTVGISAYAVGSLYVAFPQMPVIVALAAGLAIGLVAGGINALLVAVGRVPSLVATLSTLYIFRGADYAWVHGGQINATSLPDAFSRLATGTLLGIPTLALIAIVVLAGLAVYLKQFRGGREHYAIGSNPEAARLAGVNVERRVMAGFLLSGAIAGFAGALWLARFGTVDASTAKGIELQVVAAAVVGSVAITGGVGTILGATLGALVLGVISIALVVLHVSPFWEQAIEGALIVAAITADTLLARSVAKRMMRKRDHG

SEQ ID NO: 49866 - protein, 1026 aa, Burkholderia fungorum
MNRPLVRLPLRATGTAPVRRWFKWALAAAFLFALALAARFCQVEIETSRLQARYLSELTRDVGFSVAEGPSHSIRFPEADKGPYDSRLGYALLPSIQQRLLQRGFEISAQARDSERMLSLADNGLFLPYEEKDRAGLQLVDGTGAPLFAAQFPGRVYGNFEAIPPLVVNSLLFIEDRYLLDPNQPNRNPAIDWGRFSRALADQGVRVFNRHQSQPGGSTLATQIEKFRHSAGGRTATPPEKLRQIASASVRAYLNGPQTMPARRQIVVHYLNSVPLAAQPGIGEINGIGDGLAAWYGRDFNDVNRILKAPSTEQNLPEQGVAFRQVLSLMIAQRAPSYFLHHGYAELERLTDSYLRLLANGGIVSIPLRDAALSAAVDLHRAPARTAATDSFVSRKAVTSMRSHLLAALGVASFYELDRLDLQAKGTLNNAVQQAVSERLAAAATRDGAKAAGLVGFEMLRASDDPSKIAYSFTLFERRDGANLVRVQTDSVNQPFDINSGARLNLGSTAKLRTVVTYLQIVSDLHKRYAPLSTAELKAVKPDPNDQLTRWALDYLAHTPDRSLQAMLDAAVERKYSANPGETFYTGGGAQTFNNFESDDNSRILTVHRAFQHSVNLVFVRLMRDIVHYEMVQTTGPSSQWLGDPATRKMYLTRFADQESRVYMNRFYTKYHGKTRDQALALLLLGVRKSPPKVATVLRSVAPSESNAWFNMQMRAALKNTPAASVLDDEDLVNLYAKYAIDRFNLNDRGYISSVHPLELWTLNYLREHPDATLDQIQSASRDVRLSTYSWLFKTRYHATQDRRIKRMVELRAYDAIGKSWQALGYPFATLTPSYAAAIGASGDRPAALAQLIGVIANNGNKVPTESLTQLDFAKDTPYETHFRRAAVAPQQQLSPEIAGVVKVLLRDVVTGGTARRLAQGMTFPDGQTLEVYGKTGTGDQRFNVFAKGARLIESRKVNRSATFVFAMGDRFYGTLTAWVHEPYAAHYEFTSALSVQLLKSMAPVLQPLLDKPPAKTASVAKVAVQ

SEQ ID NO: 49867 - protein, 216 aa, Burkholderia fungorum
MSTAMQENERPVTTGVRLLDVMNRILLAWYRLKTRFWYAHVFESIGAKTTIFRPMLLVNVQYASLGERVLIRPGARIELVVTDPAAPPRLTIGSRVNIEQNVHIVCGSSIEIGDGVTITGNVAIVDVEHPYEDVNDPTRIGDRIRTRGNYVRIGQGAFIGFNTIVLPNVKIGRHTVVGAHSVVTRDVPDYCVVSGNPARIMKRYNFETQCWEREKQ

SEQ ID NO: 49868 - protein, 613 aa, Burkholderia fungorum
MSQTVGDFIIERLHAWGVRRIYGYPGDGINGVFGALNRAQTEAARHRKKGSDDSAHAIEFVQVRHEEMAAFMAAAHAKFTGELGVCIATSGPGASHLLTGLYDARMDHMPVLAIAGQQARAALGGHYQQELDLVSMFKDVAGAFVEQATVPAQVRHLVDRAVRTALSERKVTALILPNDLQDLPYEAPGRKHGTLHSGVGYRAPRLVPYPDDLQQAADILNAGKKVAILVGAGGLHATDELIAVAEKLGAGVAKALLGKAALPDDLPWVTGSIGLLGTKPSYDLMAECDTLLMIGSGFPYAEFLPKEGAARGVQIDIKADMLSLRYPMEVNLVGDSAETLRALLPLLEEKKDRAWRKRVEGWSADWWKTLDKRAHEPGKDAVNPQLTVWELSKRIASNAIVTSDSGSVANWYARDLKVQRGMMCSLSGGLASMGAAVPYAIAAKFAYPERPVIALVGDGAMQMNNMAELITVSKYWRGWSDPRWICMVLNNQDLNQVTWEQRAMEGDPKFEASQDIPCVPYHKFAELIGLKGIYVDDAQQMGAAWDDALAADRPVVIEVKADPNIAPLPPHITLAQAKAFASTLMKGDPNEGNVIVETAKQVLDAVLPGHHSK

SEQ ID NO: 49869 - protein, 219 aa, Burkholderia fungorum
MGWEQFEHGWRRAPAAAPAKGLVVLMHGVGSNARDLMPLADIWSESLPDVAFTSLDGTDEFDGGFGGRQWFSLRDVNEGNREARVAAAYPALRRMLEAELAYWQVPFGRLALVGFSQGSIMALHHVAASAEGAAGVVAYSGRLASVIVAQNGTPLTLIHGEDDEVIPVQELEYAADAFSNAGYTVDAYALPGIGHTINADGVALGQEALEHALGALSRG

SEQ ID NO: 49870 - protein, 315 aa, Burkholderia fungorum
MAAEGGSPMRPVFRNAGHPPATSYRWTLMSIVNLSSYQFATIEDTAAWRPFVTERCNALGLKGTVLLAPEGINLFVAGTRENTDAFIHYIRHDALFEGKFADLQFKESLSDKQPFTRMLVKLKREIITMKKPAIRPELGRAPFVDAPTLKSWLDRGHDDEGRPVVMLDTRNAFEVDVGTFDNALDYRITKFSEFPEVIEQNRADLEGKTIVSFCTGGIRCEKAAIHMKDVGIENVYQLEGGILKYFEEVGGAHYHGDCFVFDYRTALNPQLEPSKTTQCFGCRAVVTPEAQQSPLYVAGKTCPECHPDSKAARAA

SEQ ID NO: 49871 - protein, 244 aa, Burkholderia fungorum
MTDLEASDCLACLRDHRLLACDLRQVANGVFDDLLVSDRFAKTHIKGDLGDARHFHHGLVTELLDEAGYNLFFVKLLQTSHFFTPQRQALSSAPVVLRKRIFLSPSTLMPTRDALPFASTNATFEICSGIVLASTPPVVPFIGFGLTCFLTRLIPSTITLPSPTDSTTPRLPLSLPVMTITSSPLRILFIATPYSTSGANETIFMNRSLRNSRVTGPKIRVPIGSSLAFNNTAALPSNLISEPS

SEQ ID NO: 49872 - protein, 144 aa, Burkholderia fungorum
MKSARRRSRELATQGLYQWLLSGSPGGEIDAQLRGAQGFDKADHEHLDAVLHGVIRDSEALSAAIAPCLDRPIEQLSPVERAVLLVAAFELKNHLDIPYRVVINEAVELAKTFGGADGYKYVNGVLDKLSAQLREDETQAARKR

SEQ ID NO: 49873 - protein, 569 aa, Burkholderia fungorum
MEDKRGSRGTTFCMDVAQGGRVHANGHGTSEAVTRRQRSRSAVCERFGVVLKSETVRVQMIDACPFLQEVTPGIVNHRRRTAQVDGVFRQVRKIFAHRVLDVALSSRPFAAGTREHRYVLELVETRTPLLNLVVQIQIRLGTCAPVEPHWRTVRIVHERFQNRLDGRESRSRRHHQKRTIVLHMKAETAQRQLDVQRIPRLQRRQHVIRKPAAWNPPDMKIEHGAGGSRSHRKAPAFAFAEQNVHVLAGIEPELRLLGQLDRQMPDSGPQRADGNHTRFDLRRRRCISAHVRRGNHHVAACPRLAGKHKTGVGFLLRDAERKFFIFVRPADYLHATRSASAQLAIVRNCNPCTRRRLQQRFVGTGFESLAGSRHFYLIDHLAISNETMDQPATGRQTALLLDVGFHEDATSAGRKQIVQGLQRRKSALRVLLAVAAAQTHAANHLIVDHDRKASDKRGKAPLETQLNAKRLVARQCGPVRRLGKEMGRALMARRRERLVPRDLGSGDARVVGPLQHDRIPAVIDDADRLGHVDRFRFLQGGARHRARLGQLKLEKTLHDGFSEMNGLSS

SEQ ID NO: 49874 - protein, 753 aa, Burkholderia fungorum
MSEPHGHVHGHAHARSPGPVPVDSAHASGPQRQGEPGAVYTCPMHPQIRASAPGNCPICGMTLELVTPLAVEERNVELESMTHRFWFALALSIPLLVMTMGPMVSSFDLGAAVNHIGARLARPHWMSASWAQYVQAVLATPVVVWAGWPFLQRGWTSFTTWQLNMFSLIGLGVAAAYGFSLFALFFPETLPQAFRRGHELPLYFEAASVIVTLILLGQVLELRARSRTSSAIRDLLELAPHTAIRVRSDGTEEAVPLEDVAVGDLLRVKPGSKVPVDGVVTDGSSSVDESMITGESIPSEKGAGSKVTGATVNQTGTFLMRAEKVGSDTLLARIVQMVAQAGRSRAPIQKLADKVSGWFVLTVLAVAVAAFVVWAAVGPAPALANALVVAISVLIIACPCALGLATPVSIIVGVGRGAKEGVLIKDAEALELMEKVDTLVVDKTGTLTEGKPRVQTVVALAEQSESVVLSYAASLEGPSEHPLAQAIVAEAQKKNAQTKPVEAFNAIVGKGVSGRIDGHTAVLGNTALMEDTKVDCAAVRTEVDRLREAGQTIMYLAIDGTLAGYIGVADPVKETTAEAVRLLRASGIRIIMLTGDNPVTANAVAKTLSLDGVKAGVLPQDKYKHVQELQQQGHIVAMAGDGVNDAPALAQANVGIAMGTGTDVAMNSARVVLVKGDLRGIARARALSVATMKNIRQNLFFAFAYNVIGIPVAAGVLYPWLGVLLSPVLASAAMALSSVSVIGNALRLRAVRT

SEQ ID NO: 49875 - protein, 347 aa, Burkholderia fungorum; identical to SEQ ID NO: 47898

SEQ ID NO: 49876 - protein, 445 aa, Burkholderia fungorum
MLWGEKVWATDAFNLIGHGPVSIGMGGTAAAYDIGPAGMMSNPATLTFMPDGTYFLIGADMVSADLKVTSTATGETANSYSRGRNNGPYFGPEFAFVWRKDRIALGVGAYATDGVGTQYGTDSFLSRTATNNVDTGLDVFSRLLVMDIPFSVAYKVTDKLTIGGSIDAVWTSVNLGLLLDTTQIGALAAQGRLSGGLVPALLGIPQLSGGYLNFNNGKIAGGAASAWGVGGRLGLTYAVNPTTRVGLAYQFKTSVGDLSGRSTLTAVSAVAGNIPLSGTVRLHDFQMPATFTAGISHDFTDRFTVAVDYQRVFWSGAMKDIQVGFTQDGTGQTLKLALPFNYRDINVFSIGGQYRYNESWTFRAGFHYAQEATPDAGLMAILPATPTTNVTAGTSYSFNQNMKVDIALAYAFPKTLTNGSLPDTSVPIKVRHSQIAASLAFTKRF

SEQ ID NO: 49877 - protein, 560 aa, Burkholderia fungorum
MTKLLKRGRYALGAGALALAAFGAVIFPSINAPAQTQPAAKPAATSAPQPAAKSSAKPNILVIFGDDIGQANISAYTRGVVGYRTPNIDRIANEGMIFTDYYAENSCTAGRSSFITGQSPLRTGLSKVGAPGAPVGLQKGDMTIAQALKPLGYATGQFGKNHLGDKNEYLPTNHGFDEFYGNLYHLNAEEEPERPYWPKDKNDPYVKNFSPRGVIHSTSDGKVQDTGPLTAKRMETIDDETGAHAEEFIRKQVKNGTPFFVWMNFTRMHVFTHVRPEFRGKSGMPGNEYADGMWEHDQDVGKLLKLLDDLNISKNTIVIYTTDNGPNQFSWPDAATTPFRSEKDSNWEGAFRVPAMVRWPGHIKAGETSNGMFSGLDWFPTLLAAAGDTGVKDRLLKGWAPKAGSTSFRNHLDGYNQLPFLTGQTTKDPRTEFYYFDDDGQLVAMRWDQDGNAWKAVFCEQRAKGNLNIWQDPFVCLRVPKLFNLRMDPYERADITSDQYNDWVTKNVYLNGIATLKASAFLQTFVDYPPSQRPASFSVDQVRRQVDKKIDESFKKRGLE

SEQ ID NO: 49878 - protein, 261 aa, Burkholderia fungorum
MNGSQWSDSRARGALRFLRCYSSLAMNLESILFTQGFGSRRQCRALIADARVSIGGAVCTDADADFPTGDTTFSFTVDGVDWPYREHAYLLLNKPAGYECSRDPQHHLSVFSLLPPQFAGRGVQCVGRLDQDTTGLLLLSDDGKFVHLFTSPKRKVPKVYVATTRHPIDDAQLSALRDGVLLNGEARPIAAVDVEARGDHTLALTVMEGKYHQVKRMIAAAGNRCEALHRERIGGLALPEALARGAWQWLDETDLGSLRSG

SEQ ID NO: 49879 - protein, 799 aa, Burkholderia fungorum
MQSTSPTSPPPAPQKRKRPLWLKLIIGFVGLIVAGILCVLLVLGYALVVATPNLPSLDALTDYRPKVPLRIYTADHVLIGEFGEERRDIVHIQDVPDSLKKAILAIEDARFYDHGGVDLTGIARAGIVALTNGHATQGASTITMQVARNFFLSSEKTYTRKIYEMLLAYKIESKLSKDQILEVYMNQIYLGQRAYGFASAARVYFGKDLKDLTLAESAMLAGLPKAPSAYNPVVNPKRAKVRQEYILQRMYELHYITQEQYDEASKQPLVVKGAGKEFSVHAEYVAEMVRQMMYAQYREEAYTRGLNVVTTIDSADQDVAYRALRKGLTDYERRHGYRGPEAFIDLPSDADDREQAIDDALLEHPDNGEIIAAVVTAASPKQVQAAFIDGNVATIQGDGLRFAQFALGPRAQPNQRVRPGAIIRLVKNDDGDWSITQLPQVEGAFVSVIPQDGAIRALVGGFDFNKNKFNHVTQAWRQPGSSFKPFIYSASLEKGLGPATVINDAPLFFSAAETGGQAWEPKNYGGGFDGPMTMRTALQRSKNLVSIRILNQIGTKYAQQYITRFGFDADRHPAYLPMALGAGLVTPLQMAGAYSVFANGGYRINPYLIAEVTDQRGIVVAHAQPLVAAQSAPHAIEPRNAYVMNSLLQSVAQRGTGAKTNVLKRTDLAGKTGTTNDSRDAWFAGYQHTLTAIAWIGYDNPRSLGDKETGGGLSLPVWVEYMGRALKGVPEYKMPMPDGLTELGSELYFDDFTPGHGFVATVGISQAALDAEASGASAAAPEQVGEQEKQDIMNLFRGH

SEQ ID NO: 49880 - protein, 584 aa, Burkholderia fungorum
MLDDQLHAGDAVPRVAREAVGDRGAGGQRVGVIEPDRVEALAAAHELQLQVFVLHQRLRDDVEFARKHRRRKALTPHGRVQHFDELRREVGVFEFAVGFHRARERFFGQPFAADRFERGGEARHVGGGEREARGHCVTAELDDQARLALRDQVERVAQMEARDRAARSFDGPAAVVGEREGERGPVEFLFQPSRDDADHALVPVGIEQRDGGGAVGVDRREVFERLLLHAGFDFAAFAVHRVELLREVPGAADVVSSQTFDAERHVRQSARRVQPRSEREAEIEARRAAGVARGGAKQRGDARLHLAFADALQTLRDQHAVVAVELDHVRDRAERDQIEQAVEARFGKVIVERATAAQFRAQREQHVKHHADARDTFARERAARLVRIDDRAGGRQFVAGQVVIGNQHVDAERVSRLHAVHAGNAVIHGNQQIRLARRVAGGQRDDLRCQTIAVLETVRHQILDPAAEHAQAAHGDRAGGGAVAIVVGDHQHAALALDGVGEQGGGVFATLERDGRYEPREAGFDFVGHAHAARRVEAREHRMQTVAGEDFGVDGGRGARNDSGHAERPWFIRCIRWVIQSFIR

SEQ ID NO: 49881 - protein, 187 aa, Burkholderia fungorum
MTDHRLIEITHATHGVDIDLVYATARNLTGKPIYRAAHCLLLEPAEVALRRAVELARQIGTTLRIFDAYRPPQAQQVLWDFLPDPTYVADLKRGSNHSRGTALDLTLLDAHGEELDMGTGFDAMTIESEHFHPGLRADVQRNRMLLLGVMHGAGFTHIKSEWWHYELPGSHALPLIDNNASGPLRLM

SEQ ID NO: 49882 - protein, 526 aa, Burkholderia fungorum
MNLRAFFSTFQRDLLAGTVVFLVALPLCLGIANASGVEPFAGLVSGIVGGLVVAVLSGSRLSVSGPAAGLVVIVIDGIAQLGSFSAFLLAVLLSGAIQFGFGMLKAGRFAAYVPSPVIKGMLAAIGVLLIVKQFPLALGLSGADAASAAQPVAQAAGSIGTPFGSVSLAACVITLLSLAILVGWETRALRRFALVRRVPAPLAVVLLGIGATLLLSVLAPSLAPPAEHRVALPPLESFAALQLALEWADFGPHFAQLVNPDVWRVAITLAIVASLETLLSLEAVEQIDPERRPAPPDRELKAQGVGNLIAGAIGGLPITSVIVRSSANVHAGAQSRLSAIIHGVLLLVSVFALTSVINLIPLACLAAILIFTGLKLAKPSLFAAVAKQGFAPFAPFIVTLVGVLATDLLIGIVLGILCSVLLALYANLRSPIVLAQHGDHYLLSFRKDVSFLGKVPLKHYLQQIPDGATVIVDATRADFVDHDVRELLDTFVADAPNRGIAVEVRHQVRAQARAARGWSMRRTATE

SEQ ID NO: 49883 - protein, 215 aa, Burkholderia fungorum
MKRTYQPSVTRRKRTHGLSRSHEDRRWPQGHQRTSREGPQAPRHLRQASGLRALCVPSEASGNAGTAGAQQQGSVPLRAQAAFPKAARLLKTDEFSSVFRLRPWRRTAHFVVYGRPTGNEARLGLVIGKKYAPRAATRNLVRRIAREAFRLRRAEFGGWDVLLRLHTRFDKKALPSASSPPLRALCRSEIEALLDKAAREVTRREAPPAEAPKTE

SEQ ID NO: 49884 - protein, 562 aa, Burkholderia fungorum
MNNPKHIDPRLDPTRTIRAPRGAEKTCKTWIAEAAYRMIQNNLDPEVAEHPHALVVYGGIGRAARNWDCFDQILKSLKDLEENETLLIQSGKPVGVFHTHADAPRVLLANSNLVPHWATWEHFHELDRKGLMMYGQMTAGSWIYIGSQGIVQGTYETFFSVANQHFNGEPKGRWILTGGLGGMGGAQPLAATMAGFSMIAVECDETRIDFRLKTRYVDRKAQTLDEALAMLDEAKLAGKPVSIGLLGNAADVFAECVTRGITPDCVTDQTSAHDPIHGYLPQGWNVEDWRERMKTAPDSIITPAKQSMANQVQAMLTLQERGAATLDYGNNIRQMALEMGVKNAFDFPGFVPAYIRPLFCEGKGPFRWVALSGDPEDIYKTDAKVKELIPDDPHLHNWLDMARERIAFQGLPARICWVGVKDRYRLGQAFNEMVRNGELKAPIVIGRDHLDTGSVASPNRETESMKDGSDAVSDWPLLNALLNTAGGASWVSLHHGGGVGMGFSQHAGVVIVADGTDAAKERLGRVLFNDPATGVMRHADAGYELAQQTAREAGLNLPMLGR

SEQ ID NO: 49885 - protein, 461 aa, Burkholderia fungorum
MRKFQDLLARVFDVALVLAGAAVASQIRFDYLAQSGFYWALVMFSAAFALAIFPAFGVYESWRGRSKLVLAGQVSLAWLMVQGSALVLMYSLHRIDFVSRLWFSYWTAVTGGLLIAYRLMTHAVLASARSAGMNLHQVAIVGSGSQCDAIIRRINAAPTTGFRATAVYNARPDVSQVISQGVPVFESVEALAGYMRTNDVHELWLMLSLSEEPLICSLVSEFRDDLVNIRFMPDVRSLALFEGSGVIDLLGVPAINLVASPLSASSMLKKEIFDRLFALTALIALAPLMLAIAIAVKLSSRGPVLFRQKRKGADGHVFTIYKFRSMRLHTEQKGTVRQATRNDPRVTRVGAFLRRTSLDELPQFFNVLRGDMSVVGPRPHALEHDDLYQKVVAGYINRYRIKPGITGWAQINGFRGETDRIEKMERRVEHDLYYLGHWSFALDMRIIGATIVAGLVHRNAY

SEQ ID NO: 49886 - protein, 511 aa, Burkholderia fungorum
MLDLNPHAGAYIASTADASKNGLTTGTLTVSDIQNHSDYSASSGGFSAGAGIGSTGKAVGPGSVSGAGGVTPMMSQHDSGSSSATTKSAISAGTISVTDAANQAQDVAGINRDTTDLNGRVSKLPDVNNLLSAQADTMNAAQAAGQVVAQGIGAYADGKKAQAGQQEKADELAGNTAAAAADKAEAASWDEGGTNRVVAHTIGGALVAGLGGGSAPGGALGAGGSAALAGKLNGLADEIGRHTGSMTLGNVASNVLAGAGGTLLGGNSGAFAASNEDLYNRSSGNGEGKGGTGNEFIDRFAAWSDDPLGTLNRQMSSLGDEFGALMRHGAQTKMSESPASLMAQGAANGVSAVTGVGGGRPPAASPGMVVVNSSTGQVANAAVGTPGNATLNSGNDDQQSANNGASDNSPYSNLSDSPSVGPGKNFTAAQKQKIYQQNMESNGGVLRSDQDGTELVMPSKSEKGVTPPSNEAQIDHIVPRNPADPDASKGTNSYGNAQVLSRDQNRQKSNK

SEQ ID NO: 49887 - protein, 542 aa, Burkholderia fungorum
MKQNNLLRAARVTTLVAAAAASMVGASVARAEIPNKTLVYCSEGSPAGFDPAQYTTGTDFTANTFTVYNRLVEFERGGTKVEPGLAEKWEVSADGKTYTFHLRHGVKFQTTSFFKPTREFNADDVVFTFQRMLDPNSAFHKAYPVQFPYFTDMGLDKLITSVEKVDPYTVKFTLKEVNAPFIQNLAMEYASILSGEYGDQLLKAGKAADINQFPVGTGPFIFRSYTKDATIRFDGNPDYWKPNTVKISKLIFSITPDAGVRVQKIKRDECQVMSYPRPADIAPLKAEANIAMPSQPGFNLGYLAYNVTHKPVDKVEVRQALDMAINKKAIIESVYQGAGQAATNPMPPTQWSYDKNLKGASYDADKAKALLAKAGYPNGFDITLWAMPVQRAYNPNARLMAEMIQADWARIGVKAKIVTYEWGEYIKRAHAGEDDTMLIGWTGDNGDPDNWLGTLLGCEAVNGNNFSKWCYKPFDDLIQKGRVTSDQGARTTAYMQAQQIFAQQLPFSPIAHSTVYQPVSKKVVDMRIEPLGYARFDGVSVK

SEQ ID NO: 49888 - protein, 76 aa, Burkholderia fungorum
MGSEIRETAVLYVRADRSRCCGYGLCAQLCPQVYKLDENGIVYLESDTVPRELESDAREGAAACPAEALTIEAAGA

SEQ ID NO: 49889 - protein, 282 aa, Burkholderia fungorum
MNMAETQLNPIARPTAPAGFDPAQSGQSQAPSRPKIEINDLNFFYGKYHALKNINLQIPEGKVTAFIGPSGCGKSTLLRTLNKMYALYPEQRAEGEILMDGENLLTTKRDISLLRARIGMVFQKPTPFPMSIYDNIAFGVKMFETLPRSEMDDRVEWALTKAALWNEVKDKLGQSGYGLSGGQQQRLCIARGIAIRPEVLLLDEPCSALDPISTGRIEELIAELKSDYTVVIVTHNMQQAARCSDYTAYMYLGELIEFGDTEKIFIKPVRKETEDYITGRFG

SEQ ID NO: 49890 - protein, 1632 aa, Burkholderia fungorum
MERLPLAAARRQSEFRRRVSFGLSDTMTRMISVTPSSNWLGNARRRAAGTFAALLTVLLAAMTLAVSPAAYADDDAASAAAAADANIAGNPTLQTAPSSNFSSQKVDGQPFFLLSDASFGSDQLAQVRLEAPGRDFKDALQAYGGADIVVYRVPRPLDFLKAQKNLHRLNVAPNYQGEGLANTLTYLWDRWFTEARRAWQRVLSFATRSKATEAAPQFKLGEQTGKQTQFEPSSQFAPLKGYDMVARFRYPIWDAKVIQPPKGVNLAGSSSNFIEASAGNVMIPVGKLPPGLYIVEAVIGNYRAHTLLFVSDTVAVVKAASSGMLVWTTRRDNGKPVANTEVSWTDGVGVLQSGATGGDGALVLQHVSPERSYVLGTDPQGGVFVSENFYYDSEIYNTKIYAVTDRPMYRPGDPVHVKFIGRTFQSATQSSAPAEADIRLDVLDPNGAPVASSKVHFASGTGADTAFTLPADATAGGYTLRFDYNGDVYGSAFRVAEYVKPHFDVNLSMDKADYATGEALKGKIQLRYPDGKPVRDSKISVTLRAQKVTIVDGELRYAGLFPVKLDQQELKTDSDGNASLTLPAAKEPSRYALTLFAQDGAAYKVRVTREVLIARGATPYRLNTAKSFSQPKDVVSFDLQALGAIDPASHAPSKYEWTRLESQTHGEGALKSASAGGKLSFPVQFDEPGSYMLSVKDDLGNLLAATSHWVAGDGLKAIPGSVEIVFDRDRYKIGDTAEALITFPMPVDDALLTLERDNVERRALLTAGGDWLQLQRVAPSQWKARIKVGEDFAPNMTFSVLYVHAGEYVFQNAGIVVAQPQIELKVKSDKPVYGPGDTVTLNLDSTLNGKPEAANLTVSVVDEMVYVLQPEIAPNIVDFFYHPRRNNVRTSSSLSFITYDLARSPLKGAPGGPQRANYNERGVKVLERPRRDDQDTAAWEANLKTDANGHATMTFKMPDSLARWRITVRAAAPDGMVGQRTAYVRSDKALYLKWSGPSHFRVNDQPAIDMIAFNQTDADMDAQWVVDGGGLSLNQKVTLKRGANYLRLPSGALKDGVINASLRSAGKDVDRLQTTIHLDASGWLDLHQNTVALDGSNKPLSLPQDAQDVSVRFIGSAASQFMRVADDLIAYPYGCAEQTSSRLIPLALAHDAIGRGVSGDGGASSAQGLEALLRNQRQRLAMLAGVGGTFGWWGDTTGGSALITAYAYYADWLASRSLGISLPADNWQHAMDVYRDAGAKEPLLHRALALWLMQQMGLPVATPVSGVAADLMSDAAATASVPARNGTYGASDSIVFAQADSPRGKQMATLLIAGMARSTSAQLPDGFDAAASAARAALSNDPAPLVQSLLVMSGGDGGAAADPSALLAKSSADYPTLDRALTLLWLRKALGGDVAATSLPSLQGAGWTRAATPTGTPLYRWTGATLPAALDVGAARADVNALVSFRSHTSEDSRLNISVERRLYKLEPVEVAADPKKKDASAESQVGRAAFTARLVKQGDAIDSNALYVDEVTLTPRSGNAYHYGLLDVPLPPGGDVEATSWGVSIDGLPGAKEGASGPQPFQRVASYEMGELAYHQPVPLLDRPVTLRQLVRFALPGTFALPPARYFRMYQPDAKAFEGGKSDHLTTLRIQ

SEQ ID NO: 49891 - protein, 281 aa, Burkholderia fungorum
MGQILFVVWRESVEALLVVGILYAWLKNGDDDARRGLPYLWGGVAAGLIAAVALGAALVGFTEVLSGDAQDYFQTAMVLIACVLIVQMVLWMKQHGRSLKRDMEQSLQKSQRDSNWWGVALLVALAIAREGSETVIFLYGLGFGQSGHVDGSQMLAVVIGLGLAFLTFYVLQLGGKFFSWRLFFRVTEIMLLFLGAGLFQTGVDKLIDKEILPTLVDQMWNSSAILDDSSTFGSLVSTLTGYRAHPALMNLLAYALYWAVVYLLVRRANRKPVQQAAGRAA

SEQ ID NO: 49892 - protein, 433 aa, Burkholderia fungorum
MSNPPPAVRRVAIIGGNRIPFARSNTAYATASNQDMLTFTLQGLIDRYNLHGERLGEVAAGAVIKHSRDFNLTRESVLSTTLAKETPAYDVQQACGTGLEAAILVANKIALGQIEVGIAGGVDTTSDAPIGVNERMRKILLEANRGRSTGQRVGALSKLRPGMFFKPLLPRNGEPRTGLSMGEHCELMAKRWNISREAQDVLAYDSHRKLTAAYARGFVNDLMTPYRGLAQDNNLRADLTLEKLASLKPVFDRDAGTLTAGNSTPLTDGASAVLLASEDWAARHGLPVLAYLSWSETAAVDFFDRKEGLLMAPVYAVPRMLARAGLTLQDFDLYEIHEAFAAQVLCTLAAWQDDEYCRTQLGLPGAPGAIDRAKLNVNGSSLATGHPFAATGGRIVAGLAKMLAQLDKPAGTARGLISICAAGGQGVVAILER

SEQ ID NO: 49893 - protein, 270 aa, Burkholderia fungorum
MGILNVTPDSFSDGGQYAMRGDALRQAERMMLDGADIIDIGGESTRPGAPPVPLNEELERVIPLVEQLRGANVPLSVDTYKPEVMRHALAAGADLINDIWGFRMPGAIDAVRDSECGLCVMHMLGEPQTMQLGEPVYDDVVSAVRDFLEERVAALQQAGVARARISVDPGFGFGKAVVEHNYALLANLPDTAPRAEPPYPILAGMSRKSMIGAVVGRAAPERVAGSIAAAVCAAERGAAILRVHDVAQTVDALKVWAAMREAANHSRARG

SEQ ID NO: 49894 - protein, 303 aa, Burkholderia fungorum
MRILIALGGNALLRRGEPMTMARQLDNIRRAAKQIALLADGNQLVVAHGNGPQVGLLALQAAAAGGAENTAPLDVLDAESEGMIGYLLEQELANALPATRHVATLLTRVEVDAHDPAFAHPTKPIGPVYTKAQAEALAQRNGWSIAPDGTDFRRVVASPKPQRIAALKPVEWLVEHDVIVIAAGGGGIPVTLAADGQTRTGIEAVIDKDLCSALLAADVGADLLLIATDVDAVYADWHSPTQRALREISVAELRSLAFPAGSMGPKVEAACDFVTRTGKRAVIGSLENIEAMAAGTAGTQISP

SEQ ID NO: 49895 - protein, 299 aa, Burkholderia fungorum
MSAAIVVAVLFGAERPCVCSLCLLCSPNSHRLSTCLAHAREPVSGDASRDHSKVRDAVPGIRCASPERRAAVASRGATRCARQRGGSAGAARYNIGMTRKTRIQTIESAEPEVDENGYDRPSKSQLKREMHELQELGAALIALPKDALKRMPMPEKLDDAVREARRITDHEGKRRQVQYVGRVMRSLLDEETAALRTALDTYNGVNKAETAKLHWIERTREKLLADDAALTDFIRQHPNADPQQGRTLIRNARKEAQQSKPPRYFRELFQWIKNADGPPAQTDSEADDAQDDEDDDRDA

SEQ ID NO: 49896 - protein, 978 aa, Burkholderia fungorum
MKLEHPDRLMNRTPLSLAALEVHDAFAERHIGPDSADQQAMLEALGFASRAALIDAVIPKTIRRTEPLPLGPFAQPKSEAEALATLRELADRNQVFRSYIGQGYYNAHTPTVILRNVLENPAWYTAYTPYQPEISQGRLEALLNFQQMIVDLTGLAISNASLLDEATAAAEAMTLLQRIGKPKSNVFYVADDVLPQTIEVVKTRATPVGIEVKVGPAADAANANAFGVLLQYPGVNGDVRDYRALAEAIHAAGGHVVVAADLLALTVLTPPGEWGADVAVGNTQRFGVPVGFGGPHAAYLAVRDEFKRQMPGRLVGVTVDAQGNPALRLALQTREQHIRREKATSNVCTAQALLAIMASMYAVYHGPHGLKTIALRVNRIAALLAEGAKQLGYTLVNETFFDTLTFETGARTQALHDAALAKRINLRRVSDTQVGLSVDETTTRRDLADLLEVFAQAAGAKIVPQVDALDSTIAASDTASVPPALERTSAYLTHHVFNRHHSETEMLRYLRSLSDKDLALDRSMIPLGSCTMKLNATSEMLPVTWPEFGQIHPFAPAEQTVGYREMIDQLEAMLVAATGYAAVSLQPNAGSQGEYAGLLIIHAYHASRGEAHRNVCLIPASAHGTNPASAHMAGMQVIVVACDAQGNVDIEDLKKKAEQHADKLAAIMITYPSTHGVFEQNVREICEIVHAHGGQVYVDGANMNAMVGLTAPGQFGGDVSHLNLHKTFCIPHGGGGPGVGPVAVGAHLAQFLPNQISSGYERAPNGIGAVSGAPYGSASILPISWMYIAMMGAKNLTAATETAILNANYVAKKLAPHYPVLYSGPGGLVAHECILDLRPIKETSGITVDDVAKRLADYGFHAPTMSFPVPGTLMVEPTESESKEELDRFIEAMIAIREEIRAVEEGRSDREDNPLKHAPHTAAVVIANDWKHAYARETAAYPLPTLIAKKYWPPVGRADNVYGDRNLFCSCVPIADYE

SEQ ID NO: 49897 - protein, 446 aa, Burkholderia fungorum
MTEQKKKLEKLSGVKGMNDILPQEAGLWEFFETTVKSMLRSYGYQNIRTPIIEHTQLFKRGIGEVTDIVEKEMYSFTDALNGENLTMRPENTAAVVRAAIEHNMLYDGPKRLWYIGPMFRHERPQRGRYRQFHQVGVEALGFAGPDADAEIIMMCQRLWDDLGLMGIKLELNSLGLAHERAAHRVELIAYLEKHMDVLDEEAKRRLYTNPLRVLDTKNPAMQEVAQNAPKLIDFLGEESRAHFEGLQRILKANNIPFTINQRLVRGLDYYNLTVFEWVTDKLGAQGTVAAGGRYDPLIEQLGGKPTAACGWAMGIERILELLKEEQLVPEDEGCDVYVVHQGEAAREQAFIIAERLRDTGLDVILHCSADGQTASFKSQMKRADASGAAFAVVLGEDEIANGTVGVKPLRDTNADGGKNEQHNVPAEDLTEFLINAMVATAEDGDD

SEQ ID NO: 49898 - protein, 584 aa, Burkholderia fungorum
MSVPTHGALRAPFTSLRFARILTVSAMLAAFTGGALAPTAALAKTPLPKAVFDASAVAVPDRYSADTAQQIFAAGGNAVDAAVAIAFTLAVTCPDAGNLGGGGFMTMFVDGKPYFLDYRERAPQQATRDMYLDDKGNLLPGMSAVGHRAVAVPGTVEGMWEAQRRFGKLKWKQVLAPAIRYATEGFQVEPWLQQRRDAAAKSFAGKTNFDAYFSGLKAGVTYRQPELAQTLSRIASDGGREFYEGRTADLIAQQMYGHGLVTKQDLIQYKAVWRQPLTADWNGYRVVTAPPPSSGGIGLIQMLKMKADLKQAFDGLDLNSVPYIHLIAQIEDRVFGDRQQYLADPDSFKVPVDKLIDDAYLAQRADEVKPDEVPGAAPVTPGLGDAAPEKAQTTHFSVVDKWGNAVSNTYTLNGDFGSGVVVDGGGFLLNDAMDDFVTKPAGASPSGAGSAEVNTVAPGRRPLSSMTPTILLKDDKVSLVIGTPGGSRILTSIFQVMTDLYDFNLPPADALAAMRFHHQLLPQKTIYFEPYRPITGELAEQLQAKGYTLEGQSFNGDVQMIRIEGATPEPAADPRGVGVARVMH

SEQ ID NO: 49899 - protein, 1172 aa, Burkholderia fungorum
MRLTSIKLAGFKSFVDPTHFQVPGQLVGVVGPNGCGKSNIIDAVRWVLGESRASELRGESMQDVIFNGSTARKPGSRASVELVFDNADGRAAGQWGQYAEIAVKRVLTRDGTSSYYINNLPARRRDIQDIFLGTGLGPRAYAIIGQGMIARLIEAKPEELRVFLEEAAGVSKYKERRRETENRLHDTRENLTRVEDIVRELGANLEKLEAQAVVATRYKELQADGEEKQRLLWLLRKNEAGGEQERQQRAIEQAQIDLEAHTAKLREVEAQLETLRVAHYSASDAMQGAQGALYEANSEVSRLEAEIKFIVESRNRVQAQIAALNAQREQWQSQAQKAQDDLADAEEQLAVAEEKATLVEDEAAAKHDAMPALEARWRDAQTELNAERGGIAQTEQALKLEAAHQRNADQQLQQLQARHERLKSEAGGLDAPDEAQLEDLRMQLAEHEEILHDAQTRLADAQETLPRLDGERRAAQERVQAESSQIHQLDARLAALKQLQENVQTEGKIQPWLEKHELNGLPRLWKKLHVEAGWEAALEAVLRERLAALEVSNLDWVKAFATDAPPAKLAFYAPPVAGQPAATPPALRPLLSLVRIDDAGIRAVLNDWLGLSFVADDLQQALAMRSQLPEGGSFVVKAGHVVTRVGVQLYAADSEQAGMLARQQEIENLARQVRAQALLADEAKAAAIRAEAAHTQAAQALTDVRQQAERATQRVHALQMDVLKLTQAHERYTQRSTQIREELAEITAQIEEQRAMRAESEANFERHDGELAELQARFEDHQLAFEALDEELTAARGQARDLDRAATDARFAARNMANRIDELKRSIQVAHEQSERVAASLEDARAELETINEQTAHTGLQDALDIRAVKEEALHAARLELDDLTAKLRAADETRLTAERALQPLRDRINELQLKEQAARLNGEQFIEQLAAAGVDEAQLQAKLTPDMKPSYLQGEVTRINNAITALGPVNMAALDELKAATERKSFLDAQSTDLNSAIETLEDAIRKIDAETRTLLQGTFDQVNQHFGELFPRLFGGGQAKLIMTGDEILDAGVQVMAQPPGKKNSTIHLLSGGEKALTATALVFAMFQLNPAPFCLLDEVDAPLDDANTERFANLVRAMSDKTQFLFISHNKIAMEMAQQLIGVTMQEQGVSRIVAVDMETAAGFAQNIV

SEQ ID NO: 49900 - protein, 1049 aa, Burkholderia fungorum
MLHKGRLSTKLKPHYVVEGSLMMPGKTASKVDGYLFQQGVVCALRTLAGAWFVMAVSVSPAQAACAPDGQGGITNSGGTCSVAPPVNRITATGSGTTTAPGVTLAVPYGIAVTASGGASVSLGRSDAGGAPAISALNGGGLTGLFATGVSSTITADSLAIGLPSGGGNAAARATAGGHITFLNSANITFVPGGGGGTGLLADGAGSQITGTNVTVAGAGGGGDYVAHSNNGGDIALTGGALSLNSPGGGGVAVLSENGSTFTGDGVAISVSASGGDAAVKSVGNSHVSLSGGSVTLNGTSGETGLLAQGATLTAVGVPVSVTASQSSAGTVQGGGTLAITGGSVTASGSGTVGMLVNGAAGAANTLALNDTTVTSTADSLHVVGANANITAAGSTITDNNGVLLSTTGSPSTTTFDAGASTLGGAITTGAGTTTTVTLHDDTDWTVTGNSTATNLTNSASNIHFTAPADPSQAASYKTLQVQNYTGADGNLHLNTFLGSDDAPSDKLIVSGGTATGTTNLTIHNTTGPGDMTVADGIQVVQTLNGGTTASDAFTLTGRLRAGAFDYLLFHGGIGGSRPNDWFLRSSFVVPESITPTVPLSPATPSSPPGEPGTPSSPPGEPGTPSSPPGQPGTPSSPPGQPGTPSSPPGQPGTPSSPPGQPGTPSSPPGQPGAPSSPPGQPETPSSPGQPGGQTTLDVSRPFPADPPASPLQPGVTYPVIGPELATYGVVQPVARQMGFTMLGTLHERIGDTLTADNAGPDSEGWGHSGWARFFGQQIDNRYQAFASPRATGQLLGVQAGVDVWRGSLMPGHRDVAGVYFAYGNSNLDVDGLVTNATATAYLLGRTGKLNLDAYSGGAYWTHYGPGGWYLDLVLQGTSYQGEATTQSARLPTTGDGFVTSLEAGYPVPLPLGPRFVLEPQIQVLWQRVSFDQENDGLGPVDLGSTTGTTGRLGLRGQWTIDGDHGQVWQPYGRVNLWHDWGGRATTLFGVDQVPLRDAATRLEFAAGVTAKATLRLSLYAQAGYQFAVGAGENSRRQGVQGNLGLRYTW

SEQ ID NO: 49901 - protein, 321 aa, Burkholderia fungorum
MIRHFQPARRRAIVAGAAFLAASILPVPAAFAQAAHKPKVALVMKSLANEFFLTMETGAKDYQKQNPAKFDLVTNGIKDETDTANQIRIVEQMIVSKVDALVIAPADSKALVPVLKKAVDAGIIVVNIDNKLDDEVLKSKSLNIPFVGPDNAKGAQKVGDYLAKHLKSGDNVGIIEGVTTTTNAQQRTAGFRQAMQSSGMKVVALQSGEWEIDKGNAVASQILNANPDVKALLCGNDNMAIGAVSAVRAAGKQGKVQVVGYDDINAIKPMLADGRVLATANQYAAKQAVFGIDTALKALSEHKKQSELSGVVETPVDLVTR

SEQ ID NO: 49902 - protein, 382 aa, Burkholderia fungorum
MNISALFIRRPVATALLAIAILISGALAYFRLPVAPLPNIAFPVIALQANMAGASPETMAATVAEPLERRLATIADVNQLTSISYVGSSMIIVVFGLNRDINGAARDVQAAIQAARADLPTTLRSNPTYRQYNPAGAPIMVLALTSDTLTKAQLYDSADSVIQQQLSQVDGVGQITLGGGALPSVRVELEPGKLNSYGIGLEDVRAAIGAANANSAKGHIDQGEQRYVVTSNDQISKAAPYRDVVIAYRDGAPVLLRDVAQVRDSNENIRNAGLYNGKSAVLVIVYPTPGSNVVQTVEQIRSRLPIIEAALPSAIHVNVAIDRSGVGARFGGRHRAHAVHRGAAGGGRGVRVPAVAARHADSGGRAAALDRRLVRTDVSARL

SEQ ID NO: 49903 - protein, 240 aa, Burkholderia fungorum
MRVGLFVTCLIDLMRPEIGFSVIKLIEAAGFEVVVPPAQTCCGQPAYNSGERRIARDLAEKTLREFEQFDYVVVPSGSCGGMIRAHYGDLFADDPELMNRFGRLRAKVFELTDFLVNVARVQLQPGEFAGEVTYHDSCSGLRELGVKAQPRALLAQIGVTVNEMKDCEHCCGFGGTFALKYGDISTAIVDEKCANISASGTGAVVLGDLGCMLNIEGRLRRTGDTTTRVLHIAQVLAGDV

SEQ ID NO: 49904 - protein, 139 aa, Burkholderia fungorum
MTTKRLLTEAEILKMSDKDYMNEDQLAFFKNKLEQLQADILRNAGQTTENLRETVIVPDPADRATIEEEHALELRTRDRERKLLKKVQQSIARIDSGEYGWCEETGEPIGIPRLLARPTATLSLEAQERRELRQKLFGD

SEQ ID NO: 49905 - protein, 1675 aa, Burkholderia fungorum
MTTAKPDLLSLASRFALLPDAQRKAFLTKLDAAGIDFRVLPIPPRAERTASVPASFAQTRLWLHARMIDEPAAYHITERLRLDGALDANALRLSCDALIARHEALRTTFTESADGVLQTVHAPSRCPWRASDVSALPADQREARAAEIARTDEAKSFDLSVGPLLRAHLIRLDATTHWLALTTHHIVSDGWSADVMLAELASFYRAYAKSEAVSLAPLPIQYADFALWQRRWLDAGERERQLAFWRERLDANRDVLMLPGAAPRPAQRSARGARHRFVLDAALVQQVKTLANAQRATPFAVLLAALSALLARSSGDTQIQIGVPAANRERGEVGGLVGFFVNTLTLATPVPPAQPFAALVGATQQTLIDAQSHQDVPFEQVVEALGVVRSASHHPLFQVMAAYGARRRLPSLAEVRMTELPSGAPFAKFDLTLSFEERDDGSIDAYFIYPLDLFDADAIARLAARFSELLSNATATPGAAVGDLQWLPESERAQLDAWNSTKLPRDTAFRPVHQRVADHARAQPEARGVADVNRALTRGEVDAQATRLAQRLVAAGVSAEMRVGVALSRSVDLLVGLIAALKSGGAFVPLDPSHPRERLAQILDDAQITHVITERASLAALPQSDRLRLWLVDEEPQPEEHSAANIALPSVSPHQAAYVIYTSGSTGKPKGVVVDHGSFALHCAAIAERYGAGERDVFLLFQSVNFDGAHEGWFSQYMSGAAVAITADTLWPPAQTCRMMVREGVTMTYVPPGCATQLAEWALAHGAPPSLRSLTVGGEATSREAFALMRRAFPEARIVNGYGPTETVITPMLWMFYPTDSTAKLADSAYLPIGTLVGARSAHVLDARLNPLPVGVIGELYLGGEGVGVARGYLDRPALTAERFVPDPFGASGARLYRTGDLVKRRADGVFDFIGRVDHQVKLRGLRIELGEIEAQLAAHDDVREAVAVVHGKGTHAVLVAYVELSAEARERSTRADAAELDAHLRHTLPDYMVPAHIVVLDALPRNANSKVDRAALPEPQRVERAYQEPAAGLETALAQIFREVLDVERVGRADHFFELGGHSLAAVRVATRVAERLAREVPVRTLFEAPTLAQYAQRVMASARSETVADMGDEPSNSVSSHSRIAPDANGVLPLSSAQLSLWFLWRSQPESAAYNIPVALRLRGPLDVVALREAFAQAAARHPALRVRLVERDGQLPGQRVAGPGPVELPVVDLSGDPLRTERERAAIALTDQDALTPFRLLDDAPLWRVRLLRVAEQDHVLSLVVHHIVSDGQSIDLWLEDVRTTYVAIVHGASPAAFATVAPSHQELVLPVAAPRARLSFWRDALADAPSQVLPSPPSGRAASPGWSAGRHAFEFNPALVRRARSLALEVHATLPMLLHAALNVAFYRATGATDQPVGVLASTRELTGEAARRALGLFINAVVVRTRLARTDTPVTLLAEVRDAALAAYAHADTPFADVVAALRATRTEAGNPLFSVMFNYLRPAGTAQRDWAGLTLDDFNDVRHRVVFELELDVVEHADGRITGAFSYANELVDGVFVEALSDDYLNVVQQFVDAPHEQLGVASARFPLEPGSAATNARRNPTSHDEATQRAQALERIWSALFEGNTPAHHDDLFEAGASSFDVVRFVDAAQATGHALEIADVFAAPTFAQLGARLVARASNVAELRDGA

SEQ ID NO: 49906 - protein, 340 aa, Burkholderia fungorum
MKAVGLYRYLPIDQAEALVDVDIPKPEASGRDLLVKVEAISVNPVDTKVRAPKDTVEKSPRILGWDVAGTVAAVGPEVTLFKVGDPVFYAGSITRPGANSEFHLVDERIVGRKPASLDFTHAAALPLTAITAWEALFDRLGVSPQGADEGRTVLIIGGAGGVGSIGIQLAKQLAKLKVIATASRPASAKWATELGADHIVDHFGDMPAQLKKLGIDEVDYVLMFNDTDRNFPAAAEVIKPQGGICTIVENSQPVPVELLKAKSAAFHWEFMFTRSMFGTPDMIEQHKLLTEVARLVDSGTLRTTVGQDLGTINAANLRRAHQLLEEGRAIGKLVLTGFEA

SEQ ID NO: 49907 - protein, 292 aa, Burkholderia fungorum
MASRSLLFIPGDSEKKLAKGESTAADALILDLEDSVSASRLQMARGLVHEYLAARRKDRRQKLWVRINPLSSPLALQDLAQVIPGRPDGIMLPKLKSAKEVVTLDNYLSAFEAASGQEPGQTQIIPVATETAASIFRLGEYSGISSRIAGLTWGAEDLATALGARENRQPDGTYDLTYQLARSLCLLGSAAASVPAIDTITADFRNESLLRSECDDARRAGFKAKMAIHPDQVPVINELFLPGEAEVVQARRIIEAFEQADGAGTVQLDGSMLDMPHLKRARDVIGMVNGLS

SEQ ID NO: 49908 - protein, 156 aa, Burkholderia fungorum
MFNVVLVEPEIPPNTGNVIRLCANTGARLHLIEPLGFPLDDARMRRAGLDYHEYAQMNVHADWAAFIAKESPDPARMFAFTTRGSGRFHERAFQSGDWFVFGAETRGLPDPVLGQFADEQRVRLPMRPGNRSLNLSNTVAVVVFEAWRQTGFEGGA

SEQ ID NO: 49909 - protein, 713 aa, Burkholderia fungorum
MASLARVIHDFQNGELSRDEFVAQLDSTLTTEGLGPTQLLDMLGAAHRKAPLPDDLYVEVRRRIEQLRVSNVAAGGEETGIQTTLDIPSRREASAGSAPNANAAGSDQIKGTGDTLNNRFVLEECLGVGGMGTVYKALDLRKLEASDRKPYLAIKVLNVQFRGNPNSLVALQREARKAQVLAHRNIITVYDFDRDGPIVYLTMEYLSGKPLSQLLRTPGYQGMPVRAALPIVRGMSSALAYAHERGFVHCDFKPANVFLTTNAEVKVIDFGIARVFQRPEEESDATVFDPGSLGALTPAYASPEMIEHREPDPRDDIYALGCITYELLTGHHPFDRLSATQARNADFKPQRPANLDAKQWRALRAALSFDRNTRMPSVERFIAEFDNEARAEKSGTLAKVGLASFAVVCAAAVGVFAFRSAPNRQHGPQAEAGASQSLAEQAASSSSSLSSSGDAVSAPVAAQPATPPASPVAAASAMPPAPPPVPKPALTLAAVMPALMQVPCSALAASVQDHSLTVRGYVSQRYGAAHLKDTLAALPGVDTLTLAVEPLADDKCDTIKTLAPYWVDNMQAGHVAALHVRPPGGQLSDGDPLVVDVATPGYDSYVNLDYYQLDGSVVHMVPSPRAKDNQAPPHYTATIGSAGDWIISKPFGSEMVVLLITPAPLFDKPRPESESRADYLHALDTRLAQIGSKYGRDHIVADFAPITTKPRLP

SEQ ID NO: 49910 - protein, 366 aa, Burkholderia fungorum
MSQPASQPTSPQASPQATRHPGPIPATLRVMSAKRAAAIWLALAVIALAVLMASLALGSVSLAPLRVLAALVPAHGPSAGSSDLTAEIVRTLRLPRAVAGFACGALLALAGALLQVLLRNPLAEPYVLGVSGGAASFALVAMIAGCAWWMVDASAFAGAFASILLVLGLARRELWRGEPQDTSPRLLLTGAVIAAGWGALITLLLNLAPDNRLRGMLFWLTGDLNGGAMPWTALAALVVALAAIVPAAPRLNVLLRGDAAAQALGVAVMPLRLRVYLVASLAAAAAVTTAGTIGFVGLVVPHMLRLAFGNDQRMLLPAAALGGGVAVMGADLIARTVIAPAQLPVGVITSIIGVPVFLWMLLRRRR

SEQ ID NO: 49911 - protein, 269 aa, Burkholderia fungorum
MPKFAANLTMLFNEVPFLDRFAAAADAGFHAVEFLFPYPYQIVELSERLQQNRLKLVLHNLPAGNWEAGERGIACLPDRVGEFQEGVGRAIEYASALKVPQLNCLVGIPTAGVDADKARSTIVENLRFAAGELQKAGIRLLVEPCNSYDIPGFALNRSAEGLDVIRAVGSDNLFLQYDIYHMQRMEGELAATITKNLPRIAHIQLADNPGRNEPGTGEINYPFLFELLDSLGYDGYVGCEYKPRTTTAAGLGWIQSVAGQTRGAAHAAA

SEQ ID NO: 49912 - protein, 1084 aa, Burkholderia fungorum
MPKRTDIKSILIIGAGPIIIGQACEFDYSGAQACKALREEGYKVILVNSNPATIMTDPNTADVTYIEPITWEVVERIIAKERPDAILPTMGGQTALNCALDLHAHGVLEKYKVELIGASPEAIDKAEDRQKFKDAMTRIGLGSAKSGTAHSMEEALAVQADIASQTGSGGYPVVIRPSFTLGGSGGGIAYNRDEFEEICKRGLDLSPTRELLIEESLLGWKEYEMEVVRDKKDNCIIVCSIENLDPMGIHTGDSITVAPAQTLTDKEYQVLRNASLAVLREIGVDTGGSNVQFSINPKDGRMIVIEMNPRVSRSSALASKATGFPIAKVAAKLAVGYTLDELKNEITGGQTPASFEPTIDYVVTKIPRFAFEKFREADSRLTTQMKSVGEVMAIGRTFQESFQKALRGLEVGVDGLDEKTDNRDEIIREIGEAGPDRIWYVGDAFRVGMTAEEIFEETSIDPWFLAQIEQIILKEKALAGRTLASLSKEELKYLKQSGFSDRRLAKLLGAKPAQVRQRRIELNVRPVYKRVDTCAAEFATKTAYMYSTYEEECEANPTNNKKIMVLGGGPNRIGQGIEFDYCCVHAALAMREDGYETIMVNCNPETVSTDYDTSDRLYFESLTLEDVLEIVDKEKPVGVIVQYGGQTPLKLALDLEANGVPIVGTSPDMIDAAEDRERFQKLLQDLGLRQPPNRTARAEDEALKLADEIGYPLVVRPSYVLGGRAMEIVHEPRDLERYMREAVKVSNDSPVLLDRFLNDAIECDVDCISDGEAVFIGGVMEHIEQAGVHSGDSACSLPPYSLSKETVAELKRQTGAMAKALNVIGLMNVQFAIQQVPQADGSKEDVIYVLEVNPRASRTVPYVSKATSLPLAKIAARAMVGQTLAQQGVTKEIDPPYFSVKEAVFPFVKFPAVDPVLGPEMRSTGEVMGVGQTFGEALFKSQLAAGSRLPESGTVLLTVMDADKPKAVEVARMLHELGYPLVATKGTAAAIEAAGVPVKVVNKVKDGRPHIVDMIKNGEIALVFTTVDETRAAIADSRSIRMSAQANKVTYYTTMSGARAAVEGLRYLKDLEVYDLQGLHARLN

SEQ ID NO: 49913 - protein, 506 aa, Burkholderia fungorum
MDNTVTAAAAAPAADAAKRGKYLSVTAIGLMTAAAVVTSLRGLPLLAKEEMTMFVYLAFTVVFYLIPASLISAELGGAFADRPGGIYTWVAEAFGTRWGFLAIWLQWIQNVVWYPVALTFGAAALAYTIGRPELAKNGVYVGIFCIVAYWLATWVVLQGVEVFARIANWTFVIGTIVPGLVLLALLGYWISSGHPLGWQHLNDAALSQDGHARFWPAIHGFGTISFLAGIMLLFAGVEVQAVHVIDMRSPSRGYPAAIGLGALISVLIFALGALPIAAILPYEKISLQSGVFDAFSAVLVDIWHMNWAVSALSLLVGVGAISGVLAWLGSPSRGLLETAHEGELPPILQAKNRKGMPTHILLVQGLIVTVISCFYFVIRDVSVAFFLISAMTIALYLIAYMLMYAAAIRLRYSAPALPRPFTVPGGFAGMWLTAGIGFAGVLFSFVVSFFPPDQLPVGSPWLYTGLVVIGIVVFAGIPLIIHHVRRSDWASVHDTPRVPPAVIPVE

SEQ ID NO: 49914 - protein, 313 aa, Burkholderia fungorum
MAAQRAQSERGLPAEATMTYRGRFAPSPTGPLHFGSLVSALASWLDARAHRGAWLVRIEDIDRPRTVPGAAEDILATLERFGMRADEPPVWQSTRLARYEQALEQLKAAGLIYPCGCTRKEIADSLLHAHARNTTLAYPGTCRAGLHGKPARAWRLRVPDGDAAIITFEDRWQGRQTQNLATEVGDFVLKRADDQWAYQLAVVVDDADAGITHIVRGADLMDSTARQIYLQRCLGVPTPEYLHVPVVTNDHGEKLSKQNGATALDKDKPLEALSAAARHLGLDLQSAAAHTTLAGFYAAATVAWAKRMGLAAD

SEQ ID NO: 49915 - protein, 874 aa, Burkholderia fungorum
MKAAEIREKFLKFFESKGHTIVRSSSLVPGNDPTLLFTNSGMVQFKDVFLGAESRPYSRATTAQRSVRAGGKHNDLENVGYTARHHTFFEMLGNFSFGDYFKRDAIHYAWELLTGVYQLPKDKLWVTVYHEDDEAHDIWAKEVGVPVERIIRIGDNKGARYASDNFWQMADTGPCGPCSEIFYDHGPDVWGGPPGSPEEDGDRYIEIWNLVFMQFNRDAQGNMTPLPKQCVDTGMGLERIAAVLQHVHSNYEIDLFQALIKAAARETGVSDLTNNSLKVIADHIRACSFLIVDGVIPGNEGRGYVLRRIVRRAIRHGYKLGKKGSFFHRMVADLVAQMGAAYPELKEAEQRVTDVLRQEEERFFETIEHGMSILEGALAELEAGSSKTLDGELAFKLHDTYGFPLDLTADVCREREVTVDEAAFDEAMTRQREQARAAGKFKMAQGLEYSGEKTTFHGYDEVVFDDAKVIALYVEGASVQQASQGQQAVVVLDHTPFYAESGGQVGDQGVLANASVRFAVSDTLKVQADVVGHHGTLEQGTLKVGDVVKAEIDAVRRARTARNHSATHLMHKALREVLGTHVQQKGSLVDADKTRFDFAHNAPLTDEQIRRVEEIVNAEVLANAPGIVRVMSFDEAVKGGAMALFGEKYGDEVRVLDLGFSRELCGGTHVHRTGDIGLFKIVMEGGVAAGIRRVEAITGDNAVRFVQDLDARINAAAAVLKAQPSELTQRIVQVQDQVKSLEKELSALKSKMASSQGDELAGQAIEVGGVHVLAATLEGADVKTLRETVDKLKDKLKSAAIVLASVEGGKVSLIAGVTADASRKVKAGELVNFVAQQVGGKGGGRPDMAQAGGTEPANLPAALAGVKGWVESQL

SEQ ID NO: 49916 - protein, 327 aa, Burkholderia fungorum
MSVSTELSKDELLKAYRMMRTIREFEERLHVEFATGEIPGFVHLYAGEEASAVGTMLHLNDADYVATTHRGHGHCIAKGVDVRGMMAEIYGRKTGVCHGKGGSMHIADLSKGMLGANGIVGAGGPLICGAALAAKYKKSGGVGVCFFGDGASNQGVIFESMNLASVWRLPAIFVAENNGYAEATSSTWSVATDNIADRASGFGMPGVIVDGFDFFAVHEALGEAIERARHGGGPTLVEVKFSRYFGHFEGDAQTYRAPGEVQKLRDEKDCLKRFEERVVRAGMLSADQLRGVDAEVKTLIDTAVTEAKAAPLPTAEDLLSDVYVSYP

SEQ ID NO: 49917 - protein, 783 aa, Burkholderia fungorum
MPDLLANLNPEQHAAVTLPNEPALILAGAGSGKTRVLITRIAWLIQHGLASPATILAVTFTNKAAREMMSRLSALLPIDTRGMWIGTFHGLCNRMLRAHHRDAGLPATFQILDTADQLSAIKRLMKGLNIDDEKYPAKNLQYFINNAKEQGLRPKDVDATDNFNRKFVELYEAYDQQCQREGVVDFPELLLRCYELLAHNPPLRAHYQARFRHILVDEFQDTNKLQYAWLKLLAGEANSIFAVGDDDQSIYAFRGANVGNMRDFEHEFNVRHLIKLEQNYRSHGHILDAANQLIANNSRRLGKNLRTDAGHGEPVRVYESATDSQEAGWIVEEIKALISTGTSRSEIAILYRSNAQSRTIEHTLVNAGIAYRVYGGLRFFERQEVKHALAYLRLIDNPNDDTAFARVVNFPTRGIGARSIEQLADAARQYNCSMAAAIPYVAGKAGSSLAGFANLIGKMRAETQQMSLPETVEYVVRASGLSEFYQNEREGQDRLENLQELVNAAAAFVSEEGYGMDTPARSIPLRPGATAAPELAVATDDPNTIVFDAPGIADPAQNPDTMTPLAGFLSHASLEAGDNQAQAGQEAVQLMTVHAAKGLEFTAVFITGLEEGLFPHENSAMESDGLEEERRLMYVAITRAKERLYLSFAQSRMLHGQTRYNIRSRFFDELPQETLKWLTPKIEPGARWGGRSDNAGYGRDWFARPGYTGAASSTPAPLPAFANEQRAAETGFRVGQQVFHTKFGEGTITALEGGGTDAKAQVKFKRHGEKWLALAVAKLQAVE

SEQ ID NO: 49918 - protein, 204 aa, Burkholderia fungorum
MFTGIVAAVGRIESVKPLGTNGDAGVRLNVEAGGLDLGDVQLGDSITIQGACMTVVARTDHSFEVDVSRESLNCTAGLGEIGEVNLEKALRAHDRLGGHIVSGHVDGLGTVTHFAPVGESHELRVLAPREIGRYLAYKGSITVNGVSLTVNSVKDRDDGCEFSINLIPHTVEVTSLKHLREGTRVNLEIDLIARYVERMLNAPK

SEQ ID NO: 49919 - protein, 306 aa, Burkholderia fungorum
MKIKVLGSSAGGGFPQWNCNCRNCDGVRRGTIKATRRTQSSIAVSANGEDWLLVNASPDLLAQIAANPELQPARRARDSGIAAVLVIDAQIDHVTGLLMLRERDTPLPLYATNAVWQDLCSGFPVAPILSHYCGVEHRRIALDGAPLAIDALGGVQIDALPLSSKAPPYSPHRNAPERGDNIGLVITNRQTGKRVFYAPGLGAIEAHVLAAMREADLLLVDGTLWTADEMIRLELSKKTAADMGHLQQSGPGGMIEVLDSLGAHNARKVLIHINNTNPILVEDGPERRILTEHGIEVAYDGMTFEI

SEQ ID NO: 49920 - protein, 370 aa, Burkholderia fungorum
MAFTLEDIVQRFGGEVVGNGSQRVGSLAPLDQAGPDQLAFLANPKYLSQVETTRAGAVLINAEDLARLASRESRNFIVTPNPYAYFARVAQTFIDLAAPKAVPGVHPSATIDPSAQIAASAVIGPHVTVEAGAVIGENVRLDANVVIGRGTRIGADSHLYPNVAVYYGCKLGERVIVHAGAVIGSDGFGFAPDFVGEGDARTGSWVKIPQVGGVSIAADVEIGANTTIDRGAMADTIIEECVKIDNLVQIGHNCKVGAYTVIAGCAGIAGSTTIGRHCMIGGAVGIAGHVTLADYVIVTAKSGVSKSLLKPGMYTSAFPAVNHADWNKSAALLRNIDKLRDRIKALENAAAGRQDGPAANAASSSAGDKA

SEQ ID NO: 49921 - protein, 286 aa, Burkholderia fungorum
MTHQDPAARQASISEEMHIGATFDAEYEIERRVTFLVSYLRGSGLKTYVLGISGGVDSTTAGRLAQLAVEQLRAEHYEAQFVAIRLPYGEQKDEADAQQALRFIRADQNLAIDIKPAADAMLAALDRSGVLFNDESHQDFVHGNIKARQRMIAQYAVAGARAGVVIGTDHAAESVMGFFTKFGDGGADVLPLAGLNKRRVRAVAKALGAPEELAHKVPTADLEMLRPQRPDEDAYGIPYDAIDDFLEGKAVSDAARATILRYYDVTRHKRALPYTPFDWPMQASED

SEQ ID NO: 49922 - protein, 302 aa, Burkholderia fungorum
MLRAGLSELTAFVAIAHQRSFSAAARTLGVSPSALSHAMRGLEARLDVRLFNRTTRSVALTEAGEQLLRRVGPAIADLEDAVNEAASARNRPSGSIRISASESAARPLVQHVLPGFLATYPDIHVEFVVDTRLVDIVADGFDAGIRVLQDVPRDMIATRFGPDMRFIAVASPDYVARNGKPKAPHDLARHRCIRFRFESGALYRWDLEYRGKGASVDVDGPMTLGNLNLMVEAALAGIGIAWVSDQLAAEYLASGRLVQLLAEWSPSFPGLCLYYPANRHPPTALRLFAQSVREWAKGEARD

SEQ ID NO: 49923 - protein, 177 aa, Burkholderia fungorum
MRGVRRLFWRKLLRLNDVHPTVLFGGYGDISRDFHAGEYVYVGPGCRINPGVRVGSYSLLGPNVQIVGNDHVFDLPGVPIIFSGRPAFRPTQIGKDVWIGAGATILCGTTIGDGAVIASGAVVTRDIEPFTVVGGVPARLIRRRFPILRDELIHRKMLEAPAVPGGYCAPMAARQEA

SEQ ID NO: 49924 - protein, 3241 aa, Burkholderia fungorum
MPMTSFPIALHQQIRAMARIDPDAPALASFTPSTVRLTRGELDSRAARLAARLRAAGVTTEVRVGVCVARSCDLFVALLAVLKAGGVFVALDPRHPPARLDWIARDAGLMHGIVDDSADAAMRARFRECFHVESAATTDAAAPCFDDEDTPVHPRAAAYMIYTSGSTGTPKAVAVEHGPLAAHGEALAGSLPIAAADRVLHFASVNFDVSIEAWLVPLAVGGSVVISDPPPFAPETTHAFMLREGITNTTLPPAYVREFANVCERLGVPPSLRTLLFGGEAMSQDSFDEIRRVFPSVRLVNGYGPTEAVISPMLWPVDPGMTPALEEGNGFASLPIGWPIGRRVARIDGAAQQGEAGELLLGGVCLARGYHGRAALTAERFLPDPTGEPGERIYRTGDLARERADGSFDYLGRIDDQVQVRGVRVEPGEIAACLLTHPAVADAGVLAEAAGGRTQLIACVVPQDALEPDDAALQAHLAAHLPQAWMPHRFVRFERLPYTLNGKLDRTALRDFVATLPAVIDSNHVAPRTLTETRLAALWQKLLNDPAPIGCNDRFFARGGDSLAAMQLQAAIRIEWRVNLRLDTLFDDQPLEALARVIDASETETSAGSHSITVVRTADAPFVDRAASFAQQRFWVLAQTQDAGAAYHVAVQWDVQGTLEIGTLQRALDCLIARHQAWRTTLVESDDGIVVQRIHARLPVPIAQIDLRACCEDERASRLAALTEQQVGAAFDLSQGPLVRAALVTLTDDTQRCLLTTHHSVSDGWSSRCAFDELRTAYAAFAMGHEPQLPALTVQYADYAQWQRDWLAAGEGERQLAYWRDALRDAPEALALPLDRPRSLEHDYRGGRLALRLPVALSEAVRETARRAQASPFTVLLAAFDAWLYRLTGATDVVVAAPIAHRQRAETTPLVGLFLNTLALRARVAPDQSFAALLDGVRRSTFDAFAHQDVPFDQVLDAVKPPVRRGDAWLKVKFAQQFDLELTAELPGASVRMSPGLDLAARFDYALDFTDDPRGIELVAAYALDGIDEATAHAWLHSYAALVADAVRDPQRAVTELDCADSAEYRSARRGREFQPMADNVLARFARHARETPHRVALADADTQLTYGELDAASDRIALALRRRGAGAAVAVGAEQPVAVCIERSVRFAVALIGVMKSGAYVVPLDPAAPHERLAASIDACGARWILTADQAQPLVTAGGATSIDLDTLTQEPSSANAEDLDAAASRTSPLADQAAYLIFTSGSTGTPKGVISSHAALADYVEGMLDELAFAPDASMAMVSTVAADLGHTTLFGALCSGRTLHLLPAQCAFDPDRFAHEMRMRNVGILKIVPSHLHALLDAQYPADVLPAHALVTGGETLPWSLVERIAALKPACRVINHYGPTEATVGALTCDTSAPAQAALRALSMRTAYAVPLGMPLPNAYACVLDSYGASVPPGAIGELYLGGPGLARGYLNRAAATAERFVPHPFAAGERLYRTGDRVRLRADRRLDFLGRLDDQVKIRGYRVEPGEVSAALRAFDGIAQAETLAVEHEGRLRLASFVTLSSGARFDEAALRAALSARLPDYMVPAVLQHVAALPVTANGKVDRAALRALAVAPAATTAAGDAPQGATEEALAAVWKDVLKAERVGRDDNFFELGGDSILVLQVIARSRKRGVRFTPKQLFDAPTLAQLARVATTVDLAAPAAEGAAKAHAAPSPIEQAVTLTPAQLRFFALDIPQRGHWNQSIELDTQAPFDFDAFARAFETLLTHHEIFRQRFAPLGSQGEWRLTLAARAFETLPLAALSARDEADALAQFDALQSTLDLTHGPLVCALAALLPDGATKLYLAIHHVIVDGVSWRVLLDDLDAAYRAACERRSVRLAPTGTSAQEWAARLARAALDIANSPFAAEIPYWTALAAPYDDLPLDRPQARATNADAQSVIQTIGADLTRAALTEANAAYRTQMIELLIAALAQSLGLPVCRLELEGHGREALFDDVDVSRTPGWLTSHYPVQFALESTPAATLGAVKDTLRGVPNKGLGFGVLRHYGDTATRAALAAVPRPHVTFNYLGQFDAPREAALVPRFGGAGRERDPAGPLGNALAIHAYIDGDATRTLKVHWVYGATQFERATVEAIAQRFESALAELIAACTERLAQHGGGATPGDYPLARAGGLTQAALDRLPLDLRTVDDIYPLSPMQHGILFHSLFAPEQSTYVNQLVATLIEPDVERLRAAFEAAMPRHDILRTSFTPQEATPMQIVHRQARMPVEVLDWRERGADANDAFETWLNADRARGFDLTSPPLMRVALIRITDDTWRLVWTRHHLLLDGWSTARFFADVLRDYIEPPRPQPFAAPAKTRYRDFIAWLAARDAESERAFFLQRLALLDEPTLVAERTPVNRGREPRHLTRRETIGAATTARLTDAARRLKVTLNTMVQGAWALALQRMTHHTAIAFGATVAGRPDSLPDVDTVLGLFINTLPVITAPLPQRRASAWLHDLQRDNAAAAEHAHTPLYEIQQWAGQGGGALFDTLVVFENYPVDEAWQGRDERALKLRELRNIEATDFALTLVIEAGTTLTIDYGYDAARLDESRIAALHRAFETCLVALIANPDAPLGTISIASADDLTKLARFNSTAQTWPPAQQQALHRQFELRAQASPEAIALEFADEQARTRQMTYGELDANADRVAAALIEAGVRADTAVALCVERSFDMVVALIGVLKAGAAYLPVDPDYPADRIAYLLNDAKPAVVLTQPHLLERVTQAVDSANVKILTIDALRGADFTLSAPVAVAPDQLAYLIYTSGSTGKPKGAGNTHRALANRIAWMQDAYRLDASDVVLHKTPFGFDVSVWEFVWPLAVGAKLAIAAPGDHRDPARLVASVETHRVTTLHFVPSMLAAFVAHLEDFHAAARCASIERIVASGEALAPELVARVAQQLPHARLYNLYGPTEAAIDVSHWTCDARDAGAASVPIGHPIANLQLHVLDAALQPLPQGAIGELYLGGAGLARGYLGRAALTAERFIPDPFAHGARLYRTGDLACRRADGALDYLGRMDTQVKLRGQRIELGEIEALLRAAPGVHDAVVIVRDEQLIGYVARGADNALDTQTLLNGLHAQLPSYMVPSHLIQMDVLPVTPNGKCDRHALPAPVRGGADEQAVALPATGTERELAAIWKRVLRVDTIGRDDDFFALGGHSLLATQANAQANLHWTLILPLRTLFDERTLQRCAAAIDRALAGRDAHGAGDTASAIDALLDEFELQ

SEQ ID NO: 49925 - protein, 137 aa, Burkholderia fungorum
MAYSDKVLDHYENPRNVGSFAKDDDAVGTGMVGAPACGDVMKLQIRVGADGIIEDAKFKTYGCGSAIASSSLVTEWVKGKTLDQAMSIKNTQIAEELALPPVKIHCSILAEDAIKAAVADYKQRHGEAVVADEKQHA

SEQ ID NO: 49926 - protein, 626 aa, Burkholderia fungorum
MSAVPPILGLHHFAWRCRNAEETRHFYEDILGLPLVHLIRLDRVPSTGEYCPYVHLFFEMADGANIAFFDLGDDTAAEPSPNTPPWVNHIALRLATLEQLEAMKQRLVEHGVDVLGVTDHHFVRSIYFFDPNGFRLELTVPVAPAETLECYKMQARPAPGCVGRRAKKSCIGDTRRMTALNFTHDPVRRSWIESANLPDADFPIQNLPFGAFERNGEARTGVAIGEHVVDLRALRDSGLVEAGSDAALACEAASGATLNRLMAMGPRYSGALRAALSELLKSDAPQRANVQRQAEALLPRIDEIALRLPCEVGDYSDFLTSLHHTERHGRYKGLADPLPPAFKSLPIAYHGRASSLRASGGEVRRPHGQYRDASGQIVFGPAPALDFELELAAWIGHGNAFTQPIPIDAAHEHIFGYSLLNDWSAKSIQWFEQVLGPFLGKSFHSSVSPWIVTAEALAPFRKAPVPRAQDDPPLMPHLRGAFDQQQGGLHLALYADLSTSRLRDAGAGPVRITRTHLDNLYWTFAQMVAHHTSNGCDLRTGDLLGSGTISGADDAARACITELTNAGKDPLRLPNGETRTALEDGDEIVLSARATKSGAVSIGFGECRGRIAPALAVAGRREEIAA

SEQ ID NO: 49927 - protein, 290 aa, Burkholderia fungorum
MSWLDKLLPPKIKQTDPKNRKGIPEGLWIKCPSCEAVLYRNDVEANLHVCPKCDHHMRIGARERLDGLLDPEGRYEIGQEIVPVDALKFKDSRKYPDRLKEAMDDTDETDAMVVMGGAIHTLPVVVACFEFSFMGGSMGSVVGERFVRGAQNALEQKVPFICFTASGGARMQESLLSLMQMAKTTAMLTKLAEARLPFISVLTDPTMGGVSASFAFLGDVVIAEPKALIGFAGPRVIEQTVREKLPEGFQRAEFLLTKGAIDMIVDRRKLREEIAQLMALLSHQPADAVA

SEQ ID NO: 49928 - protein, 1613 aa, Burkholderia fungorum
MQAKNEEAVTHLLNDVVEFARGRLPEPTFKVVEPFLRHYYDFVDADDLQSRSIADLYGAALAHWQTAQRFVAGAERLRVYNPILEQHGWHSDHTVIEIVNDDMPFLVDSVSMAVNRHGLALHSVVHPVFRIWRAPDSTIARVSQGAEEATDTRSHLTSFIHFEVDRCGDAAKLDALRDDIARVLRDVRAAVEDWPKIVELARGTIKGMKAGEAGPEGLEARAFLEWMVADHFTFLGQRDYELVQHDAGYGLRAVPGSGLGILRDALRPVGAAEVTPLPPAAVEIVSASSPIFLTKANSRATVHRPGYLDYVGIKLTDADGKVTGERRFIGLYTSTAYFVSASEIPIVRRKCANIVRRAGFLAKGHLAKSLVTVLETYPRDELFQAEEDQLYDIALGVLRLQEHQRTRLFVRRDRFDRFVSCLVFVPRDKYNTDLRQRIANLLADAFNGESVEFTPLLSESTLARIHFVVHAKPGGMPNVDTRELEARLVQVARRWQDDLADALLDAFGEEQGNRLLQHYADSFPAGYRDDYPARTAVRDIELIERVQGSERLAMNLYRPIESGPRAFRFKVYRAGLPIALSRSLPMLEHLGVRVDEERPYLIEALGATPAWIHDFGLELADDAEFDIERVKDLFEEAFEQVWTGAIESDDFNRLVLRAQLDAREVTILRAYAKYLRQVGSTFSDAYIERAVTGNPAIARMLVELFVARFDPVLGETREARVDGWLRTIDSALDQVPNLDEDRILRQFLGVIKATQRTNYYRFDAEGHPKPYLSFKFNPALVPGLPEPKPMFEIWVYSPRVEGVHLRGGRVARGGLRWSDRREDFRTEVLGLMKAQMVKNVVIVPVGSKGGFVVKNPPPQTERDAWMREGIACYQTFLRGLLDLTDNLAGTAVVPPPDVVRHDPDDPYLVVAADKGTATFSDYANAISQEYGFWLDDAFASGGSVGYDHKKMAITARGAWESVKRHFREMGVDTQTTDFTVVGVGDMSGDVFGNGMLLSPHIRLVAAFDHRHIFLDPNPDPAVSLAERGRLFVLDRSSWADYDPSLISAGGGVFPRSAKTIPLSQAVQSVLGISAPALAPAELMRAILQAPVDLLYNGGIGTYVKASRETHLQVGDRANDAIRVNGADLRCKVVAEGGNLGLTQLGRIEFAQRGGRINTDAIDNSAGVDCSDHEVNIKILLGLVVAEGEMTEKQRNALLAEMTDEVGLLVLQDNYYQTQALSIAGRYGVELLDAEARLMRYLERTGRLNRVIEFLPTDEEVAERQAAKQGLTTPERAVLLAYSKMWLYDALLESSMPEDPLVADMLVEYFPKPLRQRFSAPMQRHPLRREILATHLTNALVNRVGCEFVHRLMEETDAQPGDIVRACIMARDVFDLDHVWRSIDALDNRVADDVQARMFVEVARLVERSALWFLRQLQSGAVSDGEVAGLLARCRDAAQRLASQWPALLPGADLEALSERQRVFADAGVDSELAVRVASGEISAALLDIAEVASTCGRSLELVAGVYFALGTLLNSSWISERATALPVPTHWDMLARATALAELARLKRALTTSALAGANEASTPDALVEAWRQKRTAQLERYGRLLTDLRATGGASLSMLLVIVREMAALERA

SEQ ID NO: 49929 - protein, 255 aa, Burkholderia fungorum
MQPCSHAKAAEVQASGSLAKLAALEAELEQARAALAAEREAAAARADQMSVHLNDLQRVTQELEETRQQIATMNEAKAAASADLARVSQDASAAKERAEAAEQQVVQLEQRLAAQAAAIAQQNQRAQQASVRADEAERAEEVAALQRQIAAQARANAKALSELRATAEQWVAHAKDLKQRLGLASERILFIDARSTGEVALVRRLSSELERLKPDHELIARETQQKLIGATMSHQLAQKGYRYDPATAVMSKVTA

SEQ ID NO: 49930 - protein, 138 aa, Burkholderia fungorum
MTRIDFHSNVGDSLLYACRLIRKAYQAGQPTIVLAEPARLKAFDEQLWTFSPLDFVPHCMAGTPLAAQTPIVLASTLEDVPHHQVLLNLGATVPAQFARFERLLEVVGNAHEELAAGRERYRFYRDRGYALNNYKQGS

SEQ ID NO: 49931 - protein, 425 aa, Burkholderia fungorum
MQGSVAVTQGAPFWKRILQFAGPGLLVSIGYMDPGNWATDIEAGSRYGYSLLFVVMLSSLAAMALQCLSMRLGIATGRDLAELSRTRYSPAVARFQWLLAELSIVACDLAEVLGGALAFHLLFKCSLTTGVLLTAFDTLIVLGLKGKNFRDLEAIMLGLIATIGVGYIIELALVQPHWPSVAQGLIPSWQALSSREPMYLAIGILGATVMPHNLYLHSSIVQTRAVKRDPASIRSAIGMSRIDTIVSLVLALLINMAILILAAAAFHATGHNQVTEIEDAYKLLAPIVGTGFAAVLFAVTLLASGQSSTFTGTVAGQVIMEGFLKLKIPCWQRRFITRALALIPALIGVQMMGNGAVGKLLVASQVVLSLQLPFALYPLIRMTNDRSLMGEFANTLLTRCVAWTLFVVISAANLWLVVQTAGLAG

SEQ ID NO: 49932 - protein, 546 aa, Burkholderia fungorum
MAAKDVVFGDSARAKMVEGVNILANAVKVTLGPKGRNVVLERSFGGPTVTKDGVSVAKEIELKDKLQNMGAQMVKEVASKTSDNAGDGTTTATVLAQSIVREGMKYVASGMNPMDLKRGIDKAVFAAIEELRKISKPCTTNKEIAQVGAISANSDSSIGDRIAEAMDKVGKEGVITVEDGKSLQDELDVVEGMQFDRGYLSPYFINNPDKQVAVLENPFVLLHDKKVSNIRDLLPILEQVAKAGRPLLIIAEDVEGEALATLVVNNIRGILKTVAVKAPGFGDRRKAMLEDIAILTGGQVIAEETGLTLEKATLAELGQAKRIEVAKENTTIIDGAGEAANIEARVKQVRTQIEEATSDYDREKLQERVAKLAGGVAVIKVGAATEVEMKEKKARVEDALHATRAAVEEGIVAGGGVALIRARTAIAGLKGANADQDAGIKIVLRAMEEPLRQIVTNGGEEASVVVAAVAAGTGNYGYNAATGEYVDLVDAGVVDPTKVTRTALQNAASVAGLLLTTDAAVCELPKEDAPMAGGMPGGMGGMGMDM

SEQ ID NO: 49933 - protein, 233 aa, Burkholderia fungorum
METRVFLYGFGPVLLAGTIQTIELSVLSLVAAVLLGLAGAAAKLSFSRPLRAIATGYTTLIRSVPDLVLMLLLFYSIQIAVNDLTDALNLPQFDIDPFVAGVLTLGFIYGAYFTETFRGAFLAVPRGQLEAGSAYGMSGARVFTRILFPQMMRFALPGIGNNWQVLVKATALVSIIGLADVVKAAQDAGKSTFNMFFFILIAALIYLAITTVSNLVLIWLEKRYSTGVRHAEL

SEQ ID NO: 49934 - protein, 455 aa, Burkholderia fungorum
MLDNLTQRMARVVKTLRGEARLTEANTQEMLREVRLALLEADVALPVVREFIAKVKEKALGEEVISSLSPGQALVGVVQRELTAIIGGDYEGKAVELNLAVTPPAVILMAGLQGAGKTTTVGKLAKLLREKYKKKVLTVSCDVYRPAAIAQLKTVTEQVGADFFPSEPDQKPVDIARAAVDWARRHYHDVLLVDTAGRLGIDEAMMKEITALHAELKPAETLFVVDAMLGQDAVNTAKAFSDALPLTGVVLTKLDGDSRGGAALSVRHVTGKPIKFVGVAEKLDGLEVFHPDRMANRILGMGDILALVEEAQRGVDVQAAQKLADKVKKGGDFDLNDFRAQLTQMKGMGGLSSLMDKLPAQFQQAAAGADMGQAEKQMRRMEGIINSMTPLERAKPDLIKATRKRRIAAGAGVQVQEVNRMLNQYDQMRTMMKKLKGGNLQKMMRGMKGMLPGMR

SEQ ID NO: 49935 - protein, 635 aa, Burkholderia fungorum
MRLRRPLPVAKVAYNPVASAQIALQCIGRLGYSVENAMSQTVGDFIIDRLHAWGVRRIYGYPGDGINGVFGALNRAHGKIEFVQVRHEEMAAFMASAHAKFTGELGVCIATSGPGASHLLTGLYDARLDHMPVLAIAGQQARAALGGHYQQELDLVSMFKDVAGAFVEQASVPSQVRHLVDRAVRTALAERKVTALVLPNDLQDLAYEAPARKHGTLHSGVGYRRPRLVPYPDDLQQAAEVLNAGKRVAILVGAGALHATDEVIAVADKLGAGAAKALLGKAALPDDLPWVTGSIGLLGTKPSYDLMTECDTLLVIGSGFPYAEFLPKEGAARGVQIDLKADMLSLRYPMEVNLVGDSVETLRALLPLLEQKQDRGWREKIEGWTADWWKTLDKRAHEAGRKGMNPQRSVWELSPRLPANAIVTSDSGSCANWYARDLKVQRGMMCSLSGGLASMGAAVPYAIAAKFSHPERPVIALVGDGAMQMNNMAELITVAKYWKQWASPRWICMVLNNSDLNQVTWEQRVMEGDPKFEASQDIPSVPYHRFAELIGLKGIYVEDPERMGAAWDEALAADRPVVIEVKADPDIPPLPPHITLAQAKAFASTLIKRDPNEGSVIIETAKQVLGAVLPGHRDK

SEQ ID NO: 49936 - protein, 359 aa, Burkholderia fungorum
MNQPAQTATPVRPDAAYTRGAALPALLKSRILILDGAMGTMIQRYKLDEARYRGERFKDYGRDIKGNNELLSITQPQIISEIHEQYLAAGADIVETNTFGATTVAQADYGMEALAVEMNLESAKLARAACDKYSTPDKPRFVAGAIGPTPKTASISPDVNDPGARNVTFDELRAAYYEQARALLDGGVDLFLVETIFDTLNAKAALFALDELFEDTGERLPIMISGTVTDASGRILSGQTVEAFWNSLRHAKPLTFGLNCALGAALMRPYIAELAKLCDTYVSCYPNAGLPNPMSDTGFDELPADTSGLLKEFAQAGLVNIAGGCCGTTPEHIAAIAQALAGVKPRVWANYRETDTETV

SEQ ID NO: 49937 - protein, 547 aa, Burkholderia fungorum
MTVSKLLFAVRQTCLPALSACAVLTASLAPAAADAATLPDKTLVFCSEGSPAGFDSAQYTTSVEFSAGSYTVYNRLIEFAHGSTDIEPSLAEKWDVSPDGLTYTFHLRHGVKFQTTSFFKPTREFNADDVVFTYQRMLDPDQPFRKAYAVPFPYFTDLGLAKNIAKIEKLDPYTVRFTLKEVDAPFLQQIAMPFASILSAEYGDQLLKAGKASDINQYPVGTGPFIFRSYTKDDTIRFDGNPDYWKPGVVKVSKLIFAITVDPAVRLQKLKRGECQVMAYPRPADIPAVKADASLAMPNQVGFNLGYIAYNTTKKPLDNVLVRRALDMSINKKAIIDSVYQGAGQAATNPMPPTQWGYDKNLKDAPYDTEKAKALLKQAGYPDGFDLTLWAMPVQRPYNPNARLMAEMLQSDWAKIGVKVKIATYEWGEYIRRGHAGEHEAMLIGWTGDYGDPDNWLGVLLGCDAVNGSNFSKWCYKPYDDLIRKGRGTTDLAERTKAYTEAQEIFKDQVPFTPIAHSTVYQPISKNVTGFKIDPFGPTQFMNVGLK

SEQ ID NO: 49938 - protein, 318 aa, Burkholderia fungorum
MRRRVLFAGALVAAGIGIGGTAGAVPVQGGKLKIALVLKSQTDPFTVAMANAARDYQQHFASQFGLTVRATATESDTAGQIRMVEEMIKAKMNAIVIAPTDSKALTAVVARGIKAGIVMIAIDNPLDEAAQDAAGISVPFVGPNNRKGAQQVGSYLAGRLNAGDQVGVIEGSPADRNAQQRTEGCRDAMNAAGINIVAVQSGEWEYGKGRDIATKMLNDHPQIRGLLCGNDNMAMGAVDAIRDAGRTGGVYVTGYNDIEAIKPLIADGRVLATINQFPARQAIFGVDVALKAVMEQKKQSELSRVIETPLQLVTAADR

SEQ ID NO: 49939 - protein, 195 aa, Burkholderia fungorum
MTTTRQAARTRALSQFEQTSGVSMKKALVMLATAVAMSGAFAQTSAPASAPVNAASAPAARAGHERNVEDRIAYLHSQLKITSAQESQWNAFADVMRSNGQTMGELFQQRRAATNVSALDDMKQYATIAQAHADGMKKLVDAFDPLYNSFSPEQKKLADATFRQPGGMEGHGHHGRGKGKGGKPAAPASDAIVKP

SEQ ID NO: 49940 - protein, 337 aa, Burkholderia fungorum
MDLDQIVADAQKAFAEATDVTTLENEKARFLGKSGALTELLKGLGKLDPETRKTEGARINLVKQQVEAALTARRQALAEALLNQRLAAEAIDVTLPGRGTGAGSLHPVMRTWERVEQIFRTIGFDVADGPEIETDWYNFTSLNSPENHPARSMQDTFYVDGKDADGRQLLLRTHTSPMQVRYARTNTPPIKVIVPGRTYRVDSDATHSPMFNQVEGLWIDENISFADLKGVYTDFLEKFFERDDIQVRFRPSYFPFTEPSAEIDMLFETGKNAGKWLEISGSGQVHPTVIRNMGLDPERYIGFAFGSGLERLTMLRYGVQDLRLFFENDLRFLRQFA

SEQ ID NO: 49941 - protein, 347 aa, Burkholderia fungorum
MIRKNSEYPLQPPRERGTGRAFVFALVMHALLGFFLYHGIQWQNSTPEGAEAELWTEVPDTSIPRPVPPPVPVPVAPAPPMRDEQADIALQEKKRQQQEAAREAQLAEQQRQQKLQAQQEAEAKRQQQLAADQAAQKAAAARQKQLQLQQQQQQQQQQQEASKLKQQQLAEQQKQQQLKEQQQEQQQKQAEAEAQKKADAQKAAKAKAQADAAAQAKKLDAERRARLAQMQGLAATGTGSTTSDGLGKSGTGSGSGGTATSPGYSDKVRRAVRPNITWGGETSGLETVVSVRCSPTGTLLGATISRSSGNPAWDDAALRAVQRTDPMPQDINGKTPTSFLITLRPAG

SEQ ID NO: 49942 - protein, 368 aa, Burkholderia fungorum
MVQATQTGEPEHQPDYSDFEGTRPVSERQRFDSDALAAWLTRHVDGFAGPLTLEQFAGGQSNPTFKLLTPSRSYVMRAKPGPAAKLLPSAHAVEREYRVMHALAGTDVPVAKMLALCENESVIGRAFYVMEFVEGRVLWDQSLPGMTAAERAAIYDEMNRVIAALHSVDVTAVGLADYGKPGNYFARQIGRWSKQYIASETEPIDAMQRLIEWLPQHMPAETGERASIVHGDYRLDNLIFHPEEPRVLAVLDWELSTLGDPLADFAYHCMAWHVDPTQFRGIGGLDWAALGIPDESQYVARYCQRTGFEIHGDWNFYLAYNMFRIAAILQGIMKRVVDGTAASAQALDAGRRAKPMAELAWRYAQKVR

SEQ ID NO: 49943 - protein, 312 aa, Burkholderia fungorum
MDTLENMRMFVRVVEAGSFTKAASLLSVATPQVSRAITELESRLRTRLLNRTTRHMSLTEAGERYLQRCEQILEYVGLAEAEAAGAAAQPSGKLRIHGTTSFGQHYLAPLIARYNQRFPDVLIDLVLAQRVPDMIEEGFDVSVVVARELADSALVSQRIGTTCTVLCASPQYLSKRGMPVSLEDLNTHTCLQLVLPDVPSGQWIFDGPDAQVFRHTRSTPLTVNVAEALAEAIREGMGIGPLPLSLALQGFRDGSLVRVLDGHRLQSNNIYALYASRQYLDAKIRTFVEFLRENVPIQLAEQERELFHRLVN

SEQ ID NO: 49944 - protein, 782 aa, Burkholderia fungorum
MNSPLFDGLDSNWSVRWVESVSDYAIFALSPDGRIQSWNPGGEAIYGYRRDEVLGQPLDILYTEEERSKGLPAAGLETARRTHRYDTEGWRVRKDGTVFWASVVTTTLRAEDGQITGFAKIVRDMTDKKTAHDAVLESERRFRMLVHGVTDYAIYMLSPEGIITNWNPGARRIKGYTAEEVIGSHFSRFYTPEDAAAGLPQHGLAVAAREGRFEAEGWRVKRNGERFLAHVVIDAIRDDDGMLAGFAKITRDITERSEAARLLEETRAALFQSQKMEAIGKLTGGVAHDFNNVLQVLRGNLELLEHRHGRDAWTRERLEKAIDAVERGAKLASQLLSFGRQQPLQPVVINLAPAIRGMDDLLRRALGETVEVETVVAGGLWNTLIDIHQLENVLLNLAINARDAMPDGGKLTIELSNAMLDDHYVAGLPDVPPGQYVLLAVTDTGTGMAADVLQRAFDPFFTTKPEGRGTGLGLSTAYGFVKQSGGHIRLYSEVGHGTTVKIYLARSMGTAVEPPQRSSVTLLRGAETVLVVEDDRKVQSTVVDTLSGLGYSVLKADDAEQAMAVIRSGVHIDLLFTDVVMPGPLRSPDMAAQALQFLPRLKVLFTSGYTQNAIVHGGRLDPGVELLSKPYSREQLAYKIRQLLGPFTGQTHVDAQEEPAARSDVTAVLRILLVDDDPESTEAIGALLKMLGHEPAMTDSPGEALNWLKTRSFDILIADLAMPGMSGIELAQKAVQRRPELRVVFASGREMPDVPGLDFVWKALRKPYALEDLSAVLEELRQ

SEQ ID NO: 49945 - protein, 144 aa, Burkholderia fungorum
MQTHELTISSNKADLEMETVYTFLSQETAWAKGMPRETFERAVAGSLCFGGYIEGRQVAFARLITDGATFAYLCDVFVLPDYRGKGYASRLMKHVFASPSLQGLRRIVLVTTDAHHVYEPHGFTGLANPERYMELHNPDVYKAA

SEQ ID NO: 49946 - protein, 263 aa, Burkholderia fungorum
MIDIDLTATVSDSTRRFTLATRFASEAPVVALYGASGAGKSLTLQAIAGLLRPERGHVRVGGRVLFDSARGVDLPPDRRGVGYLFQHYALFPHLSVRENVAFGLTRWWWRGLSGARAARVDALLHGFDLTELARSRPAGLSGGQQQRVALARALACGPELLLLDEPFAALNPLLRHELRGQLADVVRRWQMPVVMITHDVDDVLALADVAFVVEHGEVVREVDLRSGEGRDVTRRALVPDLDIAPLTARERRVRALLHVPVDG

SEQ ID NO: 49947 - protein, 333 aa, Burkholderia fungorum
MTSITLLGETELRALVPLDLAAIDQVEAAFLALATEAVAMPPILRLDLPEHNGEIDVKTAWLPRFDSLAIKVSPGFFGNPSLGLPSLNGLMLVLSARTGLTEAVLLDNGYLTAVRTAAAGAVAARWLAKPHTPRVAVLGAGEQARLQLQALTLVRRIEHVRVWARDAASARRFAQEMSVSLGVQCDAARDVQHALADADVAITATPSRSPLIEAADLHPGLHITAMGSDTEHKNEIAPAALAAARYICDRAQQTRVLGELHHALNAGAVRADAAITELGQVIARQAVGRADEADVTICDLTGTGAQDTAIAALALQRARAAGAGTIFRNDVKR

SEQ ID NO: 49948 - protein, 249 aa, Burkholderia fungorum
MRFVRSLAVVLLAALPLLASAQQLTVSAAASLTDAFNEIGAKFAAVHPGVTVRFNFAASGVLLQQIRQGAPVDVFASADQETVARGIDAQLLDAGTKQDFAANSVVLIVPAEGAPLVKTLADLSNPAVKRIALGKAATVPVGRYTQQALESAGQWDALQPKFVQAESVRQVLDYVARGEAEAGFVYRTDAMLAPGKVRIALTVEGHEPVTYPVIAVSASREQALARDFIAYLSTPAAQNVLARYGFVKS

SEQ ID NO: 49949 - protein, 1272 aa, Burkholderia fungorum
MTDLSTPQRAGSHKLPAGRRLRFVTAAALFDGHDASINIMRRILQASGVEVIHLGHNRSVDEVATAALHEDADGVAVSSYQGGHNEYFRYLVDLLRARGGERIKVFGGGGGVIVPEEIAGLERYGVEKIYSPQDGQRLGLQGMIDDMIARCAEGARAAAATGESQVGAWAAEFSEHGLPRFDSRDDVGVDRQGAVARNPSSEASRVAAAGRGDHLDRGVRAASTADTADTANTANTANTANTGSVADAADAADAADAADAADAASTASTASTASTASTASTAGIPDPASLVFRRLAQLISAFETAAIDVNTRDKLSALAEVTAIPLLGITGTGGAGKSSLTDELIRRFRLDYGDALTIAVLAIDPSRRKSGGALLGDRIRMNAIGDWGGGARVYMRSMATREASSEISDSLPDALMLCKAAGFDLIVVETSGIGQGNAAIVPFVDESLYVMTPEFGAASQLEKIDMLDFASFVAINKFDRKGARDALRDVAKQVQRNRADFAKSPEAMPVFGTIASRFNDDGVTALYRHVAEALRKHGLRSGGGRLAAPEDLRFSSGRNAIVPPARVRYLADIAQTIHAYRERADAQARLARERWQLIEARRMLVETGEAARSTVATSASPGASASSKANACTSTSSKANASPGANTTANSNASATSGTATPTDALNPTLSQLDTLITQRTASLGERERILLDTWPEIVAAYSGTEHIVRVRDREIRTALTVATLSGSEVRKVSLPKFVDHGEILRWLMLDNLPGYFPFTAGVFPFRRENEDPTRMFAGEGDPQRTNRRFKLLSEGMPAKRLSTAFDSVTLYGEEPHERPDIYGKVGNSGVSVATLDDMKTLYDGFDLCAPETSVSMTINGPAPTILAMFFNVAIDQQIARTTQRQGRPLTEDELAATRRTALENVRGTVQADILKEDQGQNTCIFSTEFSLKVMGDIQAYFVEHGVRNFYSVSISGYHIAEAGANPISQLAYTLANGFTYVEAYLARGMSIDDFAPNLSFFFSNGMDPEYTVLGRVARRIWAVAMRERYGANERSQKLKYHVQTSGRSLHAQEIDFNDIRTTLQALIAIYDNCNSLHTNAFDEAITTPTEESVRRAVAIQLIINREWGLAKNQNPNQGSFVIEELTDLVEEAVLAEFDRLTERGGVLGAMETGYQRGRIQDESMLYEHRKHDGSYPIVGVNTFLSAHPHEAPQPIALARSTDDEKQSQLQRLRAFQAQHRDAAPAALERLKRAVIDDENVFAVLMDVVRVCSLGQITHALFEVGGQYRRNM

SEQ ID NO: 49950 - protein, 455 aa, Burkholderia fungorum
MFEKILIANRGEIALRIQRACRELGVKTVVVYSEADKEAKYVKLADEAVCIGPAPSNLSYLNMPALISAAEVTDAEAIHPGYGFLSENADFAERVEQSGFTFIGPRPETIRMMGDKVTAKQTMIKTGVPCVPGSEGALPEDPKEIVKIARQVGYPVIIKAAGGGGGRGMRVVHTEAALVNAVNMTREEAGRAFGNPQVYMEKFLENPRHIEIQVLADSFKNAVWLGERDCSMQRRHQKVIEEAPAPGIARRLIDRIGDRCADACKKMGYLGAGTFEFLYENGEFYFIEMNTRVQVEHPVTELITGVDIVQEQIRIAAGEKLAFRQRDIVFKGHAIECRINAEDPFKFIPSPGRLTSWHMPGGPGIRVDSHAYNGYFVPPNYDSMIGKLIAYGATREQAIKRMRIALSEMVVEGIQTNIPLHRELMLDAKFVEGGTSIHYLENRLAAKQQAAPEEA

SEQ ID NO: 49951 - protein, 447 aa, Burkholderia fungorum
MLPLNFLLGLSALFAALGAQIYPVLGIVSLAIIVCSLLQATKKNLAGPPFVMLIVFALYVLPRAAMVILGLIDTFSGFNLGNDNQWIIGTVLFVYAFLLGIDLSGTNKVPLAAPATGSKFAVMVGLFLICCSMLFFLSYLNSVGGVGGLIENYNAETYFATVQDEVASASKNGSIYTLIAGFTIISAASFSIKKSPKLAFFYLILCGIALVMAIGFIKREYAFEVLMAIIVALVAKKSLVKLKKLAAISLGAAAGLFMLFLVRSGFQLDNLAEVPLLLLDTAEFWVLDQIINVYQNGVALTGYDYGWLHVMALVSPFVPYSSYMPLDHILIERSMGITGWGIPPTIFGYAFLVFGWIGLIPYGIALGFVIGRVDRWLKQRTQKAWFFLSAYMIFIMYCWFLFRNGDPALAGFSTNRFLLVVIFVAIIEHIFDRGVRKMDIQKRVRVA

SEQ ID NO: 49952 - protein, 898 aa, Burkholderia fungorum
MADTATPNVIRRADYAPPAFLIDTVALEFDLVPERTVVRNTMRVRRNPEAARAAHLELMGEQLEFVSAAIDGKPFANAHAHDHGLLLDNVPDQFELTLTSICNPAANTTLSGLYVSGGNFFTQCEAEGFRRITYFLDRPDVMATFTVTLRASKADYPVLLSNGNLLEEGDLPDGRHFARWEDPFRKPSYLFALVAGKLVALEERVKSGSGKEKLLQVWVEPHDLDKTRHAMDSLIHSIRWDEERFGLELDLDRFMIVAVSDFNMGAMENKGLNIFNTKYVLANPETATDTDFANIEAVVGHEYFHNWTGNRVTCRDWFQLSLKEGLTVFRDQEFSADMAGGATDEAARATKRIEDVRVLRQMQFAEDAGPMAHPVRPESYVEINNFYTMTVYEKGSEVVRMYQTLFGRDGFRKGMDLYFRRHDGQAVTCDDFRHALADANGRDLAQFERWYSQAGTPRVSVRTQYDAAQQRYSVTLTQGYGEAAPAARETQKGPLLIPFAIGLIGKDGRDLPLQLEGEAQAGKATTRVLEFTQTEQTFTFVNVAQEPLPSLLRNFSAPVIVEYDYSAQQLAFLLAHDSDPFNRWEAGQRLATRELLTLAGRAATGVPLQLDDSVVAAFARVLTDETLSPAFRELALMLPSEAYLAEQMAESNPAAVHAARQFVRKRLANALRSDWLNVYEQHRTPGAYEATPEASGHRALKNLALSYLAELDDPAEAVRLASAQYDAANNMTDRSAALSVLLNASAANGGSAEAQQALDDFYRRFEKEPLVIDKWFALQATQRGSAQRPVIDVVRRLMTHPAFNLKNPNRARSLIFSFCAANPAQFHAEDGSGYAFWADQVIALDAINPQVAARLARSLELWRRFTPALRDGMRAALEKVAAQVKSRDVREIVEKALA

SEQ ID NO: 49953 - protein, 332 aa, Burkholderia fungorum
MAFNLRNRSLLNMQDFAPRDIRFLLDLASELKRAKYAGNEVPRLNGKNVALIFEKTSTRTRCAFEVAVHDQGGHVTYIDSASSQLGRKESLKDTARVLGRLYDGIEYRGFHQSVVEDLATYSHVPVWNGLTDEFHPTQVLADLLTMQEFGEKPLHELSFCYLGDARFNMGNSLLIGGVQMGMDVRIAAPRELWPHDELVAQMRLLAERTGASVTIVEDPHEAVSGVDFVYTDVWVSMGEPVEAWGPRIDLLRPYQVNAALMKATGNPRTRFMHCLPAYHNLDTDTGRMVHEHFGMSELEVSDEVFESDASIVFSQAENRMHTIKAVLVATLA

SEQ ID NO: 49954 - protein, 240 aa, Burkholderia fungorum
MTTNTTIGSNGTNVSQTLLDTMNGTNSASSSTSSTGSTSGTSATDLQNTFLQLLVAQLKNQDPTNPMDSSQMTSQLAQINTVSGISQLNTTLTSLATQMSAGQQSQAALLIGSTVLAPGSSVSVASGKAGAFGVQLANPVGDLQVVVKNSSGQIVSTLDLGKQSAGTIPVGWTPTDSAGNALPDGTYTISAVGTINGQQATATTLTGATVQSVVMQANGTPGLVLSNGSTVGLTSVAAIL

SEQ ID NO: 49955 - protein, 452 aa, Burkholderia fungorum
MYICSECGGQSPKWAGQCPSCNAWNTLVESVAEAPSTHRFQSLAKSAPVRRLADIEASDVPRFTTGVSEFDRVLGGGLVPGGVVLIGGDPGIGKSTLLLQSLAEIAADKRALYISGEESAAQIALRAQRLSLLEPGSRASELQLLAEIQLEKIQATIAEQRPDVAVIDSIQTVYSDALTSAPGSVAQVRECAAQLTRIAKQSGTTIIMVGHVTKEGALAGPRVLEHIVDTVLYFEGDTHSSYRLVRAIKNRFGAVNELGVFAMTERGLRGVANPSALFLSQHEQSVAGSCVLVTQEGTRPLLVEVQALVDAANAPNPRRLAVGLEQNRLAMLLAVLHRHAGIACFDQDVFLNAVGGVKITEPAADLAVLLAIHSSMRNKPLPKGLVVFGEVGLAGEIRPSPRGQERLKEAAKLGFSVAVIPRANAPKQPIEGLQVVAVERIEQAIDRVRTLE

SEQ ID NO: 49956 - protein, 188 aa, Burkholderia fungorum
MLGAMLAGMPETFSEGFPYPVRGILTTVKIRVLPVGHVARQRWPGYGSCKPASKERMKNRATVLCVRDNRILLVARERSRWSLPGGRIRRDEAPHEAALRELEEETTLVADQLMYLFEFNGFSTQHHVFFAEVGPHLSAEPRNEIAKCKWFAPVKIATLSASVPTRGIVELFFRHIGVSVARRRPVAP

SEQ ID NO: 49957 - protein, 391 aa, Burkholderia fungorum
MSRREWLKLASMFTVAGAGPLLGALNARAATDPNAPVRIGYLPITDATPLLVAHNNGYFEAAGLAVEKPTLLRSWAQLVEAFLSGQVNVVHLLAPMTIWARYGSQAPAKVVAWNHVNGSALTVSPDIGKVADLGGKTVAVPFWYSIHNVVVQDMLRTQGLVPVLKKDGELKPNEVRLIVMAPSDMPPALASRQIAGFIVAEPFNAAAEGLKIGKVLRFTGDVWKNHACCVVFMHERDLTERAAWSQKVVDSVVKAQLWTRAHPQEAAQLLSKTGQNHYTPHTAAVLTEVLAPAPGDQGRYLADRAIIHADWHAKRIDFQPYPYPAYTEELVRRLKTTQLEGNAPFLGQLDPAFVARDLVDDRFVKNSIKSAGGMQAFGLPEGFSRTETIVV

SEQ ID NO: 49958 - protein, 315 aa, Burkholderia fungorum
MSNFRGVIYDSIVDTIGATPLVRLSKLAAACDCRADVVGKLEFFNPLASVKDRIGIALIETAERAGRIKPGTLLIEPTSGNTGIGLAFVAAAKGYPLVLCMPESASIERRKMVGLLGAKVELTPASEGMGGAIRRAEALKRNHPDSLILQQFDNPANPDAHRHTTAEEIWNDTAGRVDIIVSGIGTGGTITGIGQTLKARKPELQMIGVEPSGSAVLSGGKPGPHKQQGIGSGFLSSILDLSVVDEIVTATDEDAIQTARQAAALEGVPIGISSGAALSVALRVGRRPGNAGKLIVVIVPSFAERYLSTELFADV

SEQ ID NO: 49959 - protein, 207 aa, Burkholderia mallei
MARYIGPKAKLSRREGTDLFLKSARRSLADKCKLDSKPGQHGRISGARTSDYGTQLREKQKVKRIYGVLERQFRRYFAEADRRKGNTGETLLQLLESRLDNVVYRMGFGSTRAEARQLVSHKAITVNGIVANIPSQQVKAGDVVAIREKAKKQARIVEALSLAEQGGMPSWVAVDAKKFEGTFKQVPERADIAGDINESLIVELYSR

SEQ ID NO: 49960 - protein, 451 aa, Burkholderia mallei
MANRLQVIYIEDDELVRRASVQSLQLAGFDVVGFGSVEAAEKAIVGDATGVIVSDIRLPGASGLELLAQCRERTPDVPVVLVTGHGDISMAVQAMRDGAYDFIEKPFAAERLTETVRRALERRALVLENHALRRELAGQGVVAPRIIGRSPAIEQVRRLIANVAPTDASVLINGDTGAGKELIARSLHELSPRRDKPFIAVNCGALPEPMFESEMFGYEPGAFTGAAKRRIGKLEYASGGTLFLDEIESMPLALQVKLLRVLQDGVLERLGSNQPIRVNCRVVAAAKGDMSEHVAAGTFRRDLLYRLNVVTIALPPLAERREDIVPLFEHFMLDAAVRYGRPAPLLTDRQRASLMQRDWPGNVRELRNAADRFVLGVTEGIVGDAGPETDEHAEQSLKERVEQFERAVIAETLNRTGGAVATTADKLHVGKATLYEKMKRYGLSAKGETDR

SEQ ID NO: 49961 - protein, 510 aa, Burkholderia mallei
MAGNGGDVAAALRFDNIGKVFPGVRALDGISFDVQAGQVHGLMGENGAGKSTLLKILGGEYQLDSGSVLVDGRAMRFPSAAASIAAGVAVIHQELQYVPDLTVAENLLLGRLPSALGWVRKRDAQRFVRERLAAMGVDLDAQAKLRRLSIAQRQMVEICKALLRNARVIALDEPTSSLSHRETEVLFKLVDDLRRDGRALIYISHRMDEIYRLCDACTIFRDGRQVASHASLANVPRETLVRQMVGREISDIYHYAPRALGDVRLSARALEGDALRAGASFDVRAGEIVGFFGLVGAGRSELMRVIYGAQRRTGGALMLDGEPLDIRSTRDAIRRGIVLCPEDRKEEGIVAHASVAENINISCRRHGLRAGLFLDRKREAETADRFIKLLKIKTPNRRQKIRFLSGGNQQKAILARWLAEPDLKVVILDEPTRGIDVGAKHEIYGVIYELAKRGCAIVMVSSELPEVLGVSDRIVVMREGRIAGELARGEANEEAVLNLALPQGATAHAA

SEQ ID NO: 49962 - protein, 126 aa, Burkholderia mallei
MPTINQLVRKGRASETTKSKSPALQDCPQRRGVCTRVYTTTPKKPNSALRKVAKVRLTNGFEVISYIGGEGHNLQEHSVVLIRGGRVKDLPGVRYHMVRGSLDTQGVKDRRQARSKYGAKRAKAAK

SEQ ID NO: 49963 - protein, 325 aa, Burkholderia mallei
MQTSLLKPKIIAVESLGENHAKVVMEPFERGYGHTLGNALRRVLLSSMVGYAPTEVTIAGVVHEYSTLDGVQEDVVNLLLNLKGVVFKLHNRDEVTVTLRKEGEGVVTAGDIELAHDCEVINPNHVIAHLSKGGKLDVQIKVEKGRGYVPGNVRRYGDETAKIIGRIVLDASFSPVRRVSYTVESARVEQRTDLDKLVMNIETSGVITPEEAIRQSARILVDQLSVFAALEGTETAAEAPSRAPQIDPILLRPVDDLELTVRSANCLKAENIYYIGDLIQRTENELLKTPNLGRKSLNEIKEVLASRGLTLGMKLENWPPAGLDK

SEQ ID NO: 49964 - protein, 318 aa, Burkholderia mallei
MSSHDGLMVFTGNANPALAQEVVKILGIPLGKAMVSRFSDGEIQVEIQENVRGKDVFVLQSTCAPTNDNLMELMIMVDALKRASAGRITAAIPYFGYARQDRRPRSARVAISAKVVANMLEIAGVERIITMDLHADQIQGFFDIPVDNIYATPILLGDLRKQNYPDLLVVSPDVGGVVRARALAKQLNCDLAIIDKRRPKANVAEVMNIIGEVEGRTCVIMDDMVDTAGTLCKAAQVLKERGAKQVFAYATHPVLSGGAADRIAASALDELVVTDTIPLSAESLACPKIRALSSAGLLAETFSRIRRGDSVMSLFAES

SEQ ID NO: 49965 - protein, 311 aa, Burkholderia mallei
  MISC_FEATURE (310)..(310): X=any amino acid
TRCSGRATRRSSPSLPRGAENARYLGGVALPPGLRYEADLATALSHAQADDALCVIAAPVAGLRALCRAMRDARRVPAHFVWVCKGFEADTRRLPHQMVAEELPDHASYGVLSGPSFAREVAQGLPVALTVASASAACRERTLAAFHHGAMRIYTGDDVVGVEVGGAVKNVLAIATGIADGLGLGLNARAALVTRGLAEMSRLGVALGGRAETFTGLTGLGDLILTATGDLSRNRSVGLQLAAGRSLDDILAALGHVAEGVRCARAVLSIARERGVDMPITEAVCAVLFDGVAPRDAVSGLLRRDAKAEXV

SEQ ID NO: 49966 - protein, 315 aa, Burkholderia mallei
MTTPVFDAAQTARVTPFAELVDALRTAALDADAGRIESPARLVVPLNEGGVMLSMPASAADLAIHKLVTVCPRNRGGDLPTIQGQVSVVDPATGAPLFALDGPTVTGRRTAAVTLLALRTFVAAAPRDVLLIGTGTQAAHHVEALAALFPGVRVKARAPAQAAAFCARLRAVLPTLEPLGGDTLPETLDAVITATTSATPVYDDAARAGRLVVGVGAFTPGAAEVGARTIAGSALYVDDPAGARHEAGDLIVAGVDWARVRSLADALRATVSTPASNASPAPGAPVFFKSVGCAAWDLAACRVARAVTSRTRACT

SEQ ID NO: 49967 - protein, 310 aa, Burkholderia mallei
MKFAFVFPGQGSQSVGMLNAFADVAVVRETLDEASDALGQDIGKLIADGPADELNLTTNTQPVMLTAAYACYRAWQQAGGAQPSIVAGHSLGEYTALVAAGAIAFRDALPLVRFRAQAMQTAVPVGVGGMAAILGLDDDTVRAVCAEASATGVVEAVNFNAPAQVVIAGTKAGIEKACEIAKEKGAKRALPLPVSAPFHSSLLKPASDKLREYLAGVDVKAPKISVVNNIDVAVVSDPAAIKDALVRQAAGPVRWVECVQHIAREGVTHVIECGPGKVLAGLTKRIDGNLVGASVFDPASLDEALKLAAA

SEQ ID NO: 49968 - protein, 1122 aa, Burkholderia mallei
MHATPARPAAGALDAFHPVVAAWFSDTFAAPTGAQALAWPHIKAGRSTLVAAPTGSGKTLTAFLSALDDLVRDALAHDGALPDETLVVYVSPLKALSNDIHVNLEAPLAGIAAEIARRGLPVPQIRTAVRTGDTTQAERVAHRKHAPHILVTTPESLYVLLSSESGRRMLASTRTVIVDEIHALANAKRGSHLALSLERLDALVGRKLPRIGLSATQKPVEAVARFLVGGRDDAPLDCAIVDTGHTRTRDLALELPPVPLEPVMANDVWERLYDRIAELAAAHRTTLVFVNTRRMAERAARHLADRLGADAIAAHHGSLAKEHRFDAEQRLKHGKLKLLVATASLELGIDIGDVELVCQLGSPRGIAPFLQRVGRSGHHIGGVPKGRLFPLSRDELVECAALLDCVRLGELDVLRIPRAPLDVLAQQLVAEVACREWDEHALYRCVTQAAPYATLARETFDEVLKMLAEGFTSRRGARAAYLHRDVVAHTVRGRRGARLAAVTSGGTIPDNADYAVLLEPQGVNIGTVNEDFAVESLAGDVFQLGNQSYRIIRIETGRVRVEDAHGQAPNIPFWLGEAPARSDELSAGVARLRARLDALLAHGDAAGAGAALPVNAASAPAPEREAAAAGQGARARAAAPHGTSALARRALPAALPAAPPAVCARAAPSAAAPSTAIPSAAAPTVAAMPVPPEAELRTEPRRLAPALAWLTGELGLDAEAARQIADYLARARAALGALPTQDTLVMERFFDESGGMQLVIHSPYGSRINRAWGLALRKRFCRSFNFELQAAATDDALILSLSHAHSFALDEVWRYLRASSAEHVLIQALLDAPLFAARWRWNATTSLALPRFAGGRKVAPQLQRMKSEDLLATVFPDQVACAENIVGEREVPKHPLVDQTLDDCLHDAMDTEGWLALLRRIEAGDVALVARDLPAPSPLAAEILNAKPYAFLDDAPLEERRTQAVLARRWSDPESADDLGALDAGAIEAVRDEAWPLVREPDEMHDALVGLACIADDEIASHDGWRACVAQLAAGGRAARLALAGGRGLWIAAERVACMRALYGADVALDPPLAPPPGFDAPWEPEAALVDVIRARLTGFGPVTAAALAAPLALPAASVAIA

SEQ ID NO: 49969 - protein, 514 aa, Burkholderia mallei
MSAARSSHPAHQQIAAALAWLRAHVAPGAQLHADTRSLRAGDVFVAYAVDGADNRPFIADALARGAAAVLYQPEGFPAEGLDSATSLAVPALDALAGDIASGWYGDPSDAMFSVGVTGTNGKTSCTQWIAAALTALREPCAVIGTLGSGMPGQLVHTGFTTPDAPQLQRSLAQLRDAGARAVAMEVSSHALHQGRVNGTAFDVAVFTNLTQDHLDYHRTFEAYEAAKAKLFAWRGLRCAVVNRDDPAGRRLLANLAGRVRTIAYGIDSPTQAADADRELVATNVRATATGTAFRVTSAWGEADVEVGTLGAFNVSNLLAVLGTLLAADVPFDAALAEIGKLESVNGRMQRLGGRLQNDEPLVVVDYAHTPDALEKTLDALRPIAQARGGELICMFGCGGDRDATKRPLMGAIAERLADKVVVTSDNPRSEDPQKIIDQIVAGMRDASGARRVEDRASAILQAVRGAAREDVVLLAGKGHEATQEIMGKKRAFSDQDHARLALAARTTQTRGGGE

SEQ ID NO: 49970 - protein, 101 aa, Burkholderia mallei
MSWGLAAFGIVQELTLGRRTRIVSMALYVLMGWLALVAIRPLVHALPAAGTAWLVAGGVIYSAGIYFFVNDERIRHGHGIWHLFVLAGSLCQFVSVAGYVA

SEQ ID NO: 49971 - protein, 514 aa, Burkholderia mallei
MLIKPFRSIESAATATHNWRRRQILRAGASTLVLGLALPRLAHASSVLGVRVWPARDYTRVTIESDQPLQNTQQLLQGPDRLVVDLNGLELDQALRDLVSKIAPNDPQIQSVRVGQYQPHVVRMVFDLKGSVKPQVFTLPPVGTYKYRLVFDLYPAVAPDPLSDLIAQTERKEQQLNDTLRAQQAQPPTAALNGPTAAPPAATDNSDAFFQRFAQNNPPAAHSARPAPANPPVAQASPPAAPPRPAVKPPPVIARRNDDDSGDTDTYAFTAPKSGRGTVRLLTVAIDPGHGGEDPGAIGGGGTYEKHIALDIAKKLRAKIDAAPNMRAMMTRDADFFVPLNVRVQKARRVGADLFVSIHADAFTTPSARGSSVFALSDHGASSAAARWLANKENSSDLIGGINIKTQDVAVNRALFDMSTTAQIRDSLRYGNYVLREVGGINKLHKGSVEQAGFAVLKAPDIPSILVETAFISNPDEERRLNDDAYRDQMADAIFRGIKRYFSANPPLAKSRMT

SEQ ID NO: 49972 - protein, 229 aa, Burkholderia mallei
MAGHDSGNAKRGRSPSFGVFVRKPVERAPAKGASDGAVDSQAIRIDAAQSWPDDAVEVGAVVDAYGLKGWVKLAAHAGAGRGGDALLKARDWWLQKGAERKFARVTQAKLHGDTVVAHPDGSVDRDTALALRGARVFVRRGDFPALAADEFYWVDLIGLDVVNEAGVALGKIADMIDNGVHSIMRVEYPATGKDGRPKTGERLIPFVGVYVKAVEQAAGRVVVDWEADY

SEQ ID NO: 49973 - protein, 574 aa, Burkholderia mallei
MVFSPACSSYESSSNIRLRRPRPALNRRPGGNMEHNRLLRALRATAIAGVAAASFGIAGSAFAQILNKTLVYCSEGSPAGFDSAQFTTSVDFTASTFPIYNRLVEFERGGTKVEPGLAEKWDISADGKVYTFHLRHGVKFHTTDFFKPTREFNADDVAFTFERMLDPNQAFRKAYPVSFPYFTDMGLDKLIVKIEKLDPYTIRFTLKEPNAPFIQNLAMEFASILSAEYADQLMKAGKAADINQKPIGTGPFIFRSYTKDATIRFDGNPDYWKKGAVKISKLIFSITPDPGVRVQKIKRNECQVMSYPRPADIATLKADSNVDMPSLPGFNLGYLAYNVQHKPVDKLEVRQALDMAINKKAILESVYQGAGQAASAPMPPTQWSYDKNLKAAAYDPAKAKALLAKAGYPNGFPITLWAMPVQRPYNPNAKLMAEMIQADWAKIGVQAKIVTYEWGEYIKRAHAGEHDTMLIGWNGDNGDPDNWLGTLLGCEAVKGNNFSEWCYKPFDELIQKGRVTTSQDGRTKIYMQAQQIFAQQLPFSPIANSTVYQPVRKNIVDMRIEPLGYARFDGVSVK

SEQ ID NO: 49974 - protein, 170 aa, Burkholderia mallei
MKRAHAVSSGDPPGRSPMGLRDLFFDSTDSTDSRMIDVTDDAPSPPTAFELVGGEARVRELVDRFYDLMDLEPEFAGIRALHPPTLEGSRDKLFWFLCGWLGGPDHYIERFGHPRLRARHLPFPIASSERDQWLRCIAWAMQDVGLDEPLRERLMHSFHDTADWMRNRPG

SEQ ID NO: 49975 - protein, 197 aa, Burkholderia mallei
MENRELTYITNSIAEAQRVMAAMLADERLLATVQKVADACIASIAQGGKVLLAGNGGSAADAQHIAGEFVSRFAFDRPGLPAVALTTDTSILTAIGNDYGYEKLFSRQVQALGNKGDVLIGYSTSGKSPNILAAFREAKAKGMTCVGFTGNRGGEMRELCDLLLEVPSADTPKIQEGHLVLGHIVCGLVEHSIFGKQ

SEQ ID NO: 49976 - protein, 248 aa, Burkholderia mallei
IIQRTLALNVMQKPFNNPKVRQALNYPVNKEALAKFAFAGNATPATGIVPQGVDYAVKLGPWPYDPAKARALLKEAGYPSGFETTLWSAYNNSTSQKAIQFVQQQLAQVGVKAQVQALEAGERVAKVESAQDPAKAPVRMYYIGWSASTGESDWAISPLLASSSIPPKLVNTAYYRNDAVDADLAKALETTDRAKKAELYADAQRRIWADAPWIALVQEKIVYARSKRLQGAYVMPDGSFNFDEIAIK

SEQ ID NO: 49977 - protein, 303 aa, Burkholderia mallei
ARAAFAASRATAAGHVCVALRALAQRDDEPYDDVRAALAASGVTAFDGIVRGGECPLVVDRDGRLYLARYFEYETRLANALVERSRCGGAPAGGADALSPDALGERLVRYFGPQKERGVDWQRVAALIALTGRVTIVSGGPGTGKTTTVVGVIACLLDAHPDLRIALAAPTGKAAQRMQEALHARAGSLPAELAARLPRTSCTLHRLLGGGPGGRFAHHRDNPLPYDLVVVDEASMIDVALAAHLLDALAPNARLVLLGDKDQLAAVEAGAVFAELSARPAFSPATCATIARTLGVGEAEFVA

SEQ ID NO: 49978 - protein, 323 aa, Burkholderia mallei
MSTLHQDSIIIDGLNISKFERSVFEDMQKGGVTAANCTVSVWENFTKTVDNIALMKKQIRENGELLTLVRTTDDILRAKREGRTGVILGFQNAHAFEDNLGYVEAFADMGVRVVQLCYNTQNLVGTGCYERDGGLSDFGREVITEMNRVGIMVDLSHVGGNTSSEAIAFSKKPVCYSHCLPSGLKEHPRNKSDAQLKEIADAGGFVGVTMFAPFLKRGIDATIDDYIEAIGYVVNLIGEDAVGIGTDFTQGYSVDFFDWLTHDKGRYRRLTNFGKVVNPEGIRTIGEFPNLTAAMERAGWKASRIRKIMGENWVRVFKEVWGA

SEQ ID NO: 49979 - protein, 129 aa, Burkholderia mallei
MNLIAKLEQEEIERALAGKTIPEFAPGDTVIVNVNVVEGNRKRVQAYEGVVIAKRNRGLNSSFIVRKISSGEGVERTFQTYSPLLASIVVKRRGDVRRAKLYYLRERSGKSARIKEKLVSKDRAAAAQQ

SEQ ID NO: 49980 - protein, 534 aa, Burkholderia mallei
MPGGRVCGRLARAASGDPVRAAISMTIARLVRGRQGDVMAQFSVARQSASYRPNEDRAGGPDGGAQMPAGYSSRLYNEDLAPLASQRWGAYNIFAFWMSDVHSVGGYVFAGSLFALGLTSWQVLVALIVGISIVNVLCNLIARPSQQLGVPYPVACRATFGVLGANVPAVIRGLIAIAWYGIQTYLASSALVIVVLKFFPHWMPYADVHRYGFLGLSALGWAGFMLLWVLQAFVFWNGMETIKKFIDFAGPAVYVVMFALAGYMVWRAGWRNIGLNLGGVRYHGAEVIPVMVTAISLVVSYFSGPMLNFGDFSRYCSSYGGVKRGNFWGLPVNFLAFSLVTVITTAATLPVFGELITDPVETVGRIDHPSAVILGALTFTIATIGINIVANFVSPAFDFSNVAPRLISWRAGGMLAAVASVFITPWNLFNNPAVIHYTLDVLGGFIGPLYGVLIVDFYLVKRGALRRDDLYTTSADGAYWYRDGVNRRAIAALLPAAAIAVACVMAPALSGLANFSWFIGAALGGAFYRALAKA

SEQ ID NO: 49981 - protein, 225 aa, Burkholderia mallei
MLCDDPRAPRRDRQSRRRRAGRRAARGIARVPPPAGSDAEQRERHRRARDDHDQHLNDHEQQDRRQIDAAQIRDQPAQRVQQRRRQLIQDRHRGRARVQPRQQRHQDREPQHQIERPLDDGQQRDDEDRRDDRQRVDARHRHHQRDVDERRDDGRDDACPIDAAHARDDVPQRQHEPVGRLQHGLRDGVVRRHAHGLQPDAQKQCGAEQREHGIEQKTGDLAEHL

SEQ ID NO: 49982 - protein, 1084 aa, Burkholderia mallei
MPKRTDINSILIIGAGPIIIGQACEFDYSGAQACKALREEGYKVILVNSNPATIMTDPNTADVTYIEPITWEVVERIIAKERPDAILPTMGGQTALNCALDLFHHGVLEKYGVELIGASPEAIDKAEDRQKFKDAMTKIGLGSAKSGIAHSMEEALKVHADIAAATGGSGYPVVIRPSFTLGGSGGGIAYNREEFEEICKRGLDLSPTRELLIEESLLGWKEYEMEVVRDRADNCIIVCSIENLDPMGVHTGDSITVAPAQTLTDKEYQILRNASLAVLREIGVDTGGSNVQFSINPKDGRMVVIEMNPRVSRSSALASKATGFPIAKVAAKLAVGYTLDELKNEITGGATPASFEPTIDYVVTKIPRFAFEKFREADSRLTTQMKSVGEVMAIGRTFQESFQKALRGLEVGVDGLDEKTTSRDEIIREIGEPGPDRIWYVGDAFRVGMSREQIFEETAIDPWFLAQIEQIVLKEKALAGRTLASLTKDELHYLKQSGFSDRRLAKLLGATPADVRARRLELNVRPVYKRVDTCAAEFATKTAYMYSTYEEECEAQPTGNRKIMVLGGGPNRIGQGIEFDYCCVHAALAMREDGYETIMVNCNPETVSTDYDTSDRLYFEPLTLEDVLEIVDKEKPVGVIVQYGGQTPLKLALDLEAHGVPIIGTSPDMIDAAEDRERFQKLLQDLGLRQPPNRTARAEDEALALADEIGYPLVVRPSYVLGGRAMEIVHEPRDLERYMREAVKVSNDSPVLLDRFLNDAIECDVDCICDGDAVFIGGVMEHIEQAGVHSGDSACSLPPYSLSTQTVAELKRQTGAMAKALNVVGLMNVQFAIQQVPRPDGSKEDIIYVLEVNPRASRTVPYVSKATSLPLAKIAARAMVGQKLAQQGVTKEVEPPYFSVKEAVFPFIKFPTVDPVLGPEMRSTGEVMGVGATFGEALFKSQLAAGSRLPESGTVLLTVMDADKPKAVEVAKMLHDLGYPLVATRGTAAAIEAAGVPVKVVNKVKDGRPHIVDMIKNGEIALVFTTVDETRAAIADSRSIRMSAQAHKVTYYTTMSGARAAVEGLRYLKDLEVYDLQGLHARLN

SEQ ID NO: 49983 - protein, 471 aa, Burkholderia mallei
MSKTVADVMQLAKDEDVKFVDFRFTDTRGKEQHVSVPVSAFGEDKFESGHAFDGSSIAGWKGIEASDMLLMPDPNAAFIDPFYEESTLVLTCDVVEPADGKGYERDPRSLAKRAEAYLKSTGIGDTAYFGPEPEFFIFDSVQWNTDMSGCFVKINSEEAPWSSAKEFEGGNTGHRPGVKGGYFPVAPVDQFQDMRSEMCLLLEQIGIPVEVHHHEVAGQGQNEIGTKFSTLVERADWTQWAKYIIHNVAHSYGKTATFMPKPVVGDNGSGMHVHQSIWKDGQNLFAGNGYAGLSETALFYIGGIIKHARALNAITNPTTNSYKRLVPHFEAPVKLAYSARNRSASIRIPHVSNPKGRRIETRFPDPMANPYLCFSALMMAGLDGIQNKIHPGEAADKNLYDLPPEEDAKIPTVCAGLDQALEALDKDREFLTRGGVFTDAMIDAYLGLKEQELAKFRMTTHPIEFEMYYSL

SEQ ID NO: 49984 - protein, 187 aa, Burkholderia mallei
MIAAGALAAALSFSAHAAPATYQFDPSHTYPSFEADHFGGLSVWRGKFDRSSGTVTLDRAAKTGTVDVTTKVASIATGSQKLDEHLQTADFFDSAKYPDATYKGTIKFEGDRPAEVVGNLTLHGVTKPVTLKIDSFKCMPHPMLKKEVCGVDAVGEFNRDDFGLDYGKQYGFKMKTKLLITAEAVKQ

SEQ ID NO: 49985 - protein, 242 aa, Burkholderia mallei
MNEPIDVAVAGANAGERLADAADLASDRILARIGQLTRTLRDSMRELGLDKHVEKAAEVVPDARDRLRYVVAMTEQAAERVLTAIEVAKPVQERLQQEAAALDARWAKWYETPIERAEVRGLMDDTRAFLRALPDATGATNAQLLEIMLAQDFQDLTGQVIKKIMDMVYLIEQQLLNVLVENIAPERREQFAATAAALAAEQAGGAMTPESLLNGPQINPEGKTDVVQDQAQVDDLLASLGF

SEQ ID NO: 49986 - protein, 565 aa, Burkholderia mallei
MTTREFDYIICGAGSAGNVLATRLTEDPGVTVLLLEAGGPDYRFDFRTQMPAALAYPLQGRRYNWAYETDPEPHMNHRRMECGRGKGLGGSSLINGMCYIRGNALDYDNWATHKGLEDWAYLDCLPYFRKAETRDVGPNDYHGGDGPVSVTTSKPGVNPLFEAMVEAGVQAGYPRTDDLNGYQQEGFGPMDRTVTPRGRRASTARGYLDQARARPNLEIVTHALADRILFSGKRATGVTFLHGSARVTAHARREVLVCSGAIASPQLLQRSGVGPGEWLRELDIPVVLDLPGVGRNLQDHLEMYIQFECKEPVSLYPALKWWNQPKIGLEWMLNGTGLGASNHFEAGGFIRTRDDDPWPNIQYHFLPVAINYNGSNAIEMHGFQAHVGSMRSPSCGRVKLKSRDPHAHPSILFNYMAEALDWREFRDAIRATREIMRQPALDRFRGRELNPGADLKSDNELDTFVRARAETAFHPSCSCKMGYDDMAVVDNEGRVHGIDGLRVVDASIMPIITTGNLNAPTIMIAEKIADRIRKHKPLERSNAQYYVANGAPARGGKPARAPAVV

SEQ ID NO: 49987 - protein, 58 aa, Burkholderia mallei
MRNLMPWVRDNAAEIADAFLREGMSEGGAIRIAIAQAKHWLRSGTVRARMRPADERAS

SEQ ID NO: 49988 - protein, 191 aa, Burkholderia mallei
MLLILITDPLGNIPLVIAALRDVPRERRVKVILREVAIAFVILLFFMVVGDRFLRMMSLTDLSLRIGGGIVLFLIALRMIFPHPDGALGSDPRAGGEPFIVPLAIPALAGPSALATVMLLTSQAPGKTLEWAGALTVTMLVCAVTLVLAERIQQWLGERTVIAFERLMGLVLVAISVEMMMAGIRAFVHQL

SEQ ID NO: 49989 - protein, 91 aa, Burkholderia mallei; identical to SEQ ID NO: 48065

SEQ ID NO: 49990 - protein, 373 aa, Burkholderia mallei
DDLRALGRTPLQALRLARRIRDALGVTVPVESILASPTIVELAGYVEQLRSRDVRDGAAPVSIGETPADADARAQAQADTVHTDCLIVIQAGGAEQAPVFCIPGAGGSVASFVALASMLRADIPVYGLQPRGLDGLGPPDRSVEAAARRYARAILDATPPGPPRIVGHSFGGWIALETARLLDGMGTRCAPLVLLDSNPPPASQAWRAPSEADMLRTLVGLLEQAAGGAPSGIGDEEIARCAAAGEDARDALVHACMVRTALLPPRAPVETVRHLRRVFEAHSSTRYAPGSRYAGDATVIVANGDRDAGEMVPAFGWAALIERVEVAVTPGNHMSMLAAPYVRHVALTMKAGMAHDLNQHSRRRAAMAVRCAP

SEQ ID NO: 49991 - protein, 307 aa, Burkholderia mallei
MTARSRFAGRTTMNDSYPSRKSSDKPHEKRSLLERLTDIISPEPDSRAELLEILQDAHERNLIDADSLSMIEGVFQVSDLCARDIMVPRAQMDALNIADKPEDFIPFVLEKAHSRYPVYEDNRDNVIGVLLAKDLLRFYAEEEFDVRGMLRPAVFIPESKRLNVLLHDFRVNRNHLAIVVDEYGGVAGLITIEDVLEQIVGDIEDEYDFDEEAGNIIAAPDGRYRVRALTEIEQFNETFGTDFSDDEVDTIGGLITHHFGRVPHRGEKVRLGELLFEIQRGDARQIHVLLVRRAPLAGRRSGSAGED

SEQ ID NO: 49992 - protein, 233 aa, Burkholderia mallei
MPSNILVIEDEPAISELISVNLQHAGHCPIRAYNAEQAQSLISDVLPDLVLLDWMLPGKSGIAFARDLRNNERTKHIPIIMLTARGDEQDKVLGLEIGADDYVTKPFSPKELMARIKAVLRRRAPQLTEDVVSINGLRLDPATHRVAAQSDGSEIKLDLGPTEFRLLHFFMTHPERVHSRTQLLDQVWGDHVFVEERTVDVHIKRLRAALKPAGCDAMIETVRGSGYRLAKHA

SEQ ID NO: 49993 - protein, 345 aa, Burkholderia mallei
MIVSHSAAAVRIGIAGLGRLGRRHAENLARRVAGARLAAACSPLADECAWARETLAVPRVYEDFDALAADPELDALWLVTPSALHADQIVAALRAGKHVFCEKPLSLDLGECERVLAEARARPHLVATIGFMRRFDPSYRDAYARVAAGEIGRPFLVRSQTCDRNDPEGFFVRFVPSSGGIFLDCTVHDIDVARWLLGAPRATRVYAAGAVALHEGLRACGDVDNGVAICEFEGGRLAMFYASRTMAHGNDTHSEVIGTAGALAIGRNPRANRVEIYDAAGIRNTCTPTFFDRFEDAFLIEAQAFVAAVRGEGAAGGATLADALEATRIGHALRESLQTGRAIEL

SEQ ID NO: 49994 - protein, 819 aa, Burkholderia mallei
PAWRAFFTQLGSVGFADLDRRADALQRRMRENGLAYHPHERAAGGGAVRPWSLDLLPLIIAPDDWAAIERGVLQRVRLSNAILADLYGEQTILRRGLLPPALVTGHPGYLRPMCGAQAPGGTWLHVAAFDLARGPDGAWRLMAQHTQGPAGLGYLLENRLIVSRLFPRAFRGLHVQRLAASYRALLQSMQALSPARKNSRIVLLTPGPHAATYFEHAYLARYLGLTLVEGGDLTARDQRVYLKTLRGLEPVHGILRRVDDEWLDPLELRPDSLLGVPGLMQAVRAGNVLLANLPGSGFLESPGILGFLPRLAQALLDETLTLPAVHSWWCGEQAACDEALPLLARGIVKPTFPASVQAGGAFEPVIGARLSPRQLADWRARIAAQPAHYTIQADLPLSQAPTWAAGAGMGDGGARIVPRPLLLRVFALADGARSWRVLPGGLARVGTRDELFNAPMPHGGSSVDTWVMTEGAVDPTTLLQTHLGPDDLQERSRAIASRAAENLFWLGRYTERATNLTRLARAALERLRGEDDVETPVHLHVLDALCRDNGLLPADAPPAVDAPRAFQQALTRSLTPRADRSTGIASCLFGMRGAAAAIRERLSREQWRLIDEATQLFDEGGDDAEPEEQLGNDALQRLERLNLLLSAITGAQTDNMTRDDGWRLLSIGRQIDRLEFLCGVLGHAFDGGAIHKQEGFELVLELFDSGITFRSRFQRCFDVAPLLSLVVLDTDNPRSLAWVAQALRGRLSKVERQRGLRAVGTRRRDSGIAGWPLHVLCETDGDGRHAALLARLQACGKAAWDVSNRIGERYFSHVRDAGR

SEQ ID NO: 49995 - protein, 464 aa, Burkholderia mallei
MIRRLLPRTLRARLTALIILSTAATLALSGVALYSALHNRLVGMSSYEMSATLAAMRTHLANVANVDDIPRKSDLWIDQLHGHQNLDLAIYDTDGRLRFATRGFVAPRPALGAPQTRVPASAAPAGATFSYLADDAPLRGGNPRTARIVVQYDGKNDHALLRAYAYTVVVIEVLAVVLTAALAYGIAMLGLSPLRRLVARAEQMSSSRLAQPLPELDTSGELKEMEHAFNAMLKRLDESFVRLSQFSSNLAHDMRTPLTNLLAEAQVALSKPRTADEYRDVIESSIDEYQRLSRMIEDMLFLARSDNAQSHLAIRTLDAAAQAERVAGYYEPMAEDAEVSIVVRGKAEVRADALLYHRALSNLISNALNHAPRGSTITIECAQAADAATISVSDTGRGIEAPHRERIFERFYRVDPARHNSASGTGLGLAIVRSIMENHGGTCGVDSEPHVRTTFWLKFPAHAA

SEQ ID NO: 49996 - protein, 786 aa, Burkholderia mallei
MSSSRSHAARAARPVRATRKSRRRRALFAIPLLGTLALALLWVAIIARLSVEKDSAFRDAGASAAILSTALEQHTVKAIHQVDQITRFVKYEFEKSPTRFNLASTVEKGVVPSDTLIQVSILDARGRLVANTAEAHPKPIDLSDREHFKVHMQRNDDDLYISKPVFGRVSRHWTLQMTRRLNHPDGSFAGVVVVSEDPAYFTNDFYNNATLGKDGVIAVISDTGAVLARSTGSTQKTPGTFSASGVYPVSERASGTYVDPIDGIVRIVSYRHLDGYPLGVMVGLSQAEEFADYHHTRNVYLLMTGFITLAMLAFFGVATGLIGKLLGREREMTQLAEFDLLTGLANRYATLRSLRNDVALPSNLSRLAILFIDLDNFKTVNDTLGHNAGDIVLQMTAARLSDAVANEGALARIGGDEFVVVVKGENVERRAERLAEAIVRMFAEPFDVRGSSFVLHASIGIALHSVENESEIDLLKKADLAMYSAKDAGKNCYQFYAPHLSHRADHLMRWEQQLRVALSDGQLFLAYQPKIDLTYRCITGFEALVRWDHPEHGVISANEFISIAESTGLIVPIGDFVIRTACEQLARWRNEGHDKLTLAVNISPVQFWRGDLIDTISRALAETGIEARRLELEITETAMMEYPELVSEKIVALKRLGIRVALDDFGTGYSSLSYLHRFAVDTLKVDRSFIQAIPADRSVCVMVSSIVHLARSLGLTVVVEGTETEEQIAWLAALGRIEAQGFLFSRPVPSDGIAALLARFGVCGGDSARAAGRDIANAAKQSFGSD

SEQ ID NO: 49997 - protein, 302 aa, Burkholderia mallei
MNATVSSPPSAPASAGAPAAIRTPWSEFWRKFRKQRVALAAGAFVLLLVAVAIVGPHVVPYDPENYFDYDALNAGPSAAHWFGVDSLGRDIFSRIVAGARISLAAGFFSVALGAAIGTFFGLLAGYYEGWWDRATMRVADVLFAFPGILLAIGVVAILGNGMINVICAVAVFSVPAFARLVRGNTLALKQMTYVEAARSIGASDRTIIMRHILPGTVSSVVVYFTMRIGTSIITAASLSFLGLGAQPPTPEWGAMLNEARADMVNAPHVALFPSVAIFLTVLAFNLLGDGLRDALDPKLERR

SEQ ID NO: 49998 - protein, 354 aa, Burkholderia mallei
MRVRAARALRRRSCVPRQASRAVHRASCIVHRATGDRRPATGDRRPATHDARRRCAAHAADAPNQTRHDPNPIQSQRGTMMLLAHISDLHIKRPGALAYRRVDTAAHLARCVARLNALEPRPDAVLVTGDLTDFGDDDEYAHLKALLAPLAMPYYLLVGNHDDRAALRRAFPARVELQSGEFVQYALDLGPLRVIALDSQIPGASGGTLCDARLAWLADQLDAARDRPVIVALHHPPFACGIGHMDAMRLAPDASSRLDALLRRHPNVERVLCGHVHRTMFARFGGTIASAVPAPAHQVTFDLRDGGPSSFSMEPPAFAVHRHAPGAGLASHHVYVDASDGPHPFFEPTGTLID

SEQ ID NO: 49999 - protein, 436 aa, Burkholderia mallei
MNIIWARFLVSLVLLALVSVIIGAIAGPVPGLVFALAMLVVQGFVSTFHTQRLWRLLDAPVYGEVPSAPGIWGEIYYRLHKLAKQWHAQVRQVEQQHSRFIQAIQASPNGVAMLDDRDQIEWCNAIAEVHFGLDAKRDLRQHVTHLVRHPDFVRYLNGQHYDETLVMRGMGGNRQNVLAVQVFPYGENRKLLLTQDITELERTDAMRRDFVANVSHELKTPLTVLSGFLETMRELPLSDDERARYLELMEQQASRMRHIVTDLLVLAKLEGESKPPADRAVDMRTVLDHLRDDAQTLSGGHHEITFKVDETLAVTGAQTEIFSALGNLVTNAIRYTPEGGTIRVEWRRDGAQAVFSVTDSGLGIPAAELPRLTERFYRVDRSRSRDTGGTGLGLAIVKHVLQRHDAQLSIQSEEGRGSTFTARFPAHRTISRRHAA

SEQ ID NO: 50000 - protein, 207 aa, Burkholderia mallei
MNATACAAPAGAAVADDPRGLLRGLLSRRSRWPLTEPAPGPRELDAIFDAALRAPDHGNLRPWRFVVIRGAARHAFGDLLVELADARAPDAPPGSHAHRRAKALAAPLIVALGAALNRASKVPEVEQLLAVGAAAMNMLNAVHQLGYGGFWATGADSYEPAMRDALGFGADERLIGLLYIGTPSAPASDARRPDRAAHVREWLGPAR

SEQ ID NO: 50001 - protein, 658 aa, Burkholderia mallei
MRARRGPRVGRMDDVRPSSTFRGGDVGKIHATAPFRSPSISRSMSRSLEILNEVFGYPAFRGQQGEIVEHVAAGGDCLVLMPTGGGKSLCYQIPALVRSEAGRGAGIVVSPLIALMQDQVAALSEVGVRAAYLNSTLSGAEAAATERALRDGDIDLLYVAPERLMTPRFLDLLERARIGLFAIDEAHCVSQWGHDFRPEYIQLSVLHERFPDVPRIALTATADAITRDEIVQRLALDDARIFVSSFDRPNIRYRIVEKDNARSQLLDFIRAEHTNADGTTDAGVVYCLSRRKVEETAEWLKAQGVRALPYHAGMEFEIRQKHQEMFQREEGVVMCATIAFGMGIDKPDVRFVAHLDLPKSVEGYYQETGRAGRDGLPANAWMAYGLGDVVQQRKMIDESEADDTHKRVQTSKLDALLGLCETASCRRVRLLAYFGETSGPCGNCDTCLEPPATWDATREAQMALSCVFRAQRASGFNFGASHLIEVLRGARTEKVQQRGHDSLSTFGIGAELSEAEWRAIFRQLVAFGYLAVDHGGFGALVLTEASKPVLKGEEKVTLRRYVKPARTRQSSGRSGARVDPTAGMSARERACWERLRAWRAETAKSDGVPAYVIFHDATLAEIARNAPESIDDLRHIPGIGARKLDRFGDEILEVVESA

SEQ ID NO: 50002 - protein, 513 aa, Burkholderia mallei
MVPVAAEHARHDRRRDAGVHRVADPVLSAGGPGRPACRAGRRGMRDATAHCAAKWRGFAARQGSAPGGSARMALSGIFSRARRAGLAAQSRRAARGARRGSPRASNRLPSSTFISPMSQVKRLTDLIAEGKLSGKRVFIRADLNVPQDDHGNITEDTRVRASVPAIQAALDAGAAVMVTSHLGRPTEGEFKPEDSLAPVAKRLAELLGRDVPLVANWVENGVEVAPGQVVLLENCRVNKGEKKNSDELAQKMAKLCDVYVNDAFGTAHRAEATTHGIAKYAPVACAGPLLAAELDALGKALGNPKRPLVAIVAGSKVSTKLTILKSLAEKVDQLIVGGGIANTFMLAAGLAIGKSLAEADLVGEAKAIIDEARKRGASVPIPTDVVVAKEFSPTAAATVKKVADIEADDMILDIGPDTAKALAGQLEKAGTIVWNGPVGVFEFDQFGNGTKTLADAIASSAAFSIAGGGDTLAAIAKYGIHDKVSYISTGGGAFLEFLEGKKLPAVEVLETRA

SEQ ID NO: 50003 - protein, 305 aa, Burkholderia mallei
MLKQRTIKSIVKTVGIGVHSGRKVELTLRPAAPDTGIVFSRVDLPTPVDIPASALSIGDTRLASVLQKDGVRVSTVEHLMSACAGLGIDNLYVDVTAEEIPIMDGSAATFVFLIQSAGIEEQNAAKKFIKVTKPVEIRDGDKFARLDPYFGFKLKFTIDFRHPAVDKTGQELEVDFANTSYVREIARARTFGFAHEVEMMRELGLARGGSMDNAIVLDEYRILNNDGLRYDDEFVKHKMLDAIGDLYVIGHPLLASYTAYKSGHGLNNALLRELLAHEQAYEIVTFDDPKTAPTGFGFDAQTAFA

SEQ ID NO: 50004 - protein, 1169 aa, Burkholderia mallei
VRLSSIKLAGFKSFVDPTHFQVPGQLVGVVGPNGCGKSNIIDAVRWVLGESRASELRGESMQDVIFNGSTTRKPGSRASVELIFDNSDGRAAGQWGQYGEIAVKRVLTRDGTSSYYINNLPARRRDIQDIFLGTGLGPRAYAIIGQGMIARIIEAKPEELRVFLEEAAGVSKYKERRRETENRLHDTRENLTRVEDIVRELGANLEKLEAQAVVATKYKELVADGEEKQRLLWLLRKNEAAAEQDRQRRAIGDAQIELDAQTAKLREVEAQLETLRVAHYSASDAMQGAQGALYEANAEVSRLEAQIKFIVESRNRVQAQIAALVAQQEQWRAQADKAQGDLEAAEEARAVADEKAAIAEDDAAAKHDALPALEARWRDAQTGLNDERGRIAQTEQALNLEAAHQRNADQQLQQLQQRHERLKVEAGGLDAPDEAQLEELRMQLAEHEAMLADAQARLADAQEALPRLDAQRRAAHERVQAESAQIHQLEARLAALKQLQENVQTQGKIQPWLDKHELGALPRLWKKLHVEAGWETALEAVLRERLAALEVSNLDWVKAFATDAPPAKLAFYAPPAAGEPLAAPGALRPLLPLVRIDDAGLRAVLNDWLGTVFVADDLAQALAARMQLPQGGAFVVKAGHVVTRSGVQLYAADSEQAGMLARAQEIENLTRQVRAQALLSDEAKAAAIRAEAAHTQASQALTEVRAQAERATQRVHALQMDVLKLTQAHERYTQRSTQIREELEEIGAQIEEQRALRAESEANFERHDAELAELQARFEDNQLAFESLDETLTNARQEARERERAAHRRALRRAPVREPHRELKRSIQVAHEQAERVAASLEDARAELETINEQTAHTGLQDALEVRAAKEQALGAARAELDDLTAKLRAADEARLAAERSLQPLRDRITELQLKEQAARMTGEQFAEQLATAEVDEAALKEKLMPDMKPSYLQGEVTRINNAINALGPVNMAALDELAAASERKVFLDAQSADLTNAIETLEDAIRKIDQETRALLQATFDEVNRHFSDLFPRLFGGGQAKLIMTGDEILDAGVQVMAQPPGKKNATIHLLSGGEKALTATALVFAMFQLNPAPFCLLDEVDAPLDDANTERFANLVRAMSDKTQFLFISHNKIAMEMAQQLIGVTMQEQGVSRIVAVDMETAAGFAQ

SEQ ID NO: 50005 - protein, 600 aa, Burkholderia mallei
MSMRTEYCGLVTEHLLGQTVSLCGWVHRRRDHGGVIFIDLRDREGLVQVVCDPDRAEMFAAAEGVRNEFCIQVKGLVRGRPEGTINAGLKSGRIEVLCHELNVLNASVTPPFQLDDDNLSETTRLTHRVLDLRRPQMQHNLRLRYRVAIEARKYLDEQGFIDIETPMLTKSTPEGARDYLVPSRVNAGQFFALPQSPQLFKQLLMVANFDRYYQITKCFRDEDLRADRQPEFTQIDCETSFLGEQEIRDLFEDMIRHIFKTTIGVELDATFPVMPYSEAMARFGSDKPDLRVKLEFTELTDAMKDVDFKVFSTPANTKDGRVAALRVPKGGELTRGDIDGYTEFVRIYGAKGLAWIKVNERAKGRDGLQSPIVKNLHDASIAAILERTGAQDGDIIFFAADRAKVVNDSLGALRLKIGHSEFGKANGLVEAGWKPLWVVDFPMFEYDDEEARYVAAHHPFTSPKDEHLEYLETDPGRCLAKAYDMVLNGWEIGGGSVRIHREEVQSKVFRALKIGPEEAQAKFGFLLDALQYGAPPHGGIAFGLDRIVTMMAGADSIRDVIAFPKTQRAQCLLTQAPSPVDERQLRELHIRLRQPEQPKA

SEQ ID NO: 50006 - protein, 478 aa, Burkholderia mallei
MTSEISGKRRWYALVVLCLGVLMIVLDTTIVNVALPSIAAELRFSENALVWVVNAYMLTFGGCLLLGGRLGDLYGHRRLFLAGVTVFTAASLACGLAQTQLMLIAARAAQGIGGAVVSSVALSLIMTLFVEPGDWAKAMGVYGFVYAGGGSLGVLLGGLLTSALSWHWVFLVNLPLGAVVYLLSSALLPKARAQATRAPLDIAGAVTTALMLAVYAVVNGNAAGWLSARTLSWLGGAAALFAAFVAIEARVAHPLMPLALCMKRNVAIANLIGILWAAAMFAWFFLAALYLQRVLGYGPLQIGLAFLPANLIMGVFSLIVSALLVVRFGIRVPIAAGLLAAAAGLMLFARAPVGGDFVADVLPGMILLGTGAGIAFNPVLLAAMSGVDPADSGLASGIVNTSFMMGGALGLAVLASVATARTDALLAARTAVPAAMAGGYHAAFMLGAAFAIVAALIGMRLRAAPNPAAMQGLQGATQ

SEQ ID NO: 50007 - protein, 433 aa, Burkholderia mallei
MTPSDVKATLSFSDNSPSVELPIYKGTMGPDVIDIRKLYGQTGKFTYDPGFMSTASCNSAITYIDGDKGELLYRGYPIDNLAQNADFLESCYLLLKGELPNAAQKKEFVATVTKHTMVHEQMQFFFRGFRRDAHPMAILVAAVGALSAFYHDSLDINDPRHREVSAIRMIAKLPTLVAMAYKYSIGQPFVYPRNDLSYSANFMRMMFANPCEEYQVNDVLVRALDRILILHADHEQNASTSTVRLAGSSGANPFACIAAGIACLWGPAHGGANEAALNMLEQIGTPENIPEFIKQVKDKNSGVKLMGFGHRVYKNYDPRAKLMRETCYEVLNELGLHDDPLFKLAMQLEKIALEDEYFVSRKLYPNVDFYSGIVQRALGIPTSMFTCIFAMARTVGWIAQWNEMIADPEQKIGRPRQLFIGETPRTAKPIEQR

SEQ ID NO: 50008 - protein, 594 aa, Burkholderia mallei
MLPAQKHTLETLLENSVKQVVQASKGDADAAFVLPAIALERPKVAAHGDVACNVALQLAKPLGANPRQLAEQIVAALTAQPEAAGLVDAAEIAGPGFINLRLTPASKQAVIGAVLAQGRAFGASERDHDKRVLLEFVSANPTGPLHVGHGRQAALGDALANVLASQGYAVHREFYYNDAGVQIGNLAISTQARARGLKPGDAGWPEAAYNGEYIADIARDYLNGETVAASDGEPVTGKRDVEDLEAIRKFAVTYLRREQDMDLKAFGVKFDQYYLESSLYTEGRVEKTVDALIAAGMTYEQEGALWLRTTDEGDDKDRVMRKTDGTYTYFVPDVAYHVTKWERGFTKVINIQGSDHHGTIARVRAGLQGLHIGIPKGYPDYVLHKMVTVMRDGQEVKISKRAGSYVTVRDLIEWSGGATPGSEGSPELLDEATITRGRDAVRFFLISRKADTEFVFDIDLALKQNDENPVYYVQYAHARICSVINEWKSRYGATDALLPGADLSPLDSKQAMALMQKLAEYPDVLAHAAGELAPHAVAFYLRELASEFHSFYNAERVLVDEQAPRTARVALLAATRQVLENGLAMLGVSAPSKM

SEQ ID NO: 50009 - protein, 218 aa, Burkholderia mallei
MSAPLTLALSKGRIFEETVPLLAAAGVTVAEDPETSRKLILPTTDPNLRVIVVRATDVPTYVEYGAADFGVAGKDVLLEHGGGGLYQPIDLNIARCRMSVAVPAGFDYANAVRQGARLRVATKYVETAREHFAAKGVHVDLIKLYGSMELAPLVGLADAIVDLVSSGGTLKANNLVEVEEIMPISSRLVVNQAALKLKRAALKPFLDAFERASLGSGA

SEQ ID NO: 50010 - protein, 355 aa, Burkholderia mallei
MSAARRDKIRPFGLCRPPPALFFSVQKILIVRVSSLGDVVHNMPVIADIRRRHPDAQIDWLVEEGFADLVRLVDGVRDVLPFSLRRWRKRLSASQTWREIRAFRRRLAEERYDLVIDCQGLIKTAWVASWARGPLVGLGNRTDGAGYEWPVRFFYDRRVPIAPRTHVVERSRQLVAAALGDPAPAPGDPIDFGLDTHGAARALAALDLNLPVPYVVFVHATSRADKQWPDEAWTGLGEALVRRGASLVLPWGSDAERATSERLAKAFGAAAIVPPKLSLPVVVGLVDGAAATVGVDTGLVHIAAALKRPTVELYNFATAWRTGGYWSPNVVNLGTAGAPPSLSQAKDALASFGLL

SEQ ID NO: 50011 - protein, 399 aa, Burkholderia mallei
MRDAYLAHLRGTLEQIRADGFYKTEREIASPQAADIRLAGGTHVLNFCANNYLGLADDSRLIAAAQAALEQDGFGMASVRFICGTQTVHKQLEAALSAFLKTDDCILYSSCFDANGGLFETLLDENDAIISDELNHASIIDGIRLSKARRFRYKNNDLADLEAKLREADAAGARFKLIATDGVFSMDGIIANLKGVCDLADRYGALVMVDDSHAVGFIGEHGRGTPEYCGVEGRVDIVTGTLGKALGGASGGYVAARREIVELLRQRSRPYLFSNTLTPSIAAASLKVLELLASDEGACLRERVRANGAHFREKMSAAGFALVPGEHPIIPVMLGDAQVASKMADALLAEGVYVIGFSFPVVPRGRARIRTQMSAAHTREQIDRAVDAFVRVGKTLGVI

SEQ ID NO: 50012 - protein, 341 aa, Burkholderia mallei
MAQYMKAAVVHAFGEPLRIEEVPVPTPGAGQILVNVKASGVCHTDLHAADGDWPVKPTLPFIPGHEGVGFVAAVGEGVRHVKEGDRVGVPWLYTACGHCEYCQTGWETLCHEQQNTGYSVNGSYAEYVLADPNYVGHLPSNVAFDEIAPILCAGVTVYKGIRVTDTRPGQWIAISGIGGLGHVAVQYAKAMGLHVVAVDVAPQKLELARKLGATFVVDASKDDPAAVIQKEIGGVHGVLVTAVSRGAFAQALGMVRRGGTVSLNGLPPGDFPLPIFSTVLNGITVRGSIVGTRRDLQESLDFAAEGLVRAHIHRDKLEHINGVFSALREGKVDGRIVLTGQ

SEQ ID NO: 50013 - protein, 389 aa, Burkholderia mallei
MLLALAQWLQGDASFLRLFTYLTFRAVMATITALVIGLVCGPWVIRKLTQMKVGQAVRKDGPQTHLVKSGTPTMGGVLILIGIAVATLLWGDLTNRFIWIVMLVTFGFGVIGWVDDYRKVVYKDPRGMSSREKYFWQSVIGLFAAVYLAFSVSEANNVRVFDLFMAWVRSGLSMGLPARADLMLPFLKSISYPLGVWGFIALTYFVIVGASNAVNLTDGLDGLVIMPVVLVGASLGVFAYVMGSAVYSKYLLFPHIPGAGELLIFCSAMGGAGLAFLWYNTHPAQVFMGDVGALALGGALGTVAVIVRQEIVLFIMGGIFVAETLSVMLQVTWFKYTKKRYGEGRRIFKMAPLHHHFELSGWKETQVVVRFWIITLMLCLFGLSTLKLR

SEQ ID NO: 50014 - protein, 522 aa, Burkholderia mallei
MALALASASASRSCRMRKAGESIGDARPAVGSRRMRERPAGHPSIFMARRIVVAKRVLRRGDTHAPHRGARAMMPVYASAAAHTVEPCVFLRPDVESRDLAYRLPRSRQARKSEPVFGSGAADAKPSAAIVPTRPFNKRKAIQTARRPIDAPGAVQARPRRPTAACREFRVRADLGACSRRRTRIRERGVDLDTRPSPHPPIRPFAHSHCARRMAHGAWRTADDAWRGRLPAFGRRAAADSVSAPSSRNAARQARRLIARRMPRSTAAPSGERLAARFFLFGATIWPYPFRAELDLIRRPIIDPEVLPIETTGADLPVVRPSSMTPDGLRERFAEPPEWTQEPAEAQLAHGVDPRSAAVLVPLVVRERGLTVLLTQRADHLNDHAGQISFPGGRREPDDRDANATALREAREEIALAHERVELLGALPDYLTGTGFCVTPVVGLVHPPFTVQPDTLEVAEIFEVPLDFLMNPAHHQIRVLRWEGGERRFFAMPYPRGPVGGQYFIWGATAGMLRNLYRFLSA

SEQ ID NO: 50015 - protein, 238 aa, Burkholderia mallei
MSPYIAEFIGTALLVLLGNGAVANVLLAKTKGKGADLIVIVMGWAMAVFVAVYVTASFSGAHLNPIVTISLALAGKFAWAKVGGYVASQMLGGMAGAFLVWLAYRQHFAKEADPDLKLAVFCTAPAIRSVTHNVLTEAICTFVLILGVLYLASPQVGLGALDALPVGLLVLGIGISLGGPTGYAMSPARDLSPRIMHALLPIPGKRDSDWRYAWVPVLGPLVGGVLAANLYLYLHTTH

SEQ ID NO: 50016 - protein, 378 aa, Burkholderia mallei
MNGILRLAFKLLVNDSAKFTALLVGITFAVFLMVEMTSLFAGILDKSSSTVINVGAKMWVMDPGVQTIASSIGMPAYVLDAVRSVDGVKYAVPIYSGGALVKLADGTYQAVTVIGLDDASLLGRPTMKAGRIEDIYAENGFIAIDDAEFPKLKNPALGTTFELNDHRGVIVGIAKVASSGLFGTPTLYTTYARATRYIPSTRYTTSYILVEPKSQRDIARIKREVAALGYRAYTKEEFMRRISDFYKYETGVGTNILLMTAISFIVGLSISGQTFYAFIIENLEKFGALKAIGAKNRELVAMILFQATFTALTGYGLGVGLCSALISVARLRLPSYAALITYGNLALAFGMVVVIAGLSSYLGVRRVLRIEPFDIFRG

SEQ ID NO: 50017 - protein, 550 aa, Burkholderia mallei
MAAKDVVFGDSARAKMVEGVNILANAVKVTLGPKGRNVVLERSFGGPTVTKDGVSVAKEIELKDKLQNMGAQMVKEVASKTSDNAGDGTTTATVLAQSIVREGMKYVASGMNPMDLKRGIDKAVAAAVEELKKISKPCTTNKEIAQVGAISANSDSSIGDRIAEAMDKVGKEGVITVEDGKSLADELDVVEGMQFDRGYLSPYFINNPDKQVAVLENPFVLLHDKKVSNIRDLLPVLEQVAKAGRPLLIIAEDVEGEALATLVVNNIRGILKTVAVKAPGFGDRRKAMLEDIAILTGGQVIAEETGLTLEKATLAELGQAKRIEVGKENTTIIDGAGEAVNIEARVKQIRTQIEEATSDYDREKLQERVAKLAGGVAVIKVGAATEVEMKEKKARVEDALHATRAAVEEGIVPGGGVALIRARTAIASLTGVNADQNAGIKIVLRAMEEPLRQIVTNGGEEASVVVAAVAAGKGNYGYNAATGEYVDMVEAGVVDPTKVTRTALQNAASVAGLLLTTDAAVAELPKEDAPMPGGMPGGMGGMGMGMGMDM

SEQ ID NO: 50018 - protein, 368 aa, Burkholderia mallei
MLSFAVGFIVSLLVTLLIVRYAHLHERFSIDNDLAGVQKFHARPVPRVGGTGILIGLVVATALLSRRYPAIAGGILGLAACGLPAFASGLIEDLTKKVTPAVRLVCTMAAAALAFALMGIAITRISVPPLDFLLGYTAISAAVTVLAVAALANAVNIIDGFNGLASMVAFMMFASLAYVAFQVGDPVVMSGSIVMMGAIMGFFIWNFPAGLIFLGDGGAYFIGFMLAELAISLVMRHREVSAWYPVLLFMYPIFETCFSIYRKKFVRGMSPGIPDGVHLHMLVYKRLMRWAVGTRAAHELTRRNSLTSPYLWLLCLVAVIPATLFWQHTIHLFAFVIVFALTYVWLYVSIVRFKSPRWMVIRKRLPKR

SEQ ID NO: 50019 - protein, 608 aa, Burkholderia mallei
MTRALRNIAIIAHVDHGKTTLVDQLLRQSGTFRENQQVAERVMDSNDIEKERGITILAKNCAVEYEGTHINIVDTPGHADFGGEVERVLSMVDSVLLLVDAVEGPMPQTRFVTKKALALGLKPIVVINKIDRPGARIDWVINQTFDLFDKLGATEEQLDFPIVYASGLNGYASLDPAARDGDMRPLFEAILQHVPVRPADPDAPLQLQITSLDYSTYVGRIGVGRITRGRIKPGQPVVMRFGPEGDVLNRKINQVLSFQGLERVQVDSAEAGDIVLINGIEDVGIGATICAVEAPEALPMITVDEPTLTMNFLVNSSPLAGREGKFVTSRQIRDRLMKELNHNVALRVKDTGDETVFEVSGRGELHLTILVENMRREGYELAVSRPRVVMQEIDGVKHEPYELLTVDLEDEHQGGVMEELGRRKGEMLDMVSDGRGRTRLEYRIPARGLIGFQSEFLTLTRGTGLMSHIFDSYAPVKEGSVGERRNGVLISQDDGAAVAYALWKLQDRGRMFVKPGDALYEGMIIGIHSRDNDLVVNPIKGKQLTNVRASGTDEAVRLVPPIQMSLEYAVEFIDDDELVEVTPQSIRLRKRHLKEHERRRASREAEAG

SEQ ID NO: 50020 - protein, 478 aa, Burkholderia mallei
MHRATKIVATIGPASSSPEVLSQMMHAGLDVVRLNFSHGSADDHRERAEMVREAARRVGREIAIMADLQGPKIRVGKFEAGKTTLTPGQPFILDATCELGNDERVGLDYKDLPRDLKPGDVLLLNDGLIVLKVDRVLGDEIHTTVKVGGDLSNNKGINRQGGGLSAPALTAKDMEDIRTAMSLGADLVAVSFPKNATDMEMARQLANIAGAPYGIKPKMIAKIERAEAIPALQEILDASDGIMVARGDLAVEVGNAAVPALQKRMIRMARESNKLVITATQMMESMIHAPVPTRAEVSDVANAVLDGTDAVMLSAETATGKYPAVTIEAMAAVCVEAEKSEHVELDKDFLDRTFTRIDQSIAMGALFTAYHLGAKAIVALTESGATALWMSRHYTHVPIFALTPRVGSERAMALFRNVTPLHVDFNSDRDSALQQALELIVRRGYVAHGDMVVLTVGEPMGQAGGTNTLKIVRVGEHY

SEQ ID NO: 50021 - protein, 130 aa, Burkholderia mallei
MPHIIVEYTANIRDDARIPVLLKSINETLIAQGGVFPTGGIRSRAIELQDYCVADGTADDAFVHVTLKIGAGRDDATKKAACDALFDAIKAHFEALYARRYLALSMELAEFSETGSYKHNNIHARYKRGA

SEQ ID NO: 50022 - protein, 87 aa, Burkholderia mallei
MKQGIHPDYREVVFQDMSNGFKFITRSTIQTRETIEFEGKTYPLAKIEVSSESHSFYTGQQKIMDTAGRVEKFKNKFGARASGKAAK

SEQ ID NO: 50023 - protein, 317 aa, Burkholderia mallei
MSDDYFQPQSGNAMPRFAGIATMMRLPQAASAAGLDACFVGVPFDLGTSNRTGARFGPRQIRSESVLLRPYNMATRAAPFDSLRVADLGDVATNPYNLADSIARIEAAYHAILAHGCRPVTLGGDHTITLPILRAMHRRHGRVGLIHVDAHADVNDTMFGEKIAHGTPFRRALEEGLLDGDRVVQIGLRGTGYAAEDFDWCRDQGFRVVQAEACWNRSLAPLMDEVRARVQGGPVYLSFDIDGIDPAYAPGTGTPEIAGLTVPQGLEIVRGAWGLDIVGADLVEVAPPYDPFGTTALLGANLAYEMLCVLPGVARRA

SEQ ID NO: 50024 - protein, 719 aa, Burkholderia mallei
MSAHHDTRGLAQRRPAGVAYLRIAMTQHSATRSMFDPALVRPAIVDSFKKLTPRTQLRNPVMFCVYVGSILATILWIAALTGQAEARAGFILAVALWLWFTVLFANFAEAIAEGRSKAQAASLRSAKKDVMAKKLNEPHPKSPVRIMTASDLRRGDVVLVEAGDTIPADGEVIEGVASVDESAITGESAPVIRESGGDFSSVTGGTRVLSDWIVVKVTANPGEAFLDRMIAMVEGAKRKKTPNEIALTILLVALTIVMLLATATLLPFSMFSVDAMHSGHVVTITALVALLVCLIPTTIGGLLSAIGVAGMSRMMQANVIATSGRAVEAAGDVDVLLLDKTGTITLGNRQASAFLPAPEVTEATLADAAQLSSLADETPGGRSIVVLAKERFNIRQRDMGALHAVFLSFSAHTRMSGVDLSPEREIRKGAADAVKKYVESHGGRFPAEVTNAVTDVARRGSTPLVVAEKRGALARVLGVIELKDIVKGGIKERFAELRKMGIKTVMVTGDNRLTAAAIAAEAGVDDFLAEATPETKLSTIREHQAAGRLVAMTGDGTNDAPALAQADVAVAMNTGTQAAKEAGNMVDLDSNPTKLIEIVEIGKQMLMTRGSLTTFSIANDIAKYFAIIPAAFATTYPQLNALNVMHLATPASAIMSAVIFNALIIVLLIPLALKGVKYRPLGAATLLRRNLLVYGLGGILVPFVGIKLIDVVLAALGWV

SEQ ID NO: 50025 - protein, 447 aa, Burkholderia mallei
MRAVAACDALGGAERRAIRQYTNTRYANTRYAAMSRERDAIEGSPKCRAGLGKPDVNRAGASESVGFVESCEPREPREPREPREPPRTPENPTNSPIPTNSAIRTIRAEAPDGPDHATASRAVRRVRRALLVARRVLCRAAVCGFERLHRLPELDERVRTLGRQRVRDEIDRLLPRIRLKLAILRARGQLGAHQRIGAQPDLGVERIRAGAARREHALLVGAGQPRRTRRVAERLDERRPHVARARGRVHAEPVLRFAEDRAERRFVDLPAEFGILPDLRGTRVGDLLDRFVDEMPDRLFRVARGPIAADVAHALQPDPAGRAVRRAVAEQLPERFADLAEDALDLLCERRARLRFAALDVNVERRLLDVRESADSRVVSHVLLSVEGKEVRRACRVACRASRWRARLSGPISFYEASRRLRFHKLLMRGRRLRHAPHAPARDRMRR

SEQ ID NO: 50026 - protein, 507 aa, Burkholderia mallei
MITLTPGRLTLPQLRRIARENVQIALDPASFAAIDRGAQAVADIAAKGEPAYGINTGFGRLASTHIPHDQLELLQKNLVLSHAVGVGEPMARPVVRLLMALKLSSLGRGHSGIRRVVMDALVTLFNADVLPLIPVKGSVGASGDLAPLAHMSAVLLGIGDVFIRGERASAAEGLRVAGLAPLTLEAKEGLALLNGTQASTALALDNLFAIEDLYRTALVSGALSVDAAAGSVKPFDARIHELRGHRGQIDAAAAYRSLLDGSAINVSHRDCDKVQDPYSLRCQPQVMGACLDQIRHAAGVLLIEANAVSDNPLIFPDTGEVLSGGNFHAEPVAFAADNLAIAAAEIGALAERRIALLIDATLSGLPPFLVKDGGVNSGFMIAHVTAAALASENKTLAHPASVDSLPTSANQEDHVSMATFAARKLTDIAENVANILAIELLAAAQGVDLRAPHATSPALQHAMKTIRADVAHYDLDHYFAPDIAVVARRVRERAFATLSPLSFESEQ

SEQ ID NO: 50027 - protein, 433 aa, Burkholderia mallei
MLDIQLLRKDLDGVAKRLADRGYPLDVAAFSALEAERRAIQTRTEELQARRNSLSKQIGAMKGRGEDTSAVMAEVGGIGDEMKASAVKLDEIQARLSELMLEMPNVPHESVPVGRDETENVEVRRWGAPRQFDFDVKDHVDVGTPLGLDFETGAKLSGARFTVLRGPIARLHRALAQFMLDTHTQQHGYSETYTPYIVNPDVLYGTGQLPKFAEDMFRVEKGGAENTVTQYLISTSEISLTNTVRDSIVEASALPIKLTAHSPCFRSEAGSYGRDTRGMIRQHQFDKVEMVQIVAPEASYAALDEMVGHAEAILQKLELPYRVVALCTGDMGFSAAKTFDLEVWLPAQNTYREISSCSNTESFQARRMQARFRNAQGKPELVHTLNGSGLAVGRTLVAVLENYQNADGSVTVPVALRPYMGGVERIDAPSSAA

SEQ ID NO: 50028 - protein, 359 aa, Burkholderia mallei
MSEPTPIAPFASSATPAAPYTRGAALPQLLRQRILILDGAMGTMIQRYKLDEAAYRGERFKDFPRDVKGNNELLSITQPRIIREIHDQYFAAGADIVETNTFGATAVAQADYGMEALVVEMNVASAALARESAAKYATPEKPRFVAGAIGPTPKTASISPDVNDPGARNVTFDELRDAYYQQAKALLDGGVDLFLVETIFDTLNAKAALFALDQLFDDTGERLPIMISGTVTDASGRILSGQTVEAFWNSLRHAKPLTFGLNCALGAALMRPYIAELAKLCDTYVSCYPNAGLPNPMSDTGFDETPDVTSGLLKEFAQAGLVNLAGGCCGTTPEHIAAIAKALAEVKPRRWPSQYSEAA

SEQ ID NO: 50029 - protein, 455 aa, Burkholderia mallei
MLDNLTQRMARVVKTLRGEARLTEANTQEMLREVRLALLEADVALPVVRDFIAKVKEKALGEDVIGSLSPGQALVGVVQKELTAVIGGDYEGKAAELNLAVAPPAIILMAGLQGAGKTTTVGKLAKLLREKYKKKVLTVSCDVYRPAAIAQLKTVSEQVGADFFPSTPDQKPVDIANAAVDWAKRHYHDVLLVDTAGRLGIDEAMMQEIAALHAALKPVETLFVVDAMLGQDAVNTAKAFNDALPLTGVVLTKLDGDSRGGAALSVRHVTGKPIKFVGVAEKLDGLEIFHPDRMANRILGMGDILALVEEAQRGVDIQAAEKLANKVKKGGDFDLNDFRAQISQMKNMGGLSSLMDKLPAQFQQAAAGADMSQAEKQIRRMEGIINSMTPAERAKPEIIKATRKRRIAAGAGVPVQEVNRMLNQYDQMRTMMKKLKGGNLQKMMRGIKGMMPGMR

SEQ ID NO: 50030 - protein, 563 aa, Burkholderia mallei
MSSASTSMPSGTDARFAGRARRATACSAATRGGLARPPRRIGMSGSRWEEWMINVGAFVASARSGARVVVGGDARGPVVSAARLGMKERLFAFLAHVPLLKHCDAVRRYAEQVRMENRRSLEVFVLALSKRYGPEGAKAAFDYGARRDGAPLDQRRVRNMVSIAEHFHGTGDAKPLARQMVFRSWECRGLDHPGHASLTIKNQADADAGRHVYEHVSWWPNQRLGSKEHFDRIEPKTLDGYRIDKRSEISSATEQRLREGDAARRKILADGFKYANQDERHDALFFPRAGQKLDKDAEWGLSARKVYFPAIGFNHDRRDTDRPRAFVLFGLNEAAMLRDARTVKEGAKSGELKYRMISKKENCASMALRVLRAGGAEHFVPYTAAWISEDPNHAHAYALAVQARIDALNQRRADVERRCERLRDSASVRQAWRAFSEAGGASASPLAEDAGRGRASAHMRQARLDEHAREVERIGAYFAELSAGRSGKHRDRADADLADAMKRCAPSARDDVAALTRKASVLVETLGRHLDAPPPSDSSALRRLAAHAMIGRIEAFMAAAIAA

SEQ ID NO: 50031 - protein, 343 aa, Burkholderia mallei
MTITPQEALQRTIEHREIFHDEMLHLMRLIMRGDMSPVMAAAIITGLRVKKETIGEIAAAATVMREFARRVEVEDNANFVDIVGTGGDGSHTFNISTATMFVAAAAGAKVAKHGNRGVSSKSGSADVLEALGVNIDLQPEQVAASIAETGMGFMFAPNHHPAMRNIAPVRRELGVRTIFNILGPLTNPADAPNQLMGVFHPDLVGIQVRVMQRLGAQHVLVVYGKDGMDEVSLGAATLVGELRDGEVREYEIHPEDFGMQMVSNRTLKVESADESRVMLLEALGNKPGVAREIVTLNAGTALYSADVAGSIADGIQLARDAIASGRAREKVDELVRFTQQFKR

SEQ ID NO: 50032 - protein, 208 aa, Burkholderia mallei
MKHDDPNLIVRYTANERSNHWITAISFVLLALSGLALFHPSMFWMTALFGGGQWTRILHPFVGLVMFASFAVMVVRYWRHNLLDAGDRQWLRQMDDVLANREDKLPEVGRYNAGQKLLFFVMVACLLLLLVSGIVIWRRYFSLYFPIGVIRAAAVVHAAAAFALIVGIVVHVYAALWVKGSIGAMVRGTVTVGWARKHHPKWFRESVK

SEQ ID NO: 50033 - protein, 99 aa, Burkholderia mallei
MNRLQLTASVVEREPVRYTPAGVPIASATLQHRTEVVEAGIARQVELTIPAVAAGEASGRLEACEMGVETLFTGFLAKKHRNARTLVFHITALQDIGKD

SEQ ID NO: 50034 - protein, 451 aa, Burkholderia mallei
  MISC_FEATURE (447)..(447): X=any amino acid
YSHYVGDIFGVPLAVEGLMAFFLESTFVGLVFFGWNRLSKVQHLVVTFLVALGSNLSALWILVANGWMNNPVGAEFNYQTMRMELANLFDVLFNPVAQVKFVHTVSAGYVTAAMFVLGVSAWYLLKKRDVDFALRSFAIAAGFGLASTLCVIVLGDESGYTTGEVQKMKLAAIESEWETQPAPASFTLIGLPNQEAERTDYAIKIPYALGLIATRSVSEPVIGLRELAKRSEEHIQSGMIAYGALQKLKAGDTSAETKATFDQHKQYLGYGLMLKQFTQNVTDATPDQIKAAAKQTIPPVAPVFFSFRIMVFLGFLFLATFIAAFWFCARRQLLQDNRRWFLRYAVWAIPLPWLAAEFGWVVAEVGRQPWTIAGILPTHLSASSLTATDLYLSLAGFIVFYTALFIIEITLMFKYARLGPSSLHTGRYHHEQAGRPLEKAVAGTAAXRPRP

SEQ ID NO: 50035 - protein, 265 aa, Burkholderia mallei
MIQIDLSGQVAVVTGGSSGIGYASAELFLRAGASVAICGRGDERLASAHARLVRQFPRERVLAVRCDVLDEADVTAFAQAVAERFGGADMLVNNAGQGRVSTFADTTDDAWRDELELKYFSIIRPTRAFLPLLRASSAPSITCVNSLLALQPEPHMVATSSARAGTLSLVKSLATELAPERVRVNSILIGIVESGQWRRRYDAQAAPGESWEAWTAALAAKKNIPLARFGRPDEAAWALFYLATNLSSYTTGSHIDVSGGFARHV

SEQ ID NO: 50036 - protein, 284 aa, Burkholderia mallei
MSRPDQAARRRAIAAELHVSPTFDARDEAERRIGFVADYLRTAGLRACVLGISGGIDSSTAGRLAQLAVERLRASGYDARFVAMRLPYGAQHDEADARRALAFVRADETLTVDVKPAADAMLAALAAGGLAYLDHAQQDFVLGNIKARERMIAQYAVAGARNGVVIGTDHAAESVMGFFTKFGDGGADVLPLAGLTKRRVRALARMLGADEPLVLKTPTADLETLRPQRPDEHAYGITYEQIDDFLEGKPMDDAVAETVLRFYDATHHKRALPYTMFDWPGHPA

SEQ ID NO: 50037 - protein, 793 aa, Burkholderia mallei
  MISC_FEATURE (59)..(59): X=any amino acid
GVRSGVRSGVRSGVRSGVRFGVRFGVRFGVRFGVRFGVRGVRSRAAPLLAAPPVRPRAXRNPRPAARHGARRSRARERRRAARSPSRCSPRRSPRTRCRPTTTCGATGAAPTGCCSHATARRFSARAWSSPSGRGDWIALADVSPAFREAIVVSEDKRFYAHSGVDWRGIAGAAWGNLWNERTRGASTVTMQLAGLLSDTPRRSGQRSLPQKAAQAMNALRLERGWRKDQILEAYLNLVPFRGETVGLDAMSHALFGKAPSGLDVRESAVAAALVRAPNASAAKVAERACRILRDLRAAQPCESLDGYVRFVTSAPPGAARDGGEALAPHFARRVAAEVKPGAGARVRSTLDAPLQRFARDTLTRALAELNAPAHRRHVQDGAVVVIDNATGEIRAWVGSSGALSAARDVDAVLAPRQAGSTLKPFLYAQALDERRLTAASLLDDAPIDLAAGGGLYIPQNYDKHFKGWVSVRTALGGSLNVPAVRTLVLVTPHRFARTLTALGLPLAEEGDYYGFSLALGSADVTLLSLANAYRALANGGVARATLDVPGGSGSRNGNGNGNGNDAVTSAPFAPTVSKSKVGASAVFPRAVSTKAEPAKPVPTAALSPTSASTSTAGKPAAHAAAGTRVFSEAAAYIVTDILADNNARVRTFGFDSPLATRFFSAVKTGTSKDMRDNWALGYTSRYTVGVWVGNADGSPMWDVSGVTGAAPVWAAIVGYLHRDLASRAPRPPAGVEQRRVAFERDVEPARPEWFIAGTALDTVRLAAPATAAAGGADRPRAPLSIGAPTDGT

SEQ ID NO: 50038 - protein, 276 aa, Burkholderia mallei
MSAMYKAIATDLDGTLLNSDHQLDPYTIDTVRRLAGSGVPFVIATGRHYADVAGIRDLLGIRPYLITSNGARVHGPDDTRIHAQDVPADAVRQLVRPELVGTHGRVIVNLFTNDGWLIDRDAPQLLAFHQDSGFRYEIVDMLAHDGADIAKVLYIGEPEDLAVVSGNLARRFGDALYVTYSLPDCLEVMTANVSKGRALRVVLERLGVDPAHCVAFGDNMNDIDLLETAGYPFMMNNANPDLALRLPKVPRIGNNFEAGVARHLRALFALEDSIAH

SEQ ID NO: 50039 - protein, 296 aa, Burkholderia mallei
MSSSDSVFPVPAPLQCGRFTLTFERPLVMGILNVTPDSFSDGGRYVARDAALAQAERMLAEGADILDIGGESTRPGAPPVPLNEELERVIPLVEALRGRNVPLSIDTYKPAVMRASLAAGADLINDIWGLRQPGAIDAVRDSACGLCVMHMLGEPRTMQVHAPEYRDVIDDVRAFLAERADALVQAGVDARRISVDPGFGFGKSVIEHNYALLAHLPRTAPARPDGRAYPILAGMSRKSMLGAVIGRPAPERIAASVAAAVCAAERGAAIVRVHDVAATVDALKVWSAVRDAARRA

SEQ ID NO: 50040 - protein, 901 aa, Burkholderia mallei
  MISC_FEATURE (882)..(882): X=any amino acid
  MISC_FEATURE (884)..(884): X=any amino acid
STIAFTLCFAVWMMFAILGIPLKKTLGLNDTEFGLIAAMPVLTGSLIRVPLGIWTDRYGGRIVFFILMLVTVVPIWLISYATELWQFLLLGLFVGLAGGSFSVGTPYVARWFPKARQGLAMGVFGAGNSGAAVNKFVAPALIAAAGTWTIVPRVYAVAMLAMALLFWLFSATDPAHRSTNATSLRAQLRVLKNPRVWRYSQYYSVVFGGYVGLSLWLTQYYVGEYGFGIQSAAFLAACFSLPGGVLRAIGGWLSDRYGAYRTTWWVMWVCWVMFFLLSYPPTDFTIRAAHGPLGFHLSLTPVAFTALLFAVGIAMAVGKASVFKFIADEFPNDIGAVSGVVGLAGGLAGFALPILFGALVDLTGVRSTCFMLLYGAVSVSLVWMYFSFRAERAAHDQRVLATAPREPCFLVIFVHSTDSIMSTSLLVRWDPENPAFWQAKGRPVAWRNLAISIPALMLAFVVWSLWSVVVVNLDRASFHFSKNQLFWLTALPALSGATLRIFYSFLVPIFGGRRFTAISTATLLIPALGMGFALRDPGTGYPTLLILALLCGFGGANFSSSMANISFFFPKAKKGLATGLNAGIGNLGVSVVQFVTPLVISAGLFGALAGDPQSVVAHGATTNLWLQNAGFVWVPFIVVATLAAWFGMNDIADAKASFAEQAVIFRRLHNWLMCWLYVGTFGSFIGFSAGFALLTKALFPNVNPTAYAFIGPLAGALMRPVGGWVSDRIGGARVTFWTFAAMIAAVGGVIATLPSGGAAGSFAGFLAMFIVLFALTGIGNGSTFRMIPVIFLTERQRAAQGQDEAARKQAVLDAGKESAAVLGFSGAIGAYGGFFIPKSFGTSLDMTGSAVPALVCFIAFYVSCVAITWWFYARRNASMPCXRXRADASRLFAGCGALRPA

SEQ ID NO: 50041 - protein, 321 aa, Burkholderia mallei
MKRERRARRPRLHAAAGGLWLVVAALPPGARAATCEGDKTLVTLPAIAVAADAPVGTVLWRQKGIAFSTYCTLGWFDTSNIYVWRADLHSALQPYGLTFWLTYGGQGGNTALQIKEPMVVDLGGKAGYASGSVDLELRKTGVTPAQGVVGAADIPAFYLDSNTNYNKGSHYIRGLTNISFVSYTCDIDTGSRSMNVPLGDVRVDRFSGIGSTFADRNFGIGMTCTQPAGTYDIALTFSATADSSGAPGVLAITQGASSASGVGIQLLMNGSPVTFGAVLDAGSATAGATLTIPMTARYYQTGRVVTPGAANGIATFAVSYK

SEQ ID NO: 50042 - protein, 148 aa, Burkholderia mallei
MSLRDQISEDMKAAMRAKESERLATIRLLLAAIKQREVDERVTLDDAGVTAVVDKMIKQRKDSISQFEAAGRTDLVEKEQAEVAVLSAYLPAQLSDAEVAAEVQAAVAQTGAAGPQDMGKVMGVLKGKLAGRADMTAVSALVKAALSK

SEQ ID NO: 50043 - protein, 613 aa, Burkholderia mallei
MRFDISVVVYRETEETLDDLLDSLAAQASCPDTVVRVWLRNNDPADADRWDRFVHDRSWYPFEISISHSPQNVGFGRAHNATFEMADAPFFFVLNPDTRLHSTAVSALRKAIDTSAGDVGAWELRQLPYEHPKLYDPVSLSTDWVTGAAVVFRRAAFAQVRGFEPRIFMYGEDVDLSWRMRAAGWVLHYVPHAVVVHPTYSKPMEAKPLQIAGGVVASLQLRTRFGSWLDIARGLGCWVAELARPARFPHARRTHLMALARYLRSAAYFRRTGARYRKGGFRPGFRFWGYGDRRDGAFFAFAVEELDARTVPLVSIIVRTHRRPALLREALMSLSHQTYPRVEVIVVEDGEPNSRAMIEREFAGRLDIRYEATGMPVGRSAAGNLGLSLAAGEWLGFLDDDDQFYADHVEAIMQVARSGTNRAVYGASHEIPTEFAQLTDEAATYREEPASLKYRPYSRLAMWQENLAPIQAVLFHRSLYDELGGFDEDLDQLEDWVLWVRYSCATDFSSFLRVTSRYRVPMAAKVAVERQAKLHEAYAVALERQRAMRVTLSPFDVVAMAEEQARRHAIVHVSRQTARKLIVRVPFMRTLLSSQAGWRRRMRALYRRMSPRS

SEQ ID NO: 50044 - protein, 200 aa, Burkholderia mallei
MSIKPPSALSELVEALRALPGVGPKSAQRIAYHLMQHDREGAERLGRSLLFATEHLRHCEKCNTFTEAQICEVCSDPERDPALLCVVETPADQIMLEQTMTYRGLYFVLMGRLSPLDGIGPKEIHFDRLVRRASDGIVKEVVLATNFTNEGEATAHYLGQTLKARGLAVTRLARGVPVGGELEYVDAGTIARAMLDRRTL

SEQ ID NO: 50045 - protein, 416 aa, Burkholderia mallei
MALIVHKYGGTSMGSVERIKNVAKRVAKWHQAGHQMVVVPSAMSGETNRLLGLAKEISSQPSPRELDMIASTGEQVSVGLLSIALQDIGVEAVSYAGWQVPIKTDSAYTKARIHSIDDERVRRDLDAGKVVIITGFQGVDPDGHITTLGRGGSDTSAVAVAAALEADECLIYTDVDGVYTTDPRVVEEARRLDSVTFEEMLEMASLGSKVLQIRSVEFAGKYRVKTRVLSSLTDPQIPLDEEMRSGTLITFEEDETMEKAVISGIAFQRDEARIAVMGVPDKPGIAYQILGPVADANIDVDMIIQNQSVEGKTDFTFTVGRGDYQKAMDILTNQVKGHVNAEQVLGDPKVSKVSVVGVGMRSHVGVASTMFRTLSEEGINIQMISTSEIKISVLIDEKYMELAVRALHKAFELDQA

SEQ ID NO: 50046 - protein, 690 aa, Burkholderia mallei
SLLVELLTEELPPKALARLGDAFAEGIAQRLAARDLIEGELAFERYATPRRLAVVVQNVRAVAPERQVREKVLPVSVALDAQGAPSRAAREEARGARHPNLSIADLERAHDGKAEAFFVNYAAPGATLADGLQAALDETLAKLPIPKVMTYQRPDGTDVQFVRPVHRLTVLHGDRIVPVAAFGIDAGDTTLGHRFLSDGLVAIRHANAYADTLREKGRVLAHFAQRRETIRTQLEANANGDRVVMPEALLDEVTSLVEWPVVYPCRFEDEFLQVPQECLILTMQTNQKYFALTDAAGKLRSRFLIVSNIETKTPGEIVEGNERVVRPRLADAKFFFEQDKKKPLAERVPLLANVVYHNKLGSQLARVERLETLAGEIAPAIGADATVAIRAARLAKADLLTDMVGEFPELQGTMGTYYARHDGEPEDVAIACSEHYQPRFSGDALPTTPVSTAVALADKLETIVGIWGIGLAPTGEKDPFALRRHALGVLRLLLEKQLPLDLVWLLRTAYERFAAVPGVAESTDAIHAFFIDRLRGLLRERGYTAGEIDAVLSLNPTRLDDIVARLNAVREFTRLAEAEALAAANKRISNILKKSESGANGAVQPALFVEAAEKALAEQLADVTPRVQSQLEARAYTGALTALAALRAPVDAFFDGVMVNADDPALRANRLALLSALHQQMNCVADISKL

SEQ ID NO: 50047 - protein, 453 aa, Burkholderia mallei
IAYSGGLDSTVLLHAAARIAGAGRCIALHVHHGLSANADAWLAHCAETAQALGARFDAARVDVPRASGQGIEASARDARYRALETMCARYGARTLWLAQHADDQAETVLLQLLRGAGIAGLAAMAPQYRPALADVVRMRPLLHLLRAQLERYAQQHALRWIDDESNTDTRYARNALRVDVLPALAPHFPGFRDALARTAQHAAAAQRLLDDLAAIDLRAVARADVRVLSRDAFVALDDERGANLLRYWMRSLGLPGASAARLAEMVKQLRAARDAHALRVDHAGWRLRLYRDDVQWEAGDGAASEAARADVADDDAADARDDRADASAAARLPACALAWRGHEVWRLPGWRGSFVFSPVAGARARCGAGGAALVSRAARLRARGRRAHAHLAGRPRATLKNLFQERGVPAWQRDVPLLYVGERLLFVPRIGVNRATHDGADAPGGWRRIEWRP

SEQ ID NO: 50048 - protein, 261 aa, Burkholderia mallei
MSTEFQAKPGDSYVQSFARGLAVIRAFDAEHPEQTLTEVASATGLTRAGARRILLTLQTLGYVEADGRLFRLTPKILDLGFAYLTSMPFWNLAEPVMEQLSARIHESCSAAVLDRTEIVYVLRVPTHKIMTINLSIGSRLPAYCTSMGRVLLSSLDAAALDDTLARSTLRAYTPRTLTDPAALKDEIATVRSQGWAIVDQELEAGLISLSAPIRNRRGQVIAAMNISGNAQRHTAKQMVKAFLDPLLEASQTVSQLVARRG

SEQ ID NO: 50049 - protein, 700 aa, Burkholderia mallei
MSAGLNSAQSEAVRYLDGPCLVLAGAGSGKTRVITQKIAHLIEAKGFEPRHIAAVTFTNKAAAEMRERVGKLLEGKTLTTPGKEGRKVPVNQLTVCTFHSLGVQILRQEAEHVGLKPQFSIMDSDDCFGMIQEQIGTTDKGLIRKIQTIISLWKNGLVAPEEAMTIAANEDEHQAALVYRNYVATLHAYQAVDFDDLIRLPTELFARNEPVRDRWQNRLRYLLIDEYQDTNACQYELLKLLAGPRAAFTAVGDDDQAIYGWRGATLENLAQLGKDFPKLHVIKLEQNYRSTVRILTAANNVIANNPKLFEKKLWSEHGMGDSITVTPCNDEEHEAESVVFRLSAHKFERRTQFRDYAILYRGNFQARVFEQVLRRERIPYVLSGGQSFFDKAEIKDLCAYLRLIANADDDPAFIRAVTTPRRGIGNTTLEALGAFAGQAKVSLFEAVYMGGIEARLSARQVEPLRIFCDFIQRLTDRADKEPATVVLDDMMEAIHYEAYLYDAYDERQAQTKWQNVLEFLEWLKRKGTKPEAEQAVDGEAEGFHNADGLADTGKNLLGLIQTVALMSMLEGKEEDPDAVRLSTVHASKGLEYPHVFLVGVEEGIMPHSGGSDDGPIDDERIEEERIEEERRLMYVAITRAQRSLHLNWCKKRKRARETIVCEQSRFIAEMGLDEAPPPTPEEAPMTPKDRLASLKALLQK

SEQ ID NO: 50050 - protein, 455 aa, Burkholderia mallei
MFEKILIANRGEIALRIQRACRELGVKTVVVYSEADKEAKYVKLADEAVCIGPAPSNLSYLNMPALISAAEVTDAEAIHPGYGFLSENADFAERVEQSGFTFIGPRPDTIRMMGDKVTAKQTMIRTGVPCVPGSDGALPEDPKEIVKIARTVGYPVIIKAAGGGGGRGMRVVHTEAALVNAVNMTREEAGRAFGNPQVYMEKFLENPRHIEIQVLSDSHKNAVWLGERDCSMQRRHQKVIEEAPAPGIARRLIDRIGDRCADACKKMGYLGAGTFEFLYENNEFYFIEMNTRVQVEHPVTELITGVDIVQEQIKIAAGEKLSFRQRDIQFRGHAIECRINAEDPFKFTPSPGRITSWHTPGGPGIRVDSHAYNGYFVPPNYDSMIGKLIAYGATREQAINRMRIALSEMVVEGILTNIPLHRELMLDSKFVEGGPSIHYLENRLAQKPQAAPEEA

SEQ ID NO: 50051 - protein, 413 aa, Burkholderia mallei
MKIYAVGGAIRDALLGLPVRDRDYVVVGATPEQMAAQRFRPVGKDFPVFLHPDTHEEYALARTERKTAAGYHGFQFYYAPDVTLEQDLVRRDLTINAMAREVSPDGALVGPVVDPFGGQADLRAKLFRHVGDAFVEDPVRILRVARFAARFAEFAVAPDTAALMRAMVDAGEVDALVPERVWQELARGLMEAKPSRMFAVLRECGALARILPEIDALFGVPQRADYHPEVDTGVHVMMVIDHAAKQGYSLPVRFAALTHDLGKATTPADVLPRHIGHEGRSVDLLKPLCERLRVPNECRDLALVVAREHGNLHRVMEMGAAALVRLLERADALRKPARFAEALQASEADARGRLGLETKPYPQAERLRQALVAARAVDAGAIAQGLAGEPAKIKDAVHRARVRAVAQAVGVAD

SEQ ID NO: 50052 - protein, 122 aa, Burkholderia mallei
MIQTESRLEVADNTGAREVMCIKVLGGSKRRYASIGDIIKVSVKEATPRGRVKKGEIYNAVVVRTAKGVRRQDGSLIKFDGNAAVLLNNKLEPIGTRIFGPVTRELRSERFMKIVSLAPEVL

SEQ ID NO: 50053 - protein, 852 aa, Burkholderia mallei
MLEARLVRRPSDMPIIKRPPSSRATNEHHYSLRRSPAGAYYTDDDDDDERAPRRTGRDGGSRTFGSRVALWFAGLFATLLVVGALIVGYALVVMGPQLPSLDALTNYQPKVPLRVYSADHVLLGEFGEERRSLVRFADIPDVMKKAVLAIEDYRFYEHGGVDFVGILRAGVADLLHGGARQGASTITMQVARNFFLSSEKTYTRKIYEMLLAYKIEKALTKDQILELYMNQIYLGQRAYGFAAAARVYFGKDLKDVTLAEAAMLAGLPKAPSAYNPVVNPKRAKVRQEYILKRMLEIGYITQQQYDQAVKEEIHVRTPGNQYAVHGEYVAEMVRQMMYAQYKDETYTRGLTVTTTINAADQEAAYQAVRRGIMDYERRHGYRGPEGFVALPPAGDERDEAIDDAFADHPDNGDLQSAVVLAVSPTAVDVQFVGGATATINGAGLRFAAGALSARASATLKIKPGSIVRVMKDARSAWQIVQLPQVEGALVAVAPQDGAIRSLVGGFDFNKSKFNHVTQAWRQPGSSFKPFIYSASLEKGLGPATIINDAPLYFPPSVPGGQPWEPKDDDQPDGPMPMRTALQRSKNLVSIRILASIGTSYAQDYVTQRFGFDPAKTPPYLPMALGAGLVTPLQLAAGYAVFANGGFKVDPYLIAEVDDARGQALQKAQPVVAGASATRTIDARNAYVMNSLLHTVATAGTGAGTNALGRGDLQGKTGTTNEAKDGWFAGYQQSLVAVAWMGFDQPKSLGSREFGAQLALPIWVNYMRTALNGVPEQQMAMPDGLTTIDGELYYADRTPGAGFVASVDFNPAASPTVSANDALGSAGAAGLTPPPVTPEEKRQIIDMFEGNKP

SEQ ID NO: 50054 - protein, 212 aa, Burkholderia mallei
MSPLDAVDRKTTTPVHSPSNRLPFVQHHSVENRHADFGRERFEILDCQHPHVRRVVPLIGQRFRYRHPASQHRQPVRPIAEVRERHDAFAPDARGFAQDRGRLVDRLQRLRQDREIEAVILEQAQAVLQILLDHVDAVLHAREHARIVDLDAVAGHFELLGQQRQQRAVAATEIEHRRARLDPARDRAKVRARGQRVQRLLVHAPTSSAIRS

SEQ ID NO: 50055 - protein, 596 aa, Burkholderia mallei
MTVVRQVELTYSGGAPCAPSPFLPLFRMSTERNDATAPSNFIRNIIDDDNRTGKWSGRVETRFPPEPNGYLHIGHAKSICLNFSVARDYGGVCHLRFDDTNPEKESVEYVNSIVDAVRWLGFDWQKAGVDHQYFASDYYDKLYEFAELLIQRGCAYVDSQSADEMRTNRGSLTEPGTPSPFRDRSPDENLALFRRMKAGEFAEGEHVLRAKIDMSSPNMNMRDPVIYRIRYAHHYRTGDKWCVYPMYDYTHCISDALEGITHSLCTLEFEDHRPLYDWVLNQLADAGVFARPLPQQIEFSRLNLTYAITSKRKLLQLVTEGHVDDWDDPRMPTIVGVRRRGFTPESIQLFCERIGVTKVDSWIDMSVFEGALRDDLDDKAPRTVAVLDPLKLVIDNYPQGQSEECTAPVHPHHPERGQRTFPISRELWIEREDFSEHPPKGYFRLFPGNKVRLRYGYVIECTGADKDEHGNVTAVHCNYYPDSKSGTEGANNYKVKGNIHWVSAAHACPAEVRIYDRLFKEPHPDAGGRNFLEALNPDSKKIVQAYLEPGARDALPEARYQFERHGYFVADRVDSKPGQPVFNRIVGLRDSWGKPA

SEQ ID NO: 50056 - protein, 307 aa, Burkholderia mallei
MIYSMTGYASATRDLATASGNGGTSVSVELRTVNSRFLDLNFRMPDDVRACEPALREMLMNKLSRGKVDVRINLQRGDQSVNAGALNHAALGQLAELERAVLDAFPGVGRLRAGEILRWPGVLAESGVSADALREAVLACGKEAVAELVVVRSREGAQLATMLLGNVAEMEAIVARIAPLVPELIAKHQQKIVERLQEALGVAAPEGGAPLVSREEAAERIRQEVTMYGIRIDIAEELSRLTAHLNETRHVIEKGGRVGKRLDFMMQELNREANTLGSKAAAKELADASMALKLLIEQMREQVQNLE

SEQ ID NO: 50057 - protein, 210 aa, Burkholderia mallei
MTMSHASPDAARSRIVLASNNPGKLREFAALFSTAGIDIVPQGELGVSEADEPHATFVENALAKARHASRATGLPAVADDSGLCVPALLGAPGVYSARYAQRAGREKSDAANNAYLVEQLREVADRRAYYYCVLALVRHADDPEPLIAEGRWAGEIVDAPRGAHGFGYDPHFFVPALGATAAELDPAAKNAASHRALALKALVARLGEIR

SEQ ID NO: 50058 - protein, 131 aa, Burkholderia mallei
MSMSDPIADMLTRIRNAQMVEKVSVSMPSSKVKVAIAQVLKDEGYIDDFAVKADGAKAELNIALKYYAGRPVIERLERVSKPGLRVYRGRNEIPQVMNGLGVAIVSTPKGVMTDRKARATGVGGEVICYVA

SEQ ID NO: 50059 - protein, 317 aa, Burkholderia mallei
YANNAKIDAFIADMVARHDFDANALHALFARVSYSATAAKLVMPAPSPAVKNWRVYQSRFLDAVRVNAGVKFWRANQGTLQRASTEFGVPPEVIVGIIGVETIYGRYMGNFRTLDALTTLAFDYPNTPNRDARQATFRKNLEDFLVWTRDSQLDPTGVLGSYTGAVGIPQFLPSSIRDYAVDYDGNGHIDLRASQADAIGSVANYLKQHGWETGRPVVWNIAPDTGQPGRRASGGGRSPRAALGAVAVAARGARARRAVREHRIGGEHARHRGRLPTPGRATEYKLGLQNFYVLTRYNRSFFYALAVYQLGERVKAQ

SEQ ID NO: 50060 - protein, 389 aa, Burkholderia mallei
AGRRRAPRRMVAPPAAAPHGYDLFHALRWLDALSPEHAPSGYASRPRDEPVRFGQAPSLAFAAAMLADVRDDGPRPRVAIHGFGLFGPNGPLPSHLTEYAYERATQHDDPTFAAFADLFHHRLILLFYRAWADAQPTVSLDRPARARFDRYVASLIGPCDALLADSPRGSRPDSSFASSSDSLPDSLPDSLPDSPPDSSPDSPPDSRSDSPSDARLDPHPDSPRGAGALAPHAKYHQAGHLVRHTRNPEGLVQILRRYFGVRVRIVEHVPHWVMLDRAQRCAIRATRPTQPLGGAVLGRAVRDAQSRFRIVLGPLTLDEYRRFLPGGVHARQLAQWVREYVGIEFDWDVQLELARGEVPTLALGSRHGLGRTAWLGERLDPGPARDLVL

SEQ ID NO: 50061 - protein, 1042 aa, Burkholderia mallei
MSNRAYRAGPTGAAAPSSTSYRPRTLWRTVRFNPRSLPHHPTPGVLPMQTTDNATSQFESAASRPFAGGAQGAPALASQTTYADYKVIRRNGSVVSFEPSKIAIAVTKAFLAVNGGQGAASARVRELVEQLTQTVVRALVRSRPNGGTFHIEDIQDQVELALMRGGEHNVARAYVLYREKRHLERVHAGEAEAAEASPAGGINVTDNGVTRALDLNALRALIVSACEGLGDAVSPEPIVAETVKNLYDGVPMTQVYDSSILAARTMIEKDPAYSQVTARILLHTIRREILGEEVTQAEMTTRYAEYFPQFLKRGVEAELLDDKLLQFDLKRLGDALDASRDLQFGYLGLQTLYDRYFLHVDGTRIEMPQAFFMRVAMGLALNEIDREARAIEFYNVLSSFDFMSSTPTLFNSGTRRSQLSSCYLTTVADDLDGIYEALKDNALLSKFAGGLGNDWTRVRALGSHIKGTNGKSQGVVPFLKVVNDTAVAVNQGGKRKGAVCAYLESWHLDIEEFLELRKNTGDDRRRTHDMNTANWIPDLFMKRVMEGADWTLFSPSTCPDLHDKFGAEFEAAYVGYEEKVARGEIKLFKKIPAQQLWRKMLGMLFETGHPWITFKDPCNVRSPQQHVGVVHSSNLCTEITLNTSDTEIAVCNLGSVNLVAHLAKQADGSYALDEEKLKRTVSVAMRMLDNVIDINYYAVAKARNSNLKHRPVGLGIMGFQDCLHLLRTPYASDEAVEFADRSMEAVCYYAYWASTELAEERGRYSSYRGSLWDRGILPQDTLKLLTEARGGYVEVDTSATLDWPALRARIDSFGMRNSNCVAIAPTATISNIIGVSACIEPTFQNLYVKSNLSGEFTVVNEYLVRDLKERGLWDEVMVADLKYFDGMLSRIDRIPADLRAIYATAFEVDPKWLVEAASRRQKWIDQAQSLNIYMAGASGKKLDEVYKLAWLRGLKTTYYLRTMAATHVEKSTVAHGALNAVPTSGGTSGGAAGGAQGAAGGFGAAGGDAPSGAMNAAPVEADGPVCTMRPGDPGFEECEACQ

SEQ ID NO: 50062 - protein, 123 aa, Burkholderia mallei
MNPVSLFCIVTGVMLNACAQLLLKAGVRAVGHFEFTRANIVPIGFKIATQLPIIGGLGCYVLSVVVWIVGLSRVDVSVAYPMLSLGYVVNAFAAWYLFGEVLSVQRLVGIGIILIGVFVLARS

SEQ ID NO: 50063 - protein, 939 aa, Burkholderia mallei
MGRKAIDNGLDTCESRPNRHIGRPASFARRPDKVNSHPIPYTQTDIRTMATQIDASSEAAAATAAAQHTPMMQQYLRIKSEHPDTLVFYRMGDFYELFFEDAEKAARLLDLTLTQRGASAGTPIKMAGVPHHAVEQYLAKLVKFGESAAICEQIGDPATSKGPVERKVVRVVTPGTLTDAALLSDKSDVFLLALCVGHNKRGVASNIGLAWLNLASGALRLAELAPDQLGAALERIRPAEILAADGTIESVPAGMGAITRVPAWHFDIASGTQRLCDQLEVASLDGFGAQALTSANGAAGALLIYAAATQGQQLRHVRSLKVENESEYIGLDPSTRRNLELTETLRGTESPTLYSLLDTCCTAMGSRLLRHWLHHPPRASVAAQARHQAIGALLDAPPNAGLDSLRSALRQIADVERITGRLALLSARPRDLSSLRDTFAALPALRERVAEIASNAAALGRLEAALEPPPGCLDLLTRAIAAEPAAMVRDGGVIARGYDAELDELRDISENCGQFLIDLETRERARTGISNLRVEYNKVHGFYIEVTRGQTDKVPDDYRRRQTLKNAERYITPELKTFEDKALSAQERALARERALYDGVLQALLPHIEGCQRVASGLAELDLLAAFAERARTLDWVAPEFTDEIGIEIDQGRHPVVEAQVEQFIANDCALNPERKLLLITGPNMGGKSTFMRQTALIALMAYVGSYVPAKAARFGPIDRIFTRIGAADDLAGGRSTFMVEMTEAAAILNDATPHSLVLMDEIGRGTSTFDGLALAWAIARHLLSHNRCYTLFATHYFELTQLPAEFPQAANVHLSAVEHGHGIVFLHAVEEGPANQSYGLQVAQLAGVPAPVIRAARKHLAHLEQQSAAQATPQLDLFAAPPVVDEPECNEPPAAATPHPALERLLELDPDDLKPRDALDLLYELHTLARSGPADAQR

SEQ ID NO: 50064 - protein, 397 aa, Burkholderia mallei
  MISC_FEATURE (25)..(25): X=any amino acid
MTTEGPSHDTHDTSAGIRPHGGLKXELLTTDGRARRGRVTLNHGVVETPIFMPVGTYGTVKAVQPRELDEMRAQIILGNTFHLWLRPGLETIGAHGGLHRFMGWNKPILTDSGGFQVFSLGDLRKITEEGVTFASPINGDRLFLSPEVSMQIQKTLNSDIVMQFDECTPYATNGVPTTHREAAESMRMSLRWAKRSLDEFERLGNPNALFGIVQGGMYEDLRDESLAGLSALGFHGLAIGGLSVGEPKEDMMRVLEHVAPRLPADKPHYLMGVGTPEDLVAGVAAGVDMFDCVMPTRNARNGWLFTRFGDVKIRNATHKNSLKPLDETCGCYTCRNFSRGYLHHLHRVGEILGAQLNTIHNLHYYLDLMREIREAIETHTFEAFQKRFAQDRARGVD

SEQ ID NO: 50065 - protein, 727 aa, Burkholderia mallei
MRQAAAQEAREHRAQRVLDEQHGRQPHVLLAQHRVLRADEQRVREARFEARIRAGGERLRQHALEVRVEPHHLHLARARIPLLRDRAAERKTHGGREIVRIGDAARLLGHGFDDRAHVADRHAFVEQVLQHFLQRRERDRLRHQILDERRRVLAGPLDERLHFLPAEQLGRVLDDEMVQVRRDDGARVDDRVAVHLRLLAQRRVDPHGGQPERRVLRRRAGQRGRHLARIDREPLARIRFARADFDALERDPVSVRAQLEVVADVNDGRQEADFLRELLADALDPLEQFAVGVLVDERNQPVADFEAERIDQRHVFPRRLVAVGRQRGGRRDLRDHARRLLRGLALGHRARQPDRAAAEQQKREVRHVRDEPHQHDDRACDHQHARVREELRGELRADVLVGRHARDDHAGRGRDHERRDLRDEAVADREQRVVLARRGEAHVVLGHPDDEAADHVDRHDDQARDRVAAHELRRAVHRAVELRFLRDRLAALLRLLFVDEAGVQIGVDRHLLAGHRVEREARGHFGDPARALRDHHEVDDHQDHEHDDADREVAADEEVAERLDHLAGRVRARVTFEQHDAGGRDVQRQAQKRREQQHARERGEIERLHRVHADEQHHHRQRDVEREEQIEQQRRQRQDHHPQNHADEDRTRERAQVRAREQLRALAEESGRHVHAAPPAARPPSASSASSRSSCGATCAPLSSSAGTSRSTGVSGAIPPSARKRLS

SEQ ID NO: 50066 - protein, 313 aa, Burkholderia mallei
MMRIVIALGGNALLQRNQPMTEVQQRENVKIAVAQIAQIAPGNELVIAHGNGPQVGLLALQGAAYPAVAPYPLDVLGAQTEGMIGYLIEQEMGNLLPPDAPFATLLTQVEVDPADPAFEHPTKPIGPVYSRDEAERLALEKGWHIAPDGDKFRRVVPSPRPRRIFEIRPVKWLLEKGTIVICAGGGGIPTRYDANGKLSGVEAVIDKDLCASLLARELSADLLVIATDVDGAYLDWGKPTQALIEAAHPDELERLGFAAGSMGPKVQAAIEFARQTGHDAVIGSLADIVAIAEGRAGTRVSVKVDGIRYRRPR

SEQ ID NO: 50067 - protein, 283 aa, Burkholderia mallei
MAASEGTRARDPSEYIAHHLQNFSTSHQTSIFDIHVWNLDTLFWSIVCGLITILLLRLAARKATSGVPGRFQCAVEMLVEMVEDQSKAIVHGNRAFIAPLALTVFVWVALMNSLDFLPVDLPGRVIGWLGLSGIISHHRIVPTADLNGTLGIALGVFVLMLYYSIKIKGAGGFAHELVSAPFGSHPLLWIPNLALNIVEFVAKTVSLGMRLFGNMYAGELVFLLIALLGSMWSFGGDATFLGFVGHVIAGSVWAIFHILIVLLQAFIFMMLTLVYLGQAHDAH

SEQ ID NO: 50068 - protein, 1412 aa, Burkholderia mallei
MKALLDLFKQVQQEEIFDAIKIGLASPDKIRSWSFGEVKKPETINYRTFKPERDGLFCAKIFGPIKDYECLCGKYKRLKHRGVICEKCGVEVTLAKVRRERMGHIELASPVAHIWFLKSLPSRLGMVLDMTLRDIERVLYFEAYVVIDPGMTPLKARQIMTEEDYYNKVEEYGDEFRAEMGAEGVRELLRSINIDEQVETLRTELKNTGSEAKIKKYAKRLKVLEAFQRSGIKPDWMILEVLPVLPPELRPLVPLDGGRFATSDLNDLYRRVINRNNRLKRLLELKAPEIIVRNEKRMLQEAVDSLLDNGRRGKAMTGANKRPLKSLADMIKGKGGRFRQNLLGKRVDYSGRSVIVVGPTLKLHQCGLPKLMALELFKPFIFNKLEVMGVATTIKAAKKEVENQTPVVWDILEEVIREHPVMLNRAPTLHRLGIQAFEPVLIEGKAIQLHPLVCAAFNADFDGDQMAVHVPLSLEAQMEARTLMLASNNVLFPANGDPSIVPSQDIVLGLYYATREAINGKGEGLSFTGVSEVIRAYENKEVELASRVNVRITEMVRNEDTSEGAPQFVPKISLYATTVGRAILSEILPPGLPFSVLNKPLKKKEISRLINTAFRKCGLRATVVFADQLMQSGFRLATRAGISICVDDMLVPTQKETIVGDAAKKVKEYDRQYMSGLVTAQERYNNVVDIWSATSEAVGKAMMEQLSTEPVIDRGGNETRQESFNSIYMMADSGARGSAVQIRQLAGMRGLMAKPDGSIIETPITANFREGLNVLQYFISTHGARKGLADTALKTANSGYLTRRLVDVTQDLVVVEDDCGTSNGVAMKALVEGGEVVEALRDRILGRVAASDVVNPETQETLYEAGALLDETAVEDIERLGIDEVRVRTALTCETRYGLCASCYGRDLGRGSLVNVGEAVGVIAAQSIGEPGTQLTMRTFHIGGAASRAAVASSVEAKSNGTVRFTASMRYVTNAKGEQIVISRSGEALITDDIGRERERHKIPYGATLLQLDGAAIKAGTQLATWDPLTRPIITEYGGTVKFENVEEGVTVAKQIDDVTGLSTLVVIDVKRRGSQAAKSVRPQVKLLDANGDEVKIPGTEHAVQIGFQVGALITVKDGQQVQVGEVLARIPTESQKTRDITGGLPRVAELFEARSPKDAGILAEVTGTVSFGKDTKGKQRLVITDLEGNQHEFLIAKEKQVLVHDGQVVNKGEMIVDGPADPHDILRLQGIEALSRYIVDEVQDVYRLQGVKINDKHIEVIVRQMLRRVQIVDNGDTRFIPGEQVERSDMLDENDRMIAEDKRPATYDNILLGITKASLSTDSFISAASFQETTRVLTEAAIMGKRDDLRGLKENVIVGRLIPAGTGLAFHKARKAKEQSDRERFDQIAAEEAFEFGTPSAPAEEPQHPAE

SEQ ID NO: 50069 - protein, 133 aa, Burkholderia mallei
MKLLDALVEQRIAAAAARGAFDDLPGAGAPMELDDDLLVPEEVRVANRILKNAGFVPPAVEQLRALRNLQDELRAVSDRATRCRLQAKMLALDMALESLRGGPMVVPREYCRRIAERLSERVLGDAQGEAGAM

SEQ ID NO: 50070 - protein, 228 aa, Burkholderia mallei
MDYLNTFVYGIYPYIAAAIFLFGSLARFEREQYTWKSDSSQLLHRGALRTGNILFHVGVLGLFFGHLVGLLTPVAVWDALGVTHQFKQLVAMSAGGVMGSLALAGLAILLHRRLTNARLAAVTRRGDKVLLAWLLVTLVLGLSTIFESASHTDGHLMVQLMTWAQHIVTFRGDAASYVADAPWLFKAHLFMGLSLFAIFPFTRLVHVWSGFASVTYVGRAWQLVRARR

SEQ ID NO: 50071 - protein, 561 aa, Burkholderia mallei
SPSRPPRRQALRSRQTAPKRRAHRKPSLRRPFPRCRRPPPRADPASAAPAAEPVRPSRPPAPNAFEFHAPAASNVELPTLDLLEPASDTIEAISDEHLAQTGQIIEQRLQEFKVPVTVVGASAGPVITRFEIEPALGVRGSQIVGLMKDLSRGLGLTSIRVVETIPGKTCMGLELPNAKRQMIRLSEILASRQYQHSASQLTIAMGKDITGNPVVTDLAKAPHMLVAGTTGSGKSVAINAMILSLLYKATPEDVRLIMIDPKMLELSVYEGIPHLLAPVVTDMKLAANALNWCVGEMEKRYRLMSALGVRNLASFNQKIRDAAAKEKKLGNPFSLTPEDPEPLSTLPLIVVVIDELADLMMVAGKKIEELIARLAQKARAAGIHLILATQRPSVDVITGLIKANIPTRVAFQVSSKIDSRTILDQMGAESLLGQGDMLFLPPGTGYPQRVHGAFVADEEVHRIVEYLKQFGEPQYEEGILDGPSAEGGTQDLFGEAPDAEADPLYDEAVAFVVRTRRASISSVQRQLRIGYNRAARLVEQMEAAGLVSPMGINGSREVLAP

SEQ ID NO: 50072 - protein, 822 aa, Burkholderia mallei
MTEQHNSQPENSYGASSIQILEGLEAVRKRPGMYIGDTSDGTGLHHLVFEVLDNSIDEALAGYCNDIHVTIHADNSISVTDNGRGIPTDVKLNDKHEPKRSAAEIVMTELHAGGKFDQNSYKVSGGLHGVGVSCVNALSSWLRLIVRRDGKKHFMEFHRGIAQNRVLEERDGEQVSPMQVIGETENRGTEVHFMADPTIFGTVEYHYDILAKRIRELSFLNNGVRIRLTDLRSGKEDDFAFAGGVKGFVEYINKTKSVLHPTIFHINGEKDSVGVEVAMQWNDSYNENVLCFTNNIPQRDGGTHLTGLRAAMTRVINKYIADNEIAKKAKVETTGDDMREGLSCVLSVKVPEPKFSSQTKDKLVSSEVRAPVEEVVAKALEEFLLETPNDAKIICGKIVEAARARDAARKAREMTRRKGVLDGVGLPGKLADCQEKDPAKSEIYIVEGDSAGGSAKQGRDRKFQAILPLRGKVLNVEKARYDKLLSSEQIVTLVTALGCGIGKDDYNLDKLRYHRIIIMTDADVDGAHIRTLLLTFFYRQMPEMIERGYVYIAQPPLYKVKAGRDERYLKDDTELNAHMLRLALQGSELVPTENGTPISGDALGELARSYLLARGVVERLSRLYDPAALEAVMDGVAIDLSSEASTEASAKALAAMLSDDSKTEVRVVPAYDAVREQRSLRVERTHHGNVRVSVIDEEFQHTADYQQLVNTANTFKGLIGAGAAIKRGERSSNVTDFKEAMKWLMADAERNLSKQRYKGLGEMNPEQLWETTMDPAVRRLLRVQIEDAIAADGIFTTLMGDEVEPRRAFIENNALRAGNIDV

SEQ ID NO: 50073 - protein, 300 aa, Burkholderia mallei
MAYKTIEDTIGNTPLVQLVRLPDDEIRARNNVILAKLEGNNPAGSVKDRPALSMIRKAEERGTIKPGDTLIEATSGNTGIALAMAAAIRGYKMVLIMPEDLSIERRQSMAAYGAEIVLTPVKGGMEFARDLADQMQREGKGVILDQFANPDNPLAHYEGTGPEIWRETEGRVTHFVSAMGTTGTIMGTSQYLKERNPTVEIVGAQPEEGSRIPGIRKWPEAYLPKIFDRSRIDRVENVSQAASEAMARKLAAVEGIFCGISSGGACEVALRVARQVENATIVFVVCDRGDRYLSTGVFPA

SEQ ID NO: 50074 - protein, 304 aa, Burkholderia mallei
MKRDPLGGLHVFMSVVTHGNFTRAAAALGLTPAAVSLAIGQLESELKVKLFSRSTRGVSLTEAGQRYYDATAQPYRQVVDARDALNDARDEPEGLLRISALHLAKSVVTADVLAEFFRRYPKVSVEIRYEDHLVDIVKERLDAGIRLADRLQPGMVGVKIAPALTCALVATPGYLAQHGVPAKLADLARHMCIRFRFPKSGRLHKWPLRDGRRDVELDVAGRFVSTDTGAVIDAARAGAGIAFVFMRERIEDDLRRGTLREVLPGACRTLPPMWLYYANRKHVPPKLRAFIAVLREHAAADARR

SEQ ID NO: 50075 - protein, 263 aa, Burkholderia mallei
MSENDRKKRENDIARIDRASLLIDVRKSLALPSRRLFGKRMLTLGGLAMLTGCTLRDDASVDDFLEKVSRANDRVQAWLFGPTRLAPTYAKADITRPFPFNAFYGIDDVPRVDADGFRLAVSGLVTGQRSWSLPALYALPHAEQITRHICVEGWSAIGRWGGTPFREFLRRVGADTSAKYVGFKCADDYYESIDMATALHPQTLLAFEYDGKRLPPEYGFPMKLRMPTKLGYKNPKHIVEIFVTNAYPGGYWVDQGYNWFGGS

SEQ ID NO: 50076 - protein, 398 aa, Burkholderia mallei
MTAWARRAARFARLPIGGRTAVLVRAMRAADAEPATFWTPAAPVTRAGRLPSPSRPMRGARAARPLAAVAAFAALVAGTLAFAPAAHAGEPSAVCRPLADDPTVSQFSRTLPARPARIVVLEFMFAEDLAALDITPVGMADPAYYPIWIGYDDARFARVSDVGTRQEPSLEAIAAAKPDLILGVGLRHAPIFDALSRIAPTVLFKYSPNYIEDGRQVTQYDWACAILRTIGCLTGRARDARAVQARVDAGLARDARRIAAAGRAGERVAWLQELGLPDRYWAFTGNSASAGIARALGLEPWPGEPTREGTAYVTSEDLLKQPDLAVLFVSATEPGVPLDAKLDSSIWRFVPARRAGRVALVERNIWGFGGPMSALRLADEMTQRVLALPKPAAGAPPR

SEQ ID NO: 50077 - protein, 228 aa, Burkholderia mallei
MKLTPREKDKLLIFTAALLAERRRARGLKLNYPETVAFITAALMEAARDGRTVAEVMHYGTTLLTRDDVMEGVPEMIPDIQVEATFPDGTKLVTVHHPISVKARHDSPHGSFPPAVRQQAPHPSHATPEGRMIPGELVIDDGEHTLNAGRHTIALVVANTGDRPVQVGSHYHFHEVNDALSFDRAAARGFRLNIAAGTAVRFEPGQTRTVELVELGGARAVYGFQGKV

SEQ ID NO: 50078 - protein, 122 aa, Burkholderia mallei
MLSAVISSEHSYPAMRLASQPVHQRFVHSGPLVLGAAPFKLPTPTADRDQTVSRRFKPSSRTSLNGEQPYPWDRLQPQDEMSRHRGAKHRRRYELLGGISLLSPEYLLSVERWPFHTEPPDH

SEQ ID NO: 50079 - protein, 89 aa, Burkholderia mallei
MLQQETTIVNKLGLHARASAKLTQLAGNFQAEVWMTRNGRRINAKSIMGVMMLAAGIGSTVTIETEGPDEREAMDALLKLIADKFGEGQ

SEQ ID NO: 50080 - protein, 63 aa, Burkholderia mallei
MRAVPSACASTPVALAIPCHRVVQKGGSLAGYRWGCPRKAALLDAEAQRAAGESVESAVDHAA

SEQ ID NO: 50081 - protein, 169 aa, Burkholderia mallei
MQAKVQADERDDGLREKMISVNRVTKVVKGGRILGFAALTVVGDGDGRVGMGKGKAKEVPVAVQKAMEQARRNMFKVPLKNGTLQHEVHGKHGASTVLLAPAKDGTGVIAGGPMRAVFDVMGVQNVVAKSHGSTNPYNLVRATLDGLRKQSTPADIAAKRGKSVEEILG

SEQ ID NO: 50082 - protein, 471 aa, Burkholderia mallei
MGKQAIGVVGLAVMGRNLALNIESRGYAVSVYNRSREKTDELIAEFPDRKLVPAHTLEAFVASLETPRRILLMVKAGEATDATIAALKPLLDKGDVLIDGGNTHFTDTIRRNQELAQAGLHFIGTGVSGGEEGALRGPSIMPGGQRDAYDLVEPILEQIAAKAPADGEPCVAYMGPDGAGHYVKMVHNGIEYGDMQLIAESYAVLKQVAGLTNDELGAVYAEWNQGELDSYLIEITAKIFGKKDDETGEHLVDVILDRAAQKGTGKWTSQNALDLGVPLPLITESVFARVLSSLKAQRVAASEVLSGPSPAPLEGDRAAFVESVRRALYLSKVISYAQGFAQLDTASKEYGWNLDLGTIAKIFRAGCIIRARFLQKITDAYAKNAALANLLLDPYFQDIAANYQSALRDVVIAAVKAGVPVPAFASAVAYFDSYRSARLPANLVQAQRDFFGAHTFERTDKPGSFHASWAE

SEQ ID NO: 50083 - protein, 346 aa, Burkholderia mallei
MCGAGGRRRPPAIEKQAPMSDIPFASTRSGGQAPMRAPSRYGDIVFGGLTRVAAIVTLLLLGGIIVSLIVASMPTIEKFGLSFLWHAEWDPNSDTYGALVPIYGTIVTSIIALVIAVPVSFGIALFLTELSPVWLRRPLGVAIELLAAIPSIVYGMWGLLVFAPIFATYFQKPVGALLGPIPVIGALFQGPPIGIGILSAGVILAIMIIPYIASVMRDVFEVTPVLLKESAYGIGCTTWEVMWKIVLPYTKTGVIGGVMLGLGRALGETMAVTFVIGNTNLLDNVSLYSPGNSITSALANEFAEAAPGLHTSALMELGLILFVITFVVLAVSKLMLLRLERGEGRK

SEQ ID NO: 50084 - protein, 325 aa, Burkholderia mallei
TGGRRPSVSIVVPTYRRPELLERCLGALASQVFDPGTYEIVVVDDDAAGSARPVVDALTVRMGGLPAIRYVSAPRTQGPAGARNAGWREAAGPVIAFTDDDTIADPLWLRNGCSALLAQPNASAAAGRIEVPLAPCPTDYERDAGGLAHAEFATANCFVRRAALERVGGFDERFTRAWREDADLMFALRERAGPIVDARTATIVHPVRPARWGVSIAQQSKVFFDALLYKKHRDVYRRHIRSVPPWHYYAAVLALLGACVALALGLHAAAAACAAAWAGITAAFCWRRLRGTAHTPSHVAEMIVTSIAIPPVSLYWRLRGALHFR

SEQ ID NO: 50085 - protein, 297 aa, Burkholderia mallei
MRIVLITGISGSGKSVALNALEDAGYYCVDNLPPHVLPELARYLAHEGQNRLAVAIDARSSASLDEMPGLIRALSHEHDVRVLFLNASTQALIQRFSETRRRHPLSGSPSHDADVGLLVSLEEAIERERELVAPLAEFGHQIDTSNLRANVLRTWVKRFIEQKNDDLVLMFESFGFKRGVPLDADFMFDVRALPNPYYDHELRPLTGLDQPVVAFLDALPVVHQMLDDIETFLVKWLPHFREDNRSYLTVAIGCTGGQHRSVFLAETLAARLSRQASVIVRHRDAPVAVDASSRLVT

SEQ ID NO: 50086 - protein, 91 aa, Burkholderia mallei
MIMQAFIANIQGLTAIGIGIIIGLGAIGACIGIALMGGKYIEACARQPELINPLQTKMFLLAGLIDAAFLIGVGVAMLFAFANPLLSKLAG

SEQ ID NO: 50087 - protein, 328 aa, Burkholderia mallei
MHNRIADGRVKFRHLQCFLAVAQFGSVQKAAHSLSITQPAVSKTIAELESILGVRLFERGRQGARPTREGQLFMPHASACVLALRQGVGLLAREGGGAAATLEIGMLPTVAASLAPAVLKTLAAEWPRAVVRITTVANAELLERLKAGAIECAIGRLSEPERMVGLSFEHLYNEPLVAVVRAGHPLAASASPAAQLARYPVVLPPYGTIIRQAAEQLLSACGAPPLESFVEVLSVSVARALALENDAVWFVPRYAAEFDLAAGTLTRLALPVDGADEPVGLILRTDAQPSPVARALIDAVRAIARRRLAGAGTTSGRARGARGATGKG

SEQ ID NO: 50088 - protein, 317 aa, Burkholderia mallei
MTTALDQLKQYTTVVADTGDFQQLAQYKPQDATTNPSLILKAVQKDAYRPILEKTVRDHAGESVGFIIDRLLIAFGTEILKLIPGRVSTEVDARLSFDTQRSIDKGREIIKLYEAAGVGRERVLIKLASTWEGIRAAEVLQREGIRCNMTLLFSLVQAAACAEAGAQLISPFVGRIYDWYRKQKGADWDEAQDGGANDPGVQSVRRIYTYYKHFGYRTEVMGASFRTTSQITELAGCDLLTISPELLQKLHDSTEAVARKLSPDEARDARLERVAIDESSFRFQLNDDAMATEKLAEGIRLFSADAVKLEKMIEALR

SEQ ID NO: 50089 - protein, 208 aa, Burkholderia mallei
MVFDELITEFDRGLRSIAGVSRMSRPVPKPAAAAPAELSAAERKHAAGLMRVNHVGEVCAQALYQAQKLTTSSAGLKEMFEHAAREEEDHLAWTAHRLKDLDSRPSLLNPLWYAGALAIGVVAGRLGDKVSLGFMAETERQVESHLDGHLSELPAADAESRAIVEQMRADEVKHGKSATDAGGIELPMPARMLMRAASKVMTSTAYYL

SEQ ID NO: 50090 - protein, 144 aa, Burkholderia mallei
MELNNLKPAEGAKHAKRRVGRGIGSGLGKTAGRGHKGQKSRSGGFHKVGFEGGQMPLQRRLPKRGFTSLTKEFVGEVRLGDLEKLPVDEIDLLALKQAGLVGELIKSAKIIATGELKRKIVVKGLGATKGARAAIEAAGGSFAE

SEQ ID NO: 50091 - protein, 272 aa, Burkholderia mallei
MPELPEVEVTRRGIEPFVAGRRVERVDVRTAMLRWPVPAGFAEMLRSREVLRVERRGKYLLFEVDAGWFIVHLGMTGTLRVLPNDAPPPAPAKHDHVDWIFDEFVLRFRDPRRFGAVLWHPRDAGDVHAHPLLASLGVEPFSAALLFGRTRGRTVSVKQALLAGDIVVGVGNIYASESLFRAGIRPTTAAGRVSLPRYERLADAVRATLADAIERGGSTLRDFVGSNGESGYFQLDCFVYDRAGEPCRVCGAPIRQIVQGQRSTYFCPNCQR

SEQ ID NO: 50092 - protein, 498 aa, Burkholderia mallei
MVQTGRFLVMPLLSSDHCRALPPEVSRPRYDRRALRTGIVHLGLGAFHRAHQACYTETLVERGDLRWGIAGVELRRRHTVERLAAQDHLYSVTERAGDAARTRVVGAVHRTLFAPQALATLLGLIADPSVSIVSLTVTEKGYYRRPGGGGLDLDDPAIRRDLAQPHAPSTTLGVLAAGIRLRAAHAPLSVLSCDNMPSNGDTLRALLAQYAEQTDGALARRIRCDVAFPNTMVDRIVPAATPESLDWVQSRIGVRDEAAIVCEPFAQWVFEDRFAGARPRWEDAGALVAADVRPYEKMKLRLLNGSHSAIAYAGQLRGRRTVSDAMADPLIDALARGVMTRELLATLDVPAGYDVRAYCASLIERFRNPALAHRTAQIATDGTQKVPLRWLPALAESAAAGVERPFLERSLAMWLHYVEVARDESGRPLVLEDPGAQALAARLHGAPGATDAVRAALGLIASRDAARWPEALTARVGAHLETVRTRGTDALLRPLLDA

SEQ ID NO: 50093 - protein, 454 aa, Burkholderia mallei
MKNLQRHLSARHIRFLALGSAIGTGLFYGSASAIRLAGPAVILAYIVGGAAVYMVMRALGEMAVREPVPGSFGHYATENLGPFAGFVTGWTYTLEMVIVAIADITAFGIYMGFWFPHVPQWIWVLAIVAIICGLNLCHVKVFGELEFWLSIVKVGAIVAMIGGGAAILFTGMRLGSGGAPSLANLWSHGGFLPNGVGGLVASLSVVIFAYGGIEVIGMSAGEAKEPERVIPRAINAVPMRILLFYVLTMIVLMSIFPWTGVGANGSPFVQIFSALGVRSAAEILNLVVISAAISAINSDIFGAGRMMYAMALQGQAPRALAAMSARGVPWVTVLVMAGALLVGVVLNYLMPKDVFLMVAASATFATVWVWLMILLSQVAMRRRLGAAEVAALKFKVPFWPVGPALTIAFMAFVIAMLGYFDDTRVALFVGAAWLAILALVFYTRIRPRLAAVAR

SEQ ID NO: 50094 - protein, 469 aa, Burkholderia mallei
MTQTRPSRSRASGAPARAPRLSALHLVPDSLGFALDGAAQAVDAVDRGAALPAALAAVHAALPSNAQAASRGAIQDIGYRAMRRRGTADWLIAQLVAKAPPAHVHALLVCAFALLVDDEHAAYAPFTVVDQAVTAIGARRECSFAKGLVNAVLRRFLRERAAWLERLQADRRALWNYEPWWIDAVERAWPDAWQRILAAGDAPGPLTLRVNARRMTADAYLDTLRAERIDAEKIGLHAIRLASARPVERIPGFADGIVSVQDAGAQLSAEWLGARDGMRVLDACAAPGGKTGHILELAHAEVVALESDPARAPRIGENLARLSLTADVRVGDAADPAQWHDGRPFDRVLADVPCSASGIVRRHPDIRWLRRAADIPALVAEQRRILSALWPLVKPGGELLYVTCSIFPEEGELQARWFGDACQDAVRLDAPGQLLPQGATGGAPAVGGSGESGRHVDHDGFFYARFQKR

SEQ ID NO: 50095 - protein, 242 aa, Burkholderia mallei
MRQMLEAGVHFGHQTRFWNPKMAPFIFGHRNKIHIINLEKTLPMYNDALKYVRQLAANRGTILFVGTKRQSRDTIAQEALRAGMPYVNARWLGGMLTNFKTLKVSIKRLKDMEAAVEAGELEKMSKKEALLFEREIAKLQKSIGGVKDMGGIPDAIFVVDVGYHKIAVTEANKLGVPVIAVVDTNHSPEGVDYVIPGNDDSSKAVALYAQGVADAILEGRANAVNEVVQAVRGDDEYVEENA

SEQ ID NO: 50096 - protein, 423 aa, Burkholderia mallei
MADKKGSNSEKLLYCSFCGKSQHEVKKLIAGPSVFICDECIDLCNEIIRDEAAAAGVEASLSKSDLPSPQEIRDILDQYVIGQERAKKILAVAVYNHYKRLKHLDKKDDVELSKSNILLIGPTGSGKTLLAQTLARLLNVPFVIADATTLTEAGYVGEDVENIIQKLLQNCNYEVEKAQRGIVYIDEIDKISCKSDNPSITRDVSGEGVQQALLKLVEGTMASVPPQGGRKHPNQDFIQVDTTNILFICGGAFDGLEKVITDRTEKTGIGFGATVKSKQERDAGEVLREVEPEDLIKFGLIPELIGRLPVVATLGKLDEAALMKILVEPKNALVKQYQKLFAMERVELEIRPDALQAVARKAIRRKTGARGLRSIIEQALLDVMYELPTLKGVSKVIIDDNVIEGDGKPLLIYEDTPKVAGSN

SEQ ID NO: 50097 - protein, 87 aa, Burkholderia mallei
MAHKKAGGSSRNGRDSESKRLGVKVYGGQAINAGGIIVRQRGTRMHAGENVGMGKDHTLFALVDGHVKFTTKGAAKKHTVVVVPAAA

SEQ ID NO: 50098 - protein, 449 aa, Burkholderia mallei
MNDYNERSTWRRMRALLSINDPRWGRGGNGDKPRANESKRPNGRDDGPPDLDEMWRNFNRRLSGWFGGKGGGNNGFRPDNGRDARVGVGIVAGVLIAIYLGSGIFIVQDGQTGVVLRLGQYKGSVGDGVHWRLPYPFESHEIVDTAQVRSIEIGRNNVVRLANVKDASMLTRDADIVDVRFAVQYRVGSPTDYLFHAVDPERSVSQAAQAAVREIVGARRADEVLAQDRDALRDALSKAIQRDLDRYRTGLVVTGVTVQSVSPPEQVQAAVDDIAKARQDSEAAKNAAQAYASELLPRAQGDAAKMVDDAKSYAERVVAQAEGDAERFKQVYAQYSKAPAVIRERMYLETMQEIYSNTTKVYVGNKAGNSVLYLPLDKIVEAGRQRAAEAASAGVAPPASGAQAPAPASAAAAASAPRVAAPAAASPASGSDSRSREALRSRSRTDDLQ

SEQ ID NO: 50099 - protein, 1174 aa, Burkholderia mallei
MSDPRFVHLRVHSEFSIADGIVRLDDIVKSAAEDGQGALALTDLGNAFGLVRFYKEARDAGIKPIAGCDVWITNHDDRDKPSRLLLLVKDKRGYLNLCELLSKAWLTNQYRGRAELDASWLEGELAEGLLALSGAQQGDIGLALAAGNEAAARRHAQRWARVFPGGFYIELQRYGQPGAEAYIQQAVTIAAELKLPVVATHPLQYMTADDFTAHEARVCISEGDILANPRRQKRFTTEQFFRTQGDMAALFADLPSALANTVEIAKRCNLTLELGKPKLPRFPTPDGMSLDDYLVQLSQEGLDKRLVQLYPDEAEREAQRGKYNQRLDFECGTIKKMGFPGYFLIVADFINWAKNNGVPVGPGRGSGAGSLVAYSLGITDLDPLRYNLLFERFLNPERVSMPDFDIDFCQHGRDRVIQYVKEKYGADAVSQIATFGTMAAKAAVRDIGRVLDLGYMFTDGVAKLIPFKPGKHVTIADAMKEEPLLQERYDNEDEVHQLLDLAQRVEGLTRNVGMHAGGVLIAPGKLTDFCPLYTQGDEGGVVSQYDKDDVEAVGLVKFDFLGLTTLTILDWAERYIRRLDPSKENWSLAQVPLDDPTSFQILKKANTVAVFQLESRGMQGMLKDAQPDRFEDIIALVSLYRPGPMDLIPSFCARKHGREKVDYPDPRVEPVLKETYGIMVYQEQVMQMAQIIGGYSLGGADLLRRAMGKKKPEEMAKHREIFAEGAAKNGLTREKSDEIFDLMEKFAGYGFNKSHAAAYALLAYYTAWLKAHHPAEFMAANMTLAMDDTDKVKILFDDCLVNGLAVLPPDINRSNDRFEPVAEADGKRSRTIRYGLGAIKGSGQNAIEEILRAREEKPFADLFDFCERIDRRVVNRRTIEAMIRAGAFDSLHENRAQLLASVPLAMEAAEQAAANALQAGLFDIGGVPAHQHALVDEPAWDDKRRLQEEKGALGFYLSGHLFDAYRDEVRRFVRQKLGELKEGRDKVVAGVIASLRTQMTQRGKMVIALLDDGTGQCEVTVFNEQFDANRALFKEDELLIVQGQARNDAFTGGIRFTAESVMDLERARSRYAQAVRMTMNGNADAAALRRVLEAHVAKPDETPPAAAPAPRGGRDGGRRAQAAIPNGLAVRIAYSNARAQGEMRLGDAWRVKPSDALLADLRAAFGGSVVEIVY

SEQ ID NO: 50100 - protein, 975 aa, Burkholderia mallei
MKLEHPDRLMNRTPLSLAALETHDAFAERHIGPDAASQQAMLDTLGFATRAALIDAVIPASIRRAETLPLGPFAQPKSEAEALAALRALADKNQVFRSYIGQGYYDTHTPAVILRNVLENPAWYTAYTPYQPEISQGRLEALLNFQQMVADLTGLEISNASLLDEATAAAEAMTLLQRVGKPQSNVFYVADDVLPQTLEVIKTRAKPIGIEVKSGPAADAAAANAFGVLLQYPGANGDVRDYRALADAIHAAGGHVVVAADILALTVLMPPGEWGADVAVGNTQRFGVPMGFGGPHAAYMAVRDEFKRQMPGRLVGVTVDAQGKPALRLALQTREQHIRREKATSNVCTAQALLAIMASMYAVYHGPRGLKTIALRVNRIAALLAAGIRHLGYATVNDTFFDTLTIDTGARTAQLHAFAQAKRINLRRAGDTRVGVSVDETTTRADLADLLTIFAQAAGATAPDIDALDAGLLPAPALPPSLERTSAYLTHHVFNRHHSETEMLRYLRSLSDKDLALDRSMIPLGSCTMKLNATSEMLPVTWPEFGRIHPFAPAEQTVGYREMIDQLEQMLVAATGYAAVSLQPNAGSQGEYAGLLIIHAYHESRGESHRDVCLIPASAHGTNPASAHMAGMKVVVVACDAQGNVDIADLKAKADAHSHDLAAIMITYPSTHGVFEQNVREICEIVHAHGGQVYVDGANMNAMVGLTAPGQFGGDVSHLNLHKTFCIPHGGGGPGVGPVAVGPHLAKFLPNQRSTGYARGEDGIGAVSAAPYGSASILPISWMYIAMMGAKNLTAATETAILNANYIAKRLAPHYPVLYSGPGGLVAHECILDLRPIKDSSGITVDDVAKRLMDYGFHAPTMSFPVPGTLMVEPTESESQEELDRFIAAMIAIRDEIRAVEEGRADREDNPLRHAPHTAAVVTANEWPHAYSREQAAFPVASLVANKYWPPVGRADNAYGDRNLFCSCVPVSDYA

SEQ ID NO: 50101 - protein, 534 aa, Burkholderia mallei
CCCSALVAAAGAAHAQSRSGGNPLEALPQINTPQKPSVTVQVAPQEVQVQALLARHLTPSSFQVEGVKSIPFEEISQRFTPLVGKDITIGQLIETANGVTKLYQERGYALSFAFVPAQTFEGGVVRVTVVEGYVANLKITGRPGAMEPKVRAIAAHIMADRPLRRATFERYVNTFGLLPGVTVKANVPPPQNTDGATTLELNVDRKPFNVSASLNTNNPGLQGLFTVTENGLTSLGEQMSISALFPKGPNNQTYVSFNGAVPIGSNGLVTRLDASHYRGNPSVDQTVLPNVQRTVINDKLGLSASYPLMLSNQRSLLGTVSGYASHSEDRYQNQSTGATIGMRSQVRVLQMQFDYTSVQPKQVQKLSFNVAKAFDILGASKSGFTNLPGVIATNPASTTFVRTGATFVQTNEWPFKIGSTVQLTGQYSPDSLPSTEQISFGAQRFALGYQPGETSGDSGWGASLELNRAFAPGFTYLKNITPYIVYDMARVYLHSGTPVPRRLSSAGFGVRLTDSRFYNLDVSIAKPVGDAPIE

SEQ ID NO: 50102 - protein, 1043 aa, Burkholderia mallei
MDVRVKAREALVEIAREPQVVDDRLVEALARDQQRNARRIRREQDARHASFELVERHAVDLAVRELRERVGRLHRRLHVRQVHLGREPRDVVRAVHVVDLRAEIAQADALVERILRDELGQHAPERLVVVVVVLELLQLGDHRVPAALRDADREHDEERVQARLLDDDPVLGQILGDDRGRNARFAELAVDVEPRRDDRRLDRVEHVEARRERAEAVPAVVRLEQPVGARADSLLRQVVRAPHAEEPVVAVLGVHLAHRAAKVDRLGDRFLDERGAARRLHHRGRDIARRDDRVLRARRRVHQVRLVEAMLVERAVLRILHHDLRGLRDAREQLVRRVRREHERARARAARADRVHVLVERMELGVRQPRFVEVQRVDEIAEQILDLLDVVDDAVVRALRDREDPRLRVRILPERLARERVRLDLLADVLRLELVARNRPDDAEVVARRREEHRNRVRHRDRVQDRLVAVAIDEHDVARRDRRVPDDLVRRRRAVRHEEQVIGAEDPRGVALGRGHGPRVVEQLAKLVDRVAHVRAQHVLAEELVEHLAERVLQERDAAGVPRAVPRVRAFVRVLDELLEERRCERIEVDLRLADDVARNELRRVLEHVDEAVQLAQDVVRQMARRARLAVQEDRDIRVAAAHFGDERAQLDDRGRELGQLAVRAELAEHQFVVVDRQDEARRAARLLRERREIAVARQAEHLDAFFLDRLRQRPDAGARDVLGAEIFVDDDDGKTKLHGRFSKKNDRGAGGCSCPGAAVTRTGDRSDRYASRSGFRQRDTALSLILAAAVGIGHVADFVALEEEHLRDALVRVDLRGQRRRVREFERHVAFPLGLERRHVDDDAAARVRRLAEAHGEYGARNAEIFDGARERERVRRDDAHVALEIDERAFVEVLRIDDRRIDVREDLEFVRAADVVAVARRAVADDLAAVLGGANLIGHERLDHLVLFGHAPNPLVGLDAHKKAPENAAIGKEAAERSGGHERRTFYAIVNAPTRVIAARRRTQARAPRRAAGTPGLPGRDGRAPSGRAPSARRRARGPAR

SEQ ID NO: 50103 - protein, 1372 aa, Burkholderia mallei
  MISC_FEATURE (389)..(389): X=any amino acid
MTKDVSEPTPPHAPDGGAPGGPREPAPKPRRSPGARALVALAWTALALVVLVAATAGALLAAATTERGTQLAWHAAVKLLGGRLAGTLEGGALATGVRIRQLAWTSPDGSGTEVRIDRLAGRWALTRAPWRLSIASLRAGTIDVRVAPSPPSPTVMPKDLRLPLQLAVDDLRFDRLRIHEAGSTTELDNLIFHGASDGRRHDATLERLDTPFGALTANARLDGVRPFAIDGSATYAGKLSGESVDARARVSGSLEALVAELDASGMKLAGRAHIEAAPFAAVPLTRASLAFDHVNPRALLPGAPVADLAVRAQLEPAAPEPNAPKAFVVTGPVSIVNAKPGALGDALLPLVDAHANVRLDAHAQRIDALAVRTIRDGSVTGGGALVNGXGRFDLKVANLDLNAFVAALRPMRLAGPVGVALEPGAQTIDFDLADAKLALGAKAKIKLDAKQTTIADARVSAGNGRIELAGALRHDARSTYDLKAKLVDFDPLALAAAGTPSGARAGSAAGGGKGAGAAKGAKLAQTAAGSQRAGANAARAGGPRAGTARVNGTLAATGALAPGFSTKAQFKLGDSVYDGLPMTGEGTVQMAGARILPSNANLSVAGNQVALRGSFGAPGDRLRFNVDAPQLERLGFGLAGLVRANGELTGSFAHPNVVADYTATGVVFGSNRIGSAQGRADIRDGAKGALVFTADANDIALGAISLKTLSAHLNGTRAKHAFDASAVGVAEGRVINLAVAANGGVVETRGAMRWDGTVTRLSNRGTPSISLDTPLAISAGAQRVTLGAAKLSVEGATLDLKSFTLERGKLRTAGSITNLSVARALEIRAELTGKRSPLRTDLILDGDWDVTLGDTAAGHAQIKRRSGDVTIETGRGVAALGITELSARAAFAPGNRLDATVRARATRIGTLDANVAVPFALRDGVFGVAEDGPLTGRIDADVPALKSTGGLFGPSYLLDGRAALKLTVAGTPAKPKLSGTLTGDDLSATLVDQGVQLKDGIVRVRLTENLVEFQQVEFHGGDGTLRAIGRVRLDGSEPDLTASIVADKLELFAAPDRKLSLSGKAVVENDAPRGGIAINGKFTVDRALFDLPEEAAPHLSDDVVIVRPGSLERGATKTGTAIAKPAPATEKPAPSLAPRANIDIGLGRDFRFKGHGADLRLAGTVTVMSAPGVPLRAVGNVRVTEGSTYTSFGRKLAIENGFFTFNGPVSNPGINILAMRRNQEVEAGVQVTGTVQSPSVKLVSEPNVNDNEKLSWLLFGHGTDQGNNLGQQNAMTTALALLGSATGKRVAQTVGLDEVSVGRSDVGLTDPQVVLVSKAINERFVLGYEQGLQSASNAFKATINLTRFWAISAYGGTFQGVDLNYTRRFDRW

SEQ ID NO: 50104 - protein, 278 aa, Burkholderia mallei
MTPRAASAAPAGTCARRGSMRMGKVYLIGAGPGAADLITVRGARLLEQADVVLHDALVEPAMLDYAPRARRIAVGKRCGQRSSAQHFINKQLVDAAREHAVVVRLKGGDPMLFGRADEEMRALEAAGIDYEVVPGITAALASAAALKRSLTLRGVARSVAFATKSRAPGSDEIREQVSADSLVYYMGRDNAPGIARQLIDAGRAGATPVAIVEACSTPRERMLTLTLADMAAGAAQAWLDPAQPSLLMIGDAFAERAPRLADEPPGDAGGKRGMRDAA

SEQ ID NO: 50105 - protein, 539 aa, Burkholderia mallei
MHDKILILDFGSQVTQLIARRVREAHVYCEIHPNDVSDDFVREFAPKGVILSGSHASTYEDHQLRAPQAVWDLGVPVLGICYGMQTMAVQLGGKVEWSDHREFGYAEVRAHGRTRLLDGIQDFATPEGHGMLKVWMSHGDKVGEMPPGFALMASTPSCPIAGMADEARGYYAVQFHPEVTHTVQGRKLLERFVLDIAGAKPDWIMRDHIEEAVARIREQVGDEEVILGLSGGVDSSVAAALIHRAIGDQLTCVFVDHGLLRLNEGKMVLDMFEGRLHAKVVHVDASEQFLGHLAGVADPEHKRKIIGREFVEVFQAEAKKLTNAKWLAQGTIYPDVIESGGAKTKKATTIKSHHNVGGLPETLGLKLLEPLRDLFKDEVRELGVALGLPAEMVYRHPFPGPGLGVRILGEVKRDYAELLRRADAIFIEELRGTLATEQDAAAGLCEPSQVGKSWYDLTSQAFAVFLPVKSVGVMGDGRTYDYVAALRAVQTTDFMTAHWAHLPYALLGRASNRIINEVRGINRVVYDVSGKPPATIEWE

SEQ ID NO: 50106 - protein, 127 aa, Burkholderia mallei
  MISC_FEATURE (77)..(77): X=any amino acid
GAGILTCFPSATHFCLALGADSPYADERCVGNLGLTARGPFTPFIATHVSIRTSDTSSTLFNAPSQATERSPTMRDXLASAASVYGLAPLHLPRRTTRSVSYYAFFKGWLLLSQPPDCFSLPTSFPT

SEQ ID NO: 50107 - protein, 525 aa, Burkholderia mallei
MTRQSARIPLFIVHGVAKARADDKRAANSPDASSPPPRRAACEAVRRSIIPRRARPPSDDSFGIRKCGQKPTRRLTKRRRTGNRRIVEACLAWRISVTVPPGAPRPAAAGRANSAHAAQGASPVGAAPYLERGSRGYWHASVALLFAGYATFSLLYYVQPLLPEFSKAFGVSPAQSSLALSFATAALAAAVFVAGFVSEALSRHRLMTASLTASSLLTLAAAFAPHWHQLLILRALTGLALGGVPAVAMAYLAEEVHPDGLGLAMGLYVGGTAIGGMAGRVITGILTDLFSWRIAVGAIGVLGLASMLAFRMLLPPSRHFVPRRGLNLAHHRTSLAHHLRGQRELPVLFAMAFVLMGSFVTLYNYIGYRLLAPPYSMGQATIGAIFVVYLVGVVASPLSGRLADTLGRGRVLIASLAVMLGGVALTLLHPVAAIVAGVACVTFGFFAGHAVASGWVGRLAQHGKGQAAALYLLAYYLGSSVVGSLGGRFWSTLGWPGVAALVGALLALGVVAAAWLRARERGGAA

SEQ ID NO: 50108 - protein, 92 aa, Burkholderia mallei
MNKQELIDAVAAQTGASKAQTGETLDTLLEVIKKAVSKGDSVQLIGFGSFGSGKRAARTGRNPKTGETIKIPAAKTVKFTAGKAFKDAVNKR

SEQ ID NO: 50109 - protein, 360 aa, Burkholderia mallei
MSTRADRLRDAIRHGRAIRDTAIDAGDFDGHDWSGGVFERVRFIGVSMKRVRLDEAVFIDCLFRDVDMRQAGCARCTFDRCRFERVDLSASELRDCMMNGTHAAGVYFSGARASGLHCVKSDLGDCGFDDARIESAVFSDTRLVRAAFTRAAVRKAVFYRLDLTSAVFADAAFDDTVFAEANLAGQRLQGQRMHRCQFVGADLRHADFTGARLAGCNFQRAKLTGARLDGVDAPNTVFFEADAPDATCRDAALRGSIWVQADARRIDFTGSELDGAVFQRATCTGARFSRAKLEGADFSYADLTGAVFDEAGFARTAFHGAMAPAIAWRDHPGAVACDAELSDAQAWSRQRDEQARREEC

SEQ ID NO: 50110 - protein, 748 aa, Burkholderia mallei
MPGSDAGPRRRGVHEQRRNRMSNEAKCPFHQAAGNGTSNRDWWPNQLDLSILHRHSSLSDPMGKDFNYAQAFEKLDLAAVKRDLHALMTTSQDWWPADFGHYGGLFIRMAWHSAGTYRTADGRGGAGEGQQRFAPLNSWPDNANLDKARRLLWPIKQKYGRAISWADLLILTGNVALESMGFKTFGFAGGRADTWEPEDVYWGSEKIWLELSGGPNSRYSGDRQLENPLAAVQMGLIYVNPEGPDGNPDPVAAARDIRDTFARMAMNDEETVALIAGGHTFGKTHGAGPASNVGAEPEAAGIEAQGLGWKSAYRTGKGADAITSGLEVTWTTTPTQWSHNFFENLFGYEWELTKSPAGAHQWVAKGADAVIPDAFDPSKKHRPTMLTTDLSLRFDPAYEKISRRFHENPEQFADAFARAWFKLTHRDMGPRARYLGPEVPAEVLLWQDPIPAVDHPLIDAADAAELKAKVLASGLTVSQLVSTAWAAASTFRGSDKRGGANGARIRLAPQKDWEANQPEQLAAVLETLEAIRTAFNGAQRGGKQVSLADLIVLAGCAGVEQAAKNAGHAVTVPFAPGRADASQEQTDVESMAVLEPVADGFRNYLKGKYRVPAEVLLVDKAQLLTLSAPEMTVLLGGLRVLGANVGQSRHGVFTAREQALTNDFFVNLLDMGTEWKPTAADADVFEGRDRATGALKWTGTRVDLVFGSHSQLRALAEVYGSADAQEKFVRDFVAVWNKVMNLDRFDLA

SEQ ID NO: 50111 - protein, 281 aa, Burkholderia mallei
MTSRLETVALPGGERVPKLGQGTWEMGERPAKRAAEIAALREGVDLGMTLIDTAEMYGDGATETLVGDALADVRERLFIVSKVLPHHASRGGVVAACEATLKRLRTDRVDLYLLHWRGSIPLAETIAGFEALRDAGKIRYWGVSNFDVDDMEALVAEAGGAVCATDQILYNLARRGPEFDLLPWLARREMPAIAYSPIDHMRLPKRTALDEIARERGVSPTRVALAWVLGQPNVLAIPKAGSVEHVRDNRAALDLVLGEEELARLDAQFKSPRGKRPLEML

SEQ ID NO: 50112 - protein, 216 aa, Burkholderia mallei
MNAPRFAAPARRTKKLPPLRVGIGGPVGSGKTTLLEMLCKGMRERYDLVAITNDIYTKEDQRLLTIAGALPEARIMGVETGGCPHTAIREDASINLEAVERMLARFPDADIVFIESGGDNLAATFSPELSDLTIYVIDVAGGEKIPRKGGPGITKSDLLVINKTDLAPLVGANLEVMASDTRKMRGERPYVMCNLKALDGVADVIAFIENKGLLTV

SEQ ID NO: 50113 - protein, 810 aa, Burkholderia mallei
MQFPESWLRTFVDPQLTTDELSHALTMAGLEVESLRPAAPPTEKIVVGRVLEVVKHPDADKLNVCQVDAGTGATLQIVCGAPNVAPGIKVPVALVGAKLPPAEEGGAPFAIKLSKLRGVESQGMLCSARELKLSEDHSGLMILPEGTPVGQDIREALNLDDTVFEIKLTPNKADCLSVFGIARETAAITGAPLAAPDIRPVLAELTETLPVKISAPDLCGRFSGRVIRGVNARAKTPHWMVERLERAGQRSVSALVDISNYVMFELGRPSHVFDLDKIHGGIDVRWGKRGESLKLLNGNTIELDETVGVISDGAQVESLAGIMGGDSTAVTLDTTNIYLEAAFWWPDSIRGRARKYNFSTDAAHRFERGVDYSTTVEHVERITQLILDICGGQAGPVDDQIVSLPQRAPVSMRASRANRIIGVEIGEDEIAQIFTRLGLAFERDGDVFRVTPPPHRFDIEIEEDLIEEVARIYGFEKIPARPPVAKSEMRATDETRRSVHAIRHALAARDYAETVNFSFVDAEWERDFAGNDNPVRLLNPIASQLSVMRTTLFGSLVGVLRHNLNRRAERVRVFEAGRVFVADPSVKAGELAVEGYAQPKRIGALAYGPVVEEQWGTATRQVDYFDVKGDLEALLAPVPARFVKAEHPALHPGRSARIEVDGHAVGWIGELHPRLMQKYELPHAPVMFEIDTDALVARALPAPSEVSKFPPVRRDIAVVVDQKVEVQALFDEMKKALADDACKFVQRVALFDEFRAKSNTSGGLSAHEKSLAFRVTLQDAAGTLQDETVDQAIQTLVDRMARVYGARLRG

SEQ ID NO: 50114 - protein, 272 aa, Burkholderia mallei
  MISC_FEATURE (45)..(45): X=any amino acid
MTRAIKAASAATEAGALGAAGRRAPVMLARVAALAALAVMLARPXWLEPLFAPFADNGAPAIYRRASLLDLTLSHLAIVGAASAAGAVVALAAGIFVTRRAGAEFLPVARSVVHIGQTFPPVAVLALAVPAVGFGVKPVLIALILYGLLPIFESTIAGLQDVPAGAVDAARAMGMSALQRLAWIELPLAFPVVLNGIRLAVVINLGTATIGSTVAAKGLGDVIIAGLQTSNTAFVLQGGLVVALLAVLIYDALGVIGRWLAPASAAREEGGA

SEQ ID NO: 50115 - protein, 932 aa, Burkholderia mallei
  MISC_FEATURE (426)..(426): X=any amino acid
MYSLYAAPVTPPLCARRAPARRSQPDSGVAALHRIVVGIGVRLGDLLQTRKLGAFIETDECNTLRRPPHLANLRHARADQHARRRDQHDLILGVDERRGNDAAVALGGLDRDHPLRATPVARVLGDRRALAVAVLGRGQHRLFLAARDEHRDHLLGVVELHPAHAARLAAHRPHVVLVETHRLAGVGEQHHVVRAVGDRRADQVIAVVEADRDDALLHRAAERFERRLLDRAQSRRHEHVLVGREFPHGQHDIDLLAVLQREHVDDRTAARVARALRHLVHLDPVHAAAVREAQDVVVRVRDEQRLDPVVFLHLRRLLAAAAALLRTVLGQRLRLHVARVRHRDHHVLRRDQVFGVQLGRVQLDLRAARIAELRLHLRQFVADQRRDPLGPRENVEQIGDLRHHVAIFADDLVLLEAREALQAHLXDFLRLRVGQPVQAVALHPERRTQALRTVRVAPAGRRVLGFRAREHVAHERRIPRFRHQLLLRDRRRRRGLDDRDELVDVRERDGEAFEHVAALARLAQFVDGAPRQHFAPMRQEALQDLPQIQELRLVVDERDHVHAERVLQLSRLVQVVQHHLGHFAALELDHDAHAALVGFVADVGDALELLLVDELRDPLEQRALVDLVRQFVDDDRHALAAVDLLEVRGRAHHDAPAPGAIAVAHTGDAVDDAGRREIGRGDDLDQFVDARLRIVQQVKAGVDDLVQVVRRDVGRHADRDPRRTVDEEVRNPRRQDERLHLAAVVVRAEVDGFLVDVREQFVADLGHPDFGVAHRGRVIAVDRAEVALAVDEHVTQREILSHPDDRVVDRGVAVRMVLTDHVADDTRGLLVRPVPVVVQLVHREQHAPVHGLQAIADIRKGTADDHAHGVIEIRLAHFLLEGGGQGLFGELIHVSVSFRSEDGAAFRVGAARATQRAILTCAPTRPNAGPSI

SEQ ID NO: 50116 - protein, 313 aa, Burkholderia mallei
MDTLQNMRVFVRVVDAGSFTAAAQQLNSTTAYASRAVSDLEAHLRTRLLNRTTRRIALTEAGERYLQRCEQILAYVEQAEAEASDAHARPSGKLKVHCMTSLGQHYTVPAVSRYRQRYPEVQVDLTLAQRLPDLLDEGFDVSLVVGRELPDSGLVSQRLGETFSVVCASRGYIEQHGAPQRPQDLAGHVCLGMVAPGLYWDEWKLVGPQGEQSVTLAPPPFRVNVAEALAAGIREGMGIGVLPLYSAIAGLRNGDFVRVMPEYRSHVMNIYALYASRQYLDAKIRTWVDFLRDELPSILEADEAALERFTVQT

SEQ ID NO: 50117 - protein, 281 aa, Burkholderia mallei
MRRARGGAPLLQHITGDHDEERARDARAIDRGGRVEQRPAVARRIVDHQPARDPAEQRRAERDEDRKAVEQLEDERAAPDDDRNADEQAEDHERDPVARIRLLGRAGDRDHVVEAHHRVGDHDRLHRLPQLVGGLDVLVRVLGGRHQPHADPQQQHAARELQERHVEQQHRERDQHDAQQDRAGRPPQHAAHALLRRQVTAGERDHDRVVAAEQDIDDDDLGDCAPMERSKEFEHGSQAKEMRPAGVGMRSALAGQPDAGLTKGLREHNKKRRRNRRFLRR

SEQ ID NO: 50118 - protein, 403 aa, Burkholderia mallei
MLNWDDEKTAVTPASGAQHNAMRDPAGMAVGLQAAPAAHQASSARDIFAGDFAVAPNASAAVASEARVNVADKRIINGKTDVNQLVPFKYKWAWEKYLAGCANHWMPQEINMSRDIALWKDPNGLTEDERRIVKRNLGFFVTADSLAANNIVLGTYRHITAPECRQFLLRQAFEEAIHTHAYQYIVESLGLDEGEIFNAYHEVPSIRAKDEFLIPFIHTLTDPAFTTGTLEADQKLLKSLIVFACIMEGLFFYVGFTQILALGRQNKMTGAAEQYQYILRDESMHCNFGIDLINQIKLENPHLWTAEFRAEIRELFKHAVDLEYRYAEDTMPRGVLGLNASMFKSYLRFISNRRCQQIGLDPLFPNEENPFPWMSEMIDLKKERNFFETRVIEYQTGGALSWE

SEQ ID NO: 50119 - protein, 926 aa, Burkholderia mallei
MPEERNLEGKTLLLVDGSSYLYRAYHAMPDLRGPGGEPTGALYGIVNMLRRMRKDVSAEYSACVFDAKGKTFRDDLYADYKAHRPPMPPDLALQIEPIHTAVRALGWPLLMIEGVEADDVIGTLAKQAEQHGMNVIVSTGDKDLAQLVTDRVTLINTMTNEALDRDGVLAKFGVPPERIVDYLSLIGDTVDNVPGVEKCGPKTAVKWLTQYGSLDGVVEHAGEIKGGVGDNLRRALDFLPLARKLVTVETGCELAPHVESFDASLATDGEGRDALREIFAKYGFKTWLRELDSEPAAAAGAAGAAAAGAAPDPASGATAELPLATARNYATVQTWEQFDAWLAKISAAELTAFDTETTSLDPMRAEIVGLSFSVEPGHAAYVPVAHRGPDMPAQLPRDEVLAKLTPWLEDAGKKKLGQHLKYDAQVLANYGIALNGIEHDTLLESYVLESHRTHDMDSLALRHLGVKTIKYEDVAGKGAQQIGFDEVPLAQASEYAAEDADITLQLHHALYPQIAREPGLTRVYRDIELPVSLVLRKMERTGVLIDGDRLSRQSGEIATRLVALEQEAYALAGGEFNLGSPKQIGQIFFERLQLPVVKKTPSGAPSTDEEVLQKLAEDYPLPKLLLEHRGLSKLKSTYTDKLPRMVNPDTGRVHTNYAQAVAVTGRLASNDPNLQNIPVRTTEGRRIREAFVAPPGSKIVSADYSQIELRIMAHISEDESLLRAFAHGEDIHRATAAEVFGVTPLEVTSDQRRIAKVINFGLIYGMSSFGLASNLGITRDAAKLYIDRYFLRYPGVARYMEETRMRAKEKGYVETVFGRRLWLPEINGGNGPRRQAAERAAINAPMQGTAADLIKLSMIAVDDWLERGGLRARMIMQVHDELVLEVPEDELSIVREKLPEMMCGVAKLKVPLVAEVGVGENWEEAH

SEQ ID NO: 50120 - protein, 713 aa, Burkholderia mallei
MTDHTPHSSPPASPTPPQGPAPKRRRYFRTLAGLVLGAAIAVGAVGTWTLHRIWTALPSVEPLAVYRPALPLRIFSREGELLAEYGVERREFVPLDRIPPLVRHALLAAEDAQFYTHGAVDIGGLARATVANVVTGQPGQGGSTITMQVARNFFLTREKVLSRKLAEILMSYKLERAYSKDKLLELYMNEIYLGERAYGFAAAASVYFGKPLDALTPGEAAVLAGLPKAPSAFNPVVNPARATMRRNYVLGRMRALGYLDEAAYRQAADAPIALATTPPPGILAAPYVAERARRMMVERFHDDAYTLGLDVTTTIAMREQRAADAALARGLAQVGRRDAKDALEGALVSIDAATGDILALVGGADFSHNVFDHALQAYRQPGSSFKPFVYSAALEKGMFPGVLIDDTQRTLSRDETGANPWRPRNFGNHYEGFIPVRRGLMRSKNLVAVSLMQVARPDFVQQHAARFGFEPLRNPASLPLALGAGSATPLEVASAYGVFANGGVRMEPRLIESVRQRHGGALFDAQLAPGVRVISARNAFVMDSMLRDVVAHGTARRAVALKRADAAGKTGTSNGSKDVWFAGYSSGVVSVVWMGYDAPRSLGRATGSSAALPVWVDYMKTAVDGRGAIERTPPADVALVDGDFVYAEYANGDKCAPSLPPFVRSPFACGAARGAPADGGAPASAAGAAGAPTPAAVDAAERARVLELFRTED

SEQ ID NO: 50121 - protein, 275 aa, Burkholderia mallei
MSNSRQHQGHFARKRFGQNFLVDHGVIDAIVAAIRPERGERMVEIGPGLGALTGPVIARLATPGSPLHAVELDRDLIGRLEQRFGELLELHAGDALTFDFGSIARPGDEPSLRIIGNLPYNISSPLLFHLMSFAPVVIDQHFMLQNEVVERMVAEPGTKAFSRLSVMLQYRYVMDKLIDVPPESFQPPPKVDSAIVRMIPHAPHELPAVDPAVLGEVVTAAFSQRRKMLRNTLGGYRDLVDFDALGFDLARRAEDIGVDEYVRVAQAVASARASG

SEQ ID NO: 50122 - protein, 420 aa, Burkholderia mallei
MHLSELKSLHVSELIEMANGLEIENANRLRKQELMFAILKKRAKTGETIFGDGTLEVLPDGFGFLRSPEMSYLASTDDIYISPSQIRRFNLHTGDTIEGEVRTPKDGERYFALVKVDKVNGQPPKASKHKIMFENLTPLHPNKPLSLEREMRGEENVTGRIIDMIAPIGKGQRGLLVASPKSGKTVMLQHIAHAIKQNHPDVILFVLLIDERPEEVTEMQRSVAGEVIASTFDEPATRHVQVAEMVIEKAKRLVEMKHDVVILLDSITRLARAYNTVIPASGKVLTGGVDANALQRPKRFFGAARNIEEGGSLTIIGTALIETGSRMDDVIYEEFKGTGNMEVHLERRLAEKRVYPSINLNKSGTRREEMLIKPEILQKIWVLRKFIHDMDEVEAMEFLLDKIRQTKNNAEFFDLMRRGG

SEQ ID NO: 50123 - protein, 305 aa, Burkholderia mallei
MADRDGKIWMDGKLIEWRDAKIHVLTHTLHYGMGVFEGVRAYKTADGGTAIFRLKEHTKRLLNSAKIFQMDVPFDQETLEAAQRDVVRENKLESCYLRPIIWIGSEKLGVSAKGNTIHVAIAAWPWGAYLGEEGLAKGIRVKTSSFTRHHVNVSMVRAKASGWYVNSILANQEATADGYDEALLLDVDGYVSEGSGENFFLVNRGKLYTPDLASCLDGITRDTVITLAKEAGIEVIEKRITRDEVYTADEAFFTGTAAEVTPIRELDNRTIGGGARGPITEKLQSAFFDVVNGKSAKHADWLTKI

SEQ ID NO: 50124 - protein, 285 aa, Burkholderia mallei
MSTAEASSPQGRTPQPGREREMAAKPRDEAAGYVGSGRLDGKVALVTGGDSGIGRAVAVGFAKEGADVAIVYLNESDDAAHTKHLIEQTGRRCETIALDIGERANAHVALRRAVERFGRLDVLVNNAGEQHVQTDIGQISEAQLTHTFRTNIFAMFFCTQAALTHMKAGARIVNTASVTAYHGNPVLIDYSATKGAIVSFTRSLALNLASRGIHVNAVAPGPIWTPLIQSTFDDEQRARFGANVPLKRPGQPDELIGCYVLLASDGADYMTGQTLHPNGGTIVNG

SEQ ID NO: 50125 - protein, 336 aa, Burkholderia mallei
MNMHDRTAAPSASCAPAAASPARATGPALAALRRSTTFYPLVGLVAVCVAMVFASDSFLSAANLENVLRQVSINAIIGVGMTCVILTGGIDLSVGSVMALSGTLAAGLLVAGANGAAALAAGIGVGVALGAANGLFVAFAGMPPIIVTLATMGIARGLALIYTGGYPIDGLPDWVRFFGSGKVLGVQMPVLTMLAVYALAWLMLERMPFGRYVYAIGGNEHATRLSGVRVSRVKLAVYTFAGLTSALAALVLTGRLMSGQPNAGGGFELDAIAAVVMGGTSIAGGRGSIVGTLVGALLLGVLNNGLNMIGVNPYVQNVIKGAIILLAIYIGRERRT

SEQ ID NO: 50126 - protein, 377 aa, Burkholderia mallei
MLISNARVVTRDDVFIGTVQIDGESIRAVSRGTTAARDADDWGGDYLLPGLVELHTDNLEKHLAPRPGVYWNVDAAFVTHDAQVAAAGITTVFDALAIGTRLNVGVRGRDVQTQCADALARFASHGLLRAEHFLHLRCEIATEDVVDVFDSLARHPRLRLASVMDHTPGQRQWKDPQQWRHYQERHRKWSDEEAATTIAELADEQQRYADAHRRAIVARCRALGVPVASHDDTVIEHVEQAAREGIALAEFPTTHAAAEAARARGIATVMGAPNLVRGGSHSGNVSALALARAGLLDILSSDYVPSSLLCAAFDLVHQAHWSLPRAIDTVSGSPARHTGLRDRGEIAPGLRADFVRVALHGTLPVPRATYVRGRRVV

SEQ ID NO: 50127 - protein, 260 aa, Burkholderia mallei
MTTVRKNFLLLMTLQISTYVVPLVTLPLLTRVLGPEAYGQLSFVLAVITYFINFTNYSFDLTATPRIALAHDDLAARSKIFWATFAAQAAITVAGFAILLALTFAIERFAIDRTLLVIGFGMTVGAALTPGWYFQGIQKLRIYSMTLFACRALSVPAMYLCVRSPADLIDAVAINAAVPLVCGVLVFGYLIVQREVVFVRIGAADVAASLKGGWQVFLASTSVAFYASTNTVLLGFVSGNVAAGYFAAGDKLIRLGHSAC

SEQ ID NO: 50128 - protein, 566 aa, Burkholderia mallei
PRASGVARIARRPAPPGHACSPARRTLSRPARYIRLASSPAPPDLARLPDRFGATRRRPRGRLALRAFVRLERTSRPRPPAAAAPGSPGCPAAPDGARMLEWPASNSPYETGAMNIVILAAGTGKRMRSALPKVLHPLAGRPLLSHVIDTARALAPSRLVVVIGHGAEQVRAAVAAPDVQFAVQEQQLGTGHAVRQALPLLDPSQPTLVLYGDVPLTRTATLKRLADAATDARYGVLTVTLDDPTGYGRIVRDQAGCVTRIVEQKDASPDELRIDEINTGIVVAPTAQLSMWLGALGNDNAQGEYYLTDVVEQAIEAGFEIVTTQPDDEWETLGVNSKAQLAELERIHQRNLADALLAAGVTLADPARIDVRGTLACGRDVSIDVNCVFEGDVTLADGVTIGANCVIRHAAIAAGARVDAFSHLDGATVGANAVVGPYARLRPGAVLAADAHVGNFVEVKNATLGQGSKANHLTYLGDADIGARVNVGAGTITCNYDGANKFRTVIEDDVFVGSDTQFVAPVRVGRGVTVAAGTTVWKDVAADMLVLNDKTQTAKSGYVRPVKKKS

SEQ ID NO: 50129 - protein, 167 aa, Burkholderia mallei
MAAPMATPFSRASARATSTSRPDMRYSVNEGHLELPGQWLDRSVNALLPAMAEVTGSNLVLTRDELPYGVEFADYVDVQRAKYRKELSGLQMQRDEPGVLDGRPCQFLAFTWNKDDLLIHQMAVIVLDAPLVLTYTSPGRLPDGVRDAIGAALASFRFHRGAQLPAS

SEQ ID NO: 50130 - protein, 277 aa, Burkholderia mallei
MTSSFTTIGGSGTTVNSLPYDTMSSNGQSSGTSGANTTNGTAGTNGTSGANSGINVASSLSTTSAADLQTTFLKLLVTQLQNQDPTSPVDSSQMTSQLAQINTVSGIAQLNTALTSLSSQLTAGQQTQAAMLIGSNVLAPGNTVPVKSGAASPFGVQLTSAVSNLTITVKNASGVVVNTINAGAQSAGTVPFNWTPTDTAGNKLPDGTYTISASYTDTSGKQYAPTTLSVLSVIKQADGTPGLVLSNGSTVGFSQVASIFPNTTKSASTGNASSSTN

SEQ ID NO: 50131 - protein, 329 aa, Burkholderia mallei
MALLEVKDLGVRFTRRKGEPVDAVSGVSFSLEAGRTLGIVGESGSGKSQTVMALLGLLAGNGSTSGEALFDGENLLRMNTRQLNAVRGDRIGMIFQDPMTSLNPFLTIERQMTESLQLHRKMSRKHALKRAIDALEVVRIPDAARRIRMYPHEFSGGMRQRVMIAMALLLEPEILIADEPTTALDVTVQAQIIELLRELNRERGTSIVLITHDMGVVAGLADDVMVMYAGRTVEYASADAIFSAPSHPYTIGLLNALPRLDAPDDAPLVAIPGNPPLPGQGLLGCAFAKRCAHASERCGVERPDLIAYSDAGAVRACHRPIAEITGGLR

SEQ ID NO: 50132 - protein, 445 aa, Burkholderia mallei
MKPVIALVGRPNVGKSTLFNRLTRSRDALVADLPGLTRDRHYGEGRVGARPYLVVDTGGFEPVAKDGILHEMARQTRQAVEEADVVVFIVDGRNGLAPQDKSIADYLRKTGRPIFLVVNKAEGMKYTAVASDFYELGLGDPRAISAAHGDGVNDMINEALEVAYAGEPQESEEAAAARGIKIAIVGRPNVGKSTLVNTLIGEDRVIAFDMPGTTRDSIYVDFERNGKHYTLIDTAGLRRRGKVFEAIEKFSVVKTLQSISDANVVILLLDARQDISDQDAHIAGFVVEQGRALVVGVNKWDGLDPHVRERTKADLARKLKFLEFAKFHFISAAEKTGIGALMRSVDDAYAAAMKKLPTPKLTRALIEAVEFQQPRRRGPVRPKLRYAHQGGQNPPIIVIHGNALDAVTETYKRYLENRFRETFSLTGTPLRIEFRSSTNPYADKD

SEQ ID NO: 50133 - protein, 264 aa, Burkholderia mallei
MDEATQSAIQFDVVTLFPEMFRALTDWGITSRAVKQGRFGLRTWNPRDFTTDNYRTVDDRPYGGGPGMVMLAKPLEAAIGAAKAAQAAQGVATSRVVMMSPQGAPLTHERVARMAAEPGVVLLCGRYEAIDQRLIDRCVDEELSLGDFVLSGGELPAMALMDAVVRLLPGVLNDAQSAVQDSFADGLLDCPHYTRPEEYEGVRVPDVLLGGHHAEIERWRRQEALRNTIAKRPDLIARARREKLLSRADEAWLASLAKEAKQAS

SEQ ID NO: 50134 - protein, 436 aa, Burkholderia mallei
MTSLHDRHIKPLILAGLTGENWHLEDYVARGGYKQLRRILEEKIPPEQVIADVKASGLRGRGGAGFPTGLKWSFMPRQFPGQKYLVCNSDEGEPGTFKDRDILRWNPHALIEGMAIGAYAMGITVGYNYIHGEIFEVYRRFEAALDEARRAGFLGEKIMGSDFSFQLHAHHGYGAYICGEETALLESLEGKKGQPRFKPPFPASFGVYGKPTTINNTETFAAVPFLLAVGPQNYLEMGKPNNGGTKIFSVSGDVERPGNYEIPLGTPFATLMELAGGMRGGKKIKAVIPGGSSAPVIPGDIMMQTDMDYDSIAKAGSMLGSGAVIVMDETRCMVRSLLRLSYFYYEESCGQCTPCREGTGWLYRVVNRIEHGEGRQEDLDLLNSVAENIMGRTICALGDAAVMPVRGMLKHYWDEFAYHVEHKHCMVGGHAHAAVA

SEQ ID NO: 50135 - protein, 202 aa, Burkholderia mallei
MKLIGSLSSPFVRKARIVLAEKKIDYKLELENVWAPDTNIHASNPIGKVPCLVMEDGAAVFDSRVICEYVDTLSPVGKLIPPSGRERVEVRCWEALGDGVLDAAVAIRIEHTQREPQHRSDAWIARQQRKVDDGLVAMSQGLAGKTWCVGNHYTLADIALGCTLGYLDFRMPEINWRERHPNLDKHFAKLAQRQPFVDTVPQ

SEQ ID NO: 50136 - protein, 220 aa, Burkholderia mallei
MRLILLGAPGAGKGTQANFIKEKFGIPQISTGDMLRAAVKAGTPLGVEAKTYMDEGKLVPDSLIIGLVKERLKEADCANGYLFDGFPRTIAQADAMKEAGVAIDYVLEIDVPFSEIIERMSGRRTHPASGRTYHVKFNPPKVEGKDDVTGEPLVQRDDDKEETVKKRLDVYEAQTKPLITYYGDWARRGAENGLKAPAYRKISGLGAVEEIRARVFDALK

SEQ ID NO: 50137 - protein, 349 aa, Burkholderia mallei
MTSSADSGRDAAWLDDFLALTLAGDAPPAEAGECAARAVRWRWLGDGLLRLEPADAAQRMQSVLVSAGVHGDETAPIELLSTLVRDIARGALPLRCRLLVALGNPGAMRAGERYLDDDLNRLFGGRHAQLAASREAPRAAQLEAAAALFFSTAGRARGARWHIDMHTAIRTSVFEQFALLPHTGEPPTRTMFEWLGEAQIAAVLLHTTKGSTFSHFTAQACGALACTLELGKVMPFGANDLSRFAPADAAVRRLVSGRRDAPRGALPRAFTVVDQITKQSDALELFVANDVPNFTPFARGTLLARDGDYRYAVRHEQERIVFPNPSVKPGLRAGLLVIETTRDTHAALA

SEQ ID NO: 50138 - protein, 412 aa, Burkholderia mallei
MSRRRVVVTGLGLISPVGNNVADGWANLVAGKSGIVNITKFDATNFSTRFAGEVKGFNVEEYIPAKEARHMDTFIHYGIAAGMQAMQDSGFQVTDENAERVGVVVGSGIGGLPMIEVTQTELLNRGPRRISPFFVPASIINMISGHLSIKFGIKGPNLAIVTACTTGLHCIGEAARLIEYGDADVMIAGGAEATVSPLGIGGFAAARALSQRNDDPATASRPWDKDRDGFVLGEGAGVMVLEEYEHAKARGAKIYAEVAGYGMSGDAYHMTAPLENGDGARRCMLAALRNAGVNADQVNYLNAHGTSTPLGDLAETVAIKRAFGDHSKDIVVNSTKSMTGHLLGGAGGLESVFTVLAVHNQVSPPTINIFNQDPECDLDYCANEAREMKIDVALKNSFGFGGTNGTLVFKRA

SEQ ID NO: 50139 - protein, 262 aa, Burkholderia mallei
MIALGHRESSIPFSYYDQNQQVVGYSRDFQMKVVDAVKKKLNLPNLQVKNIPVTSQNRIPLVQNGTVDIECGSTTNNLDRQKQAAFSDTIFVIGTRLMTKKDSGIKDFADLKGKTVVTTAGTTSERLLREMNNKNQMGMSIISAKDHGESFQTLETGRAVAFMMDDALLAGERAKAKQPGEWVIVGKPQSQEAYGCMMRKDDPAFKKVVDDAIVQVEKSGEAAKIYSKWFENPIPPKGLNLNFPLSDEMKKLYANPNDKALD

SEQ ID NO: 50140 - protein, 349 aa, Burkholderia mallei
MRQLLDHAAENGYGLPAFNVNNLEQVQAIMAAADEVGAPVIMQASAGARKYAGEAFLRHLIEAAVESYPHIPVVMHQDHGQSPAVCMAAIRSGFTSVMMDGSLEADGKTVASYEYNVDVSRKVVEMAHSIGVTVEAELGVLGSLETMKGDKEDGHGAEGTMTREQLLTDPEQAADFVKLTQCDALAIAIGTSHGAYKFTKKPTGDILSIQRIKEIHARIPNTHLVMHGSSSVPQDLLAEIREFGGDMKETYGVPVEEIQEGIKHGVRKVNIDTDLRLAITGAIRRYMFENPGKFDPRDYLKPAREAAKKICVARYLAFGCEGQAAKIKPVPLEKIAEKYKAGDLAQVVR

SEQ ID NO: 50141 - protein, 381 aa, Burkholderia mallei
MNLLKRYAAPVACAAAVLVFAACSSTKDARRVPTPLTEFKPVLDVQQVWTASVGKGGRYSFSPVAVGDAVYVAGANGSVEKIDAKTGQQVWRTKIGSDLSAGVGSDGNLTAVGALKGGVFVLGPDGKQLWKATVQGEIFSPPLVGNGLVIVRTIDGQVIAFAAQTGEQKWTYRNRAVPLNLRVSAGMTFAGDAAVLAGFPGGGLVALNLQTGEPFWQTPVSFPKGVTEVERINDVTGAPTLVGAETCAVTFQGQLGCFDANSGRPLWEKPFSSRSGVAQDDTVVVGGDDWSVVSAYDVATGKALWRNDKLKSRDVGVPYLLGHAVVLGDYKGFVHFLSRDDGTFVARMKTDGSAIAAAPVLAGNTLVVLTQDGGVYGFRPR

SEQ ID NO: 50142 - protein, 316 aa, Burkholderia mallei
MSDQLQKFMFNAAPVRGEIVSLRSTWQEVLTRRDYPTPVRNVLGEMMAACALLSANLKFDGTLIMQIFGDGPVKMLVVQCSSDLAMRATAKFSGDAARTVGDGTSFAELINASGHGRCVITLDPADKRPGQQPYQGIVPLNGEDGPLASIADVLEHYMRHSEQLDTRLWLAADHDRAVGVLLQKLPGDGGIVPRVEQTDTDTWERVCTLGGTLSSKELLEVEPETVFRRLFWQENVQHFEPTSTRFQCTCSREKVGGMLRMLGRVEIDGVIEERGHVEIHCEFCNQRYEFDPVDVAQLFSTPELGTGVAPAAAQRH

SEQ ID NO: 50143 - protein, 275 aa, Burkholderia mallei
MAIVKVKPTSPGRRAMVKVVNKDLHKGKPHAALLDTQSSKAGRNNNGRITTRHQGGGHKQHYRVIDFRRTKDGIPAKVERLEYDPNRSANIALVLYADGERRYIIAPKGVTVGQQLMSGSEAPIRAGNTLPIRNIPVGTTIHCIEMLPGKGAQMARSAGTSAMLLAREGLYAQVRLRSGEIRRVHIECRATIGEVGNEEHSLRQIGKAGANRWRGIRPTVRGVAMNPIDHPHGGGEGRTAAGRDPVSPWGTPTKGFRTRRNKRTTTMIVQRRHKR

SEQ ID NO: 50144 - protein, 435 aa, Burkholderia mallei
MADSYFPRWRAQPRDDAARVIAPDERLPWPQTFAMGVQHVVAMFGSTVLAPLLMGFDPNLCILMSGIGTLLFFVLVGGRVPSYLGSSFAFIGLVIAVTGYAGGGANPNVPVALGGIVACGVVYALIGLVVAAVGTRWIETLMPPVVTGAIVAVIGLNLAPIAVKGVSASTFDATLALVTVLCVGGVAVFARGMLQRLLILVGVLIAYVIYAVLTNGMGLGKPIDFAIVAQAAWFGVPTLHRPVFDPHAMLLIAPVAVILVAENLGHIKAVSAMTGRNLDRYVGRAFIGDGLATVVSASMGGTGVTTYAENIGVMAVTRIYSTLVFVAAALIAIALGFSPKFGAVIQTIPGPVLGGVSIVVFGLIAVTGARIWVVNRVDFSDNRNLIVAAVTLVLGAGDFSLKLGGFALGGIGTATFGAILLYALLRKEKEPGPMV

SEQ ID NO: 50145 - protein, 546 aa, Burkholderia mallei
MKASDLFVKALEAEGVQYVFGIPGEENLDLLESLRRSRIKLVLTRHEQAAGFMAATYGRLTGKTGVCLATLGPGATNFVTAAAYAQLGGMPMLMITGQKPIKSSKQGHFQIVDVVGMMQPLTKLTRQIVSIGNIPSAVREAFRRAEEERPGATHLELPEDIAHEEGDGKPIPASYSRRPIAEEKALARAVDAIQAARHPLLMIGAGGNRKTTCRMLKEFVDTTGIPFFTTQMGKGVIDETHPLWLGNATLSDGDFVHRAIEHADCIVNVGHDVIEKPPFFMRADDKTVIHVNFLGAQVDPVYFPQIEVVGDIANAVWQMKEKLARQPHWDFSRFMLIKAHFDAHLKKGQDDPRFPMYPVRIVNDLYRSLPEDGIVCLDNGMYKIWFARYWRAHEPNSLLLDNALASMGAGLPSAIATKIVHPQRKVIAVCGDGGFMMNSQELETAVRLKLDLVVMILRDDAFGMIRWKQENMNFPDYAMTLANPDFVAYAQSYGAHGHRIASADALEPLVRECFASPGVHLIDVPIDYSDNERVLNREIKRLSAQL

SEQ ID NO: 50146 - protein, 384 aa, Burkholderia mallei
MTLSITSNFDAGAIDVVSCERADAIRLRVRGDNRSEFAQWFYFRLTGARGERCVMTFENANDCAYPAGWRDYRAVASYDRVNWFRVPTSYDGQMLTIDHTPEFDSIHYAYFEPYSEERHSEFLGAVQQMPQASVVELGRTVEGRPMSLVVLGTPDEAGAAKKKVWIIARQHPGESMAEWFIEGLVKRLVGWGDWSGDPVARKLYDHATFYIVPNMNPDGSVHGNLRTNAAGANLNREWMEPDAERSPEVLVVRDAIHAIGCDLFFDIHGDEDLPYVFAAGSEMLPGFTEQQRVEQSAFIDSFKRASPDFQDEHGYPPGKYREDAFKLASKYIGHRFGCLSLTLEMPFKDNANLPDEHIGWNGARSASLGAAMLGAILEHVRAFA

SEQ ID NO: 50147 - protein, 648 aa, Burkholderia mallei
RAVVFAYHNVGVRCLQVLLARGVDVALVVTHEDSPTEHIWFGSVAAVAAEHGIAVITPADPAGADVRAALASAKPDFIFSFYYRHMLPVDLLALAARGAYNMHGSLLPKYRGRVPTNWAVLNGETETGATLHEMAAKPDAGAIVGQTAVPILPDDTAAQVFDKVTVAAEQTLWRVLPALLAGEAPHLPNDLSQGSYYGGRKPEDGRIDWTQPAANVYNLIRAVAPPYPGAFTDLGGTRFVIARARLAAPGTAAARAAVDLPPGLHVSDNALFGVCGDSRAVSILELRRPHDGGEAVVSPAQFAQFISFFPSFMKAKKVLILGVNGFIGHHLSKRILETTDWEVFGMDMQTDRLGDLVKHERMHFFEGDITINKEWVEYHVKKCDVILPLVAIATPATYVKQPLRVFELDFEANLPIVRSAVKYGKHLVFPSTSEVYGMCADEQFDPDASALTYGPINKPRWIYACSKQLMDRVIWGYGMEGLNFTLFRPFNWIGPGLDSIYTPKEGSSRVVTQFLGHIVRGENISLVDGGSQKRAFTYVDDGISALMKIIENSNGVATGKIYNIGNPNNNFSVRELANKMLELAAEFPEYADSAKRVKLVETTSGAYYGNGYQDVQNRVPKIENTMQELGWAPQFTFDDALRQIFEAY

SEQ ID NO: 50148 - protein, 173 aa, Burkholderia mallei
MEIGQYQPNLEGDGLRIGIVQSRFNEPVCNGLADACVEELERLGVSGEDVLLVTVPGALEIPLALQKLAESNQFDALIALGAVIRGETYHFELVSNESGAGITRIALDFNTPIANAVLTTETDEQAIARMTEKGRDAARVAVEMANLTMTLDQLSDDEEDEEDEDDEDEEERA

SEQ ID NO: 50149 - protein, 241 aa, Burkholderia mallei
MHATDDRLPRYQRLRDELAALIAARHWRPGEAIPTEQALAKRYDVAIGTVRKAVDLLVADGMLERFQGRGTFVRRASFDSSLFRFFRFQGRHGERRIPESRILRREVVEAPSAVAAALQIPARASVIEMTRVRLIDGAPMLAEEIWLPYDRFAAFARLELASIGDLLYPVYEAHCNQIVASATETLTVEAIGPVHARLLRIEPGTPAVVIERLAYGYDRRPLEWRRSRGPASEFIYQAEIR

SEQ ID NO: 50150 - protein, 493 aa, Burkholderia mallei
MTGDTTFRGQGGASHREAQGVVFAVRLGSRCAPRCVLCRWLSRLAFLGIPPPRRAGCAAGCATYPATSVNLYTLNGNRMFDRAQSTIANVDPEIWQAIQQENVRQEEHIELIASENYTSPAVMAAQGSQLTNKYAEGYPGKRYYGGCEYVDIVEQLAIDRVKALFGAEAANVQPNSGSQANQGVFFAMLKPGDTIMGMSLAHGGHLTHGSPVNMSGKWFNVVSYGLNEAEDIDYEAAEQLAHEHKPKLIVAGASAFALKIDFERLAKIAKAVGAYLMVDMAHYAGLIAAGVYPNPVPHADFVTTTTHKSLRGPRGGVILMKAEYEKQINSAIFPGIQGGPLMHVIAAKAVAFKEALSPEFKEYQQKVVENARVLAQTLVKRGLRIVSGRTESHVMLVDLRAKNITGKAAEAALGNAHITVNKNAIPNDPEKPFVTSGVRLGSPAMTTRGFGPQEAELVGNLIADVLEHPEDAATIERVRAQVAELTKRFPVYR

SEQ ID NO: 50151 - protein, 306 aa, Burkholderia mallei
MSAPDIRIGINPLSWMNDDLPSLGGETPLAVALTEGREIGYEGFELGNKFPREPQALKALLAQYDLSLVSGWYSGRLAERGVQEEIDAVGPHLELLAKNGATVMVYGEVAGTIQGSPAPLYQRPRFVDDAQWDAYAERVDAFARYTRAQGVRLGYHHHMGAYVESPADVDRLMASTSDAVGLLFDAGHMTFGGGDPVAELAKHIGRVCHVHCKDVRPAVIRLARNRNWSFLDAVIAGAFTVPGDGSIDFPTIVDMLKRHGYRGWLVVEAEQDPAVAPSYAYAQKGYRTLRALVDAPLPPVGHKEAA

SEQ ID NO: 50152 - protein, 949 aa, Burkholderia mallei
IRIRGARTHNLKNVNLDLPRHKLIVITGLSGSGKSSLAFDTLYAEGQRRYVESLSAYARQFLQLMEKPDVDLIEGLSPAISIEQKATSHNPRSTVGTVTEIHDYLRLLYARVGTPYCPDHEIPLEAQSVSQMVDAALALPEETRLMILAPVVANRKGEHAELFDEMQAQGFVRFRVRSGGGAANEGAAKIYEVDSLPKLKKNDKHTIDVVVDRLKVRPDMKQRLAESFETALRLADGRAIALEMDTDREHLFSSKFACPICSYSLQELEPRLFSFNNPMGACPECDGLGQITFFDPKRVVAHPSLSLAAGAVKGWDRRNQFYFQMLQSLAAFYDFDIDTAFEDLPEKIRKILLYGSGKQTILFSYINERGRTTIREHVFEGIIPNLERRYRETDSAAVREELAKYQNNQPCPSCDGTRLRREARFVRVGQGDYARAIFEVSSWPLARRARLLRRLDARRREARDADKVIKEIVARLTFLNNVGLDYLSLERSAETLSGGEAQRIRLASQIGSGLTGVMYVLDEPSIGLHQRDNDRLIGTLKHLRDLGNSVIVVEHDEDMIRTADYVVDMGPGAGEHGGMIVAEGTPKQVQANGDSLTGQYLVGKRTIEYPDERISPDPQRMLRIVDAHGNNLKHVDLDLPVGLLTCITGVSGSGKSTLINDTLYNAVARHLYGSATEPAPHESIEGLEHFDKVINVDQSPIGRTPRSNPATYTGLFTPIRELFAGVPASKERGYDPGRFSFNVKGGRCESCQGDGVLKVEMHFLPDVYVPCDVCHGKRYNRETLEVQYKGRNISEVLDMTVEHAYEFFSAVPVVARKLKTLLDVGLGYIRLGQSATTLSGGEAQRVKLSLELSKRDTGRTLYILDEPTTGLHFHDIALLLEVIHRLRDQGNTVVIIEHNLDVIKTADWVIDLGPEGGAGGGQIIAQGTPEQVAKTKASFTGKYLAPLLK

SEQ ID NO: 50153 - protein, 143 aa, Burkholderia mallei
MAIYGIGTDLAQVSRIAAVLERTGGRFAEKVLGPDELRVFHARRARSEARGIAFLATRFSAKEAFSKAIGLGMHWPMTWRALQTLNRPSGEPYVVASGELAAWLDARGITARVTVSDERDYAVTFVVAEAPDDVAAARSGAAS

SEQ ID NO: 50154 - protein, 443 aa, Burkholderia mallei
MADCGGAAFRRGAAPHSGNMRQPEGGRARRANARAPFRFWQSGIMIITSLLDTDLYKFTMMQVVLHHFPAASVEYRFKCRTPGVDLVPYIDEIRAEVRSLCELRFTDSELDYLRRLRFVKSDFVDFLALFHLNEKYISITPSQKGGGEIDIEIKGPWLHTILFEIPVLAIVNEVYFRNTQRRPDYREGRGRLREKIKLLGAKPEFADCKIADYGTRRRFSKVWHEEVLRTLQDGLGPQFAGTSNVYYAMTHEITPLGTMAHEYLQACQALGPRLRDSQTYGLEMWAKEYRGDLGIALSDVYGMDAFLRDFDMYFCKLFDGARHDSGDPFDWGERLIKHYEENRCDPRTKVLVFSDALDIPKVMQLYARFRGRCKLAFGVGTNLTNDLGYQPLQIVIKMVRCNGQPVAKLSDSPGKSMCDDKAYLAYLRQVFGITQPPDDDAGK

SEQ ID NO: 50155 - protein, 553 aa, Burkholderia mallei
MTKYVFVTGGVVSSLGKGIAAASLAAILESRGLKVTLLKLDPYINVDPGTMSPFQHGEVFVTEDGAETDLDLGHYERFISTKMRKANNFTTGQIYESVIRKERRGDYLGKTVQVIPHITNEIQAFIERGAASATCGEPDVAIVEIGGTVGDIESLPFLEAARQMSLRLGRNSACFVHLTLVPFIATAGELKTKPTQHSVQKLREIGISPHVLLCRADRPIPDDESKKISLFSNVPEDAVISVWDVDSIYKIPQMLHDQGLDRLICEELRLDPQPADLRMWAALVEKLQNPKHEVTIGMVGKYVDLTESYKSLIEALRHASIHTSTKVNIEYIDSEELETNGTASLAHLDAVLVPGGFGRRGTEGKIAAVRYAREAKVPYLGICLGMQLAVIEFARDVVGLKQANSTEFDPNTPERVVALITEWYDREGKVEKRTEDSDLGGTMRLGSQRCPIKPGTLAEAIYGKDVNERHRHRYEVNNRFVPQLEAGGLVISARTPSEDLPEMMELPSTMHPWFVGVQFHPEFTSTPRDGHPLFKSFVQAALACQQTRAGAKA

SEQ ID NO: 50156 - protein, 280 aa, Burkholderia mallei
MGQILFIVWRESVEALLVVGILYAWLKNGDDEARRGLPYLWAGVGAGLLMAVGLGAALVGFTEVLSGDAQDYFQTAMVLIACVLIVQMVLWMKQHGRTLKRDMERSLQKSTQDANWWGVAVLVALAIAREGSETAIFLYGLGFGQSGHVDGSQMLAVLIGLGLAFLTFYVLQLGGKYFSWRHFFRVTEIMLLFLGAGLFQTGIDKLIDKEILPLGIAQLWDTSAILDDSSTFGSLVSTLTGYRAHPSLTNLVAYVAYWAIVYLLLKRAARRPAATAGRPA

SEQ ID NO: 50157 - protein, 549 aa, Burkholderia mallei
  MISC_FEATURE (219)..(219): X=any amino acid
  MISC_FEATURE (225)..(225): X=any amino acid
MSAAQIARGAGAPPSPSTPPHEPLLSIERLRVRFGGTLAVDDVSLAIGRGERVALVGESGSGKSVTALAILRLLRDADVSGAIRFAGETLADKSEREMRALRGADIAMIFQEPMTALNPLFTIGEQIGETIELHDGVSKRDARARAIALLARTGIDRPDERVDSYPHQLSGGQRQRAMIAMALACRPRLLLADEPTTALDVTIRAQIVELLLELQRDAXAERGMXVLLITHDLNLVRRFAERVAVMEKGRLVECGPVERIFDAPEHPYTQRLLHSRPQRTVSPVLPIAPVVLDARGVTVQFRQKLPGFAGWLRSGRFTAVSDASVSVRQGETLGIVGESGSGKSTLAMALLGLQRVAHGDIEFEGRSLASFRGRERVALRANMQVVFQDPFSSLSPRQTIGRIVSEGLELHRPRLTADARRDKVIAVLREVGLDRTVLHRYPHEFSGGQRQRIAIARALVLEPRVLVLDEPTSALDVSIQQQVLKLLSNLQRKYNLGYVFISHDLEVIGAMAHRVAVMQGGAIVETGDVERIFTEPVHPYTQKLLKAVR

SEQ ID NO: 50158 - protein, 419 aa, Burkholderia mallei
MPYQHIKVPEGGDKITVNKDFSLNVSDQPIIPYIEGDGTGFDITPVMIKVVDAAVEKAYGGKKKIHWMEIYAGEKATKVYGPDVWLPEETLQVLKEYVVSIKGPLTTPVGGGIRSLNVALRQELDLYVCLRPIQYFKGVPSPVREPEKTNMVIFRENSEDIYAGIEWAAESEQAKKVIKFLQEEMGVKKIRFPQTSGIGIKPVSKEGTERLVRKAIQYAIDNDRKSVTLVHKGNIMKFTEGAFRDAGYALAQKEFGAELIDGGPWMKFKNPKTGNEIVVKDSIADAFLQQILLRPAEYDVIATLNLNGDYISDALAAQVGGIGIAPGANLSDSVAMFEATHGTAPKYAGKDYVNPGSEILSAEMMLRHLGWTEAADVIISAMEKSIKQKRVTYDFARLMEGATQVSCSGFGQVLIENME

SEQ ID NO: 50159 - protein, 131 aa, Burkholderia mallei
MDKSMKILVVDDFPTMRRIVRNLLKELGYSNVDEAEDGLAGLARLRGGGYDFVISDWNMPNLDGLAMLKEIRADASLTHLPVLMVTAESKKENIIAAAQAGASGYVVKPFTAATLDEKLNKILEKMAKAGS

SEQ ID NO: 50160 - protein, 99 aa, Burkholderia mallei
MTNEILTVDVAIVGAGPAGLAAARAAARSGCTVAIVDDNPRAGGQVWRHGPHAAPGALARASFGVLRQPNVRHLAATRVVAAPRPGALLVEDEQRALVL

SEQ ID NO: 50161 - protein, 380 aa, Burkholderia mallei
MSVPITCIEDLRVLAKKRIPRMFYDYVDTGSYTESTYRANEADFRKIRLRQRVGVDISNRNLRTTMAGQDVAMPVALAPTGLVGMMRADGEILAARAARHFGVPFTLSTMSICSIEDIVAHVGGPFWFQLYMMRDRAFIERLIERASAAGCPALVLTMDLQIAGQRHKDVKNGLSAPPRITLPNLLDMMRKPGWCLGMARTRRRHFGNIVGHVKGVTDMWSLDSWTREQFDPTIGWRDAEWVRRRWNGKLIVKGVLDADDALRAADAGADAIVVSNHGGRQLDGAMSSIEALPAIVEAAGKRVEVWLDGGVRTGQDVLKAVALGARGTMIGRAFLYGVAALGEQGARRALELIARELDTTMALCGCTDIRSVNADVLARR

SEQ ID NO: 50162 - protein, 342 aa, Burkholderia mallei
MNIGIVNDLPLAVEALRRTIALRPEHRVLWVATDGAQALDFCVAQPPDLVLMDLVMPRIDGVSATRSIMERSPCAILIVTANVGANASYVYEAMGAGALDAVDTPTLEQGGSADPSQPLLAKIDQIGRLLATRMPLAAPAAAAPAPQGALPPLVAIGASAGGPTALTALLRRLPDDFPAALVIVQHVDQAFAIGMAQWLDGYSPLPVRIARQGSVPQAGEVLLAATNDHLHLTSRGVLAYTRRPEETPYRPSVDVFFHSVVDHWKGEAIGVLLTGMGRDGALGLKAMRTKGHYTIAQDEATSAVYGMPKAAAAIGAASAVLPLERIADQLISLVQRNRQRWR

SEQ ID NO: 50163 - protein, 328 aa, Burkholderia mallei
MSSPSLPSADKRASLAATARAVSREQIAKSRVLVVGDVMLDRYWFGNVNRISPEAPVPVVHVQRQEERLGGAANVARNAVTLGGQAGLLCVVGRDEPGERIVELLGESGVTPYLERDPSLPTTIKLRVLAQQQQLLRVDFEASPTHEVLLAGLARFDALLPSYDVVLMSDYAKGGLTHVTTMIAKARAAGKPVLVDPKGADWARYRGASLITPNRAELREVVGRWTSEDDLRARVTKLREALAFDALLLTRSEEGMTLFSHEGELHVSALAREVYDVSGAGDTVIATVATMLGAGLPLVEAVVLANRAAGIVIGKLGTATVEYDELFH

SEQ ID NO: 50164 - protein, 163 aa, Burkholderia mallei
MRHIISVLLENEPGALSRVVGLFSARGYNIETLTVAPTEDQSLSRLTIVSIGSDDVIEQITKHLNRLIEVVKVVDLTDGAHIERELMLIKVRAVGKEREEMKRMADIFRGRIIDVTEKTYTIELTGASDKLDAFIQALDAGSILETVRTGSSGIGRGERILKV

SEQ ID NO: 50165 - protein, 996 aa, Burkholderia mallei
MIRPGRGRPGCLFGGRDGAFARSRASEGPMSEYKETLNLLQTPFPMKGDLPRREPALVERWAAQRVYARMRAAAAGRPPFVLHDGPPYANGDIHIGHAVNKVLKDIVLKSRFAAGYDAQWIPGWDCHGMPIEHRIEQLHGRGLPPAAVQRLCREYAFEQTERQRRDFLRLGLLGDWPHAFRTMDFRTEANELRFLERIRARGLLYRGQKPVNWCVDCQSALAEAELEYARKTSVAIHAGLRVRDPVDFASRFRRRPVLDKPAMLVVWTTTPWTIPGNAAAGVRADAPYGLYDTPGALIVVAQPLADALFASLGVDHALCALARGRELVGLALGQPFFAGRDVPVVEAEFVTLDAGTGIVHLAPAHGAEDAELCRRLGIAGENVVDGAGRFAADLPEIGGLPLADGIARIVAKLRADGTLVREAAFEHAYPHCWRHKTPILFRSTPQWFIGMDIECEQGEADPGRAAVTEEAGATGEARKVGKAEEAEEAGPAKTLRASARDAIADVPFYPPSARQRMEAMIDGRPDWCVSRQRTWGVPLPYFVRRDDRSLHPRSARLVEAVAARVERDGIAAWSRLRPAELGVDENAYEKLSDTLDVWFDSGSIHATVYRDAARADTGGYPADLYLEGADQHRGWFGASLMTGCAADGRAPFRAILTHGFVVDGAGRKMSKSLGNTVSPQRIADTRGADILRLWIASTDYAAEMSISDEILERVVETYRRMRNTLRFLLQNVADFDPRDDAVPAGQLLDVDRYALARCREFVDACRSAYARYDFVAVTRLAHGYCAEELGGFYLDALKDRLYASVADGVERRAAQTALHSVLANLLISIAPILSFTAEEAWTVFAGDERDSVFLHTWDEHAPPPDDAALARWAHVRALRPHVTKALEEARGAALIGRSSEAELVVRAPRDVLDALAPLHGELAAVFIVAGVTLETADQIAVAVARTPLARCERCWRHEPSVAAHASGDALCARCRHALSRRARAERSEPRAAVGSR

SEQ ID NO: 50166 - protein, 395 aa, Burkholderia mallei
MANDYLFTSESVSEGHPDKVADQISDAILDAILAQDKYSRVAAETLCNTGLVVLAGEITTTANIDYIQIARDTIKRIGYDNTDYGIDYRGCAVLVAYDKQSPDIAQGVDRAHDNNLDQGAGDQGLMFGYACDETPELMPLPIHLSHRLVERQANLRRDGRLPWLRPDAKSQVTVRYVDGKPHSIDTVVLSTQHAPEIDLPALREAVIEEVIKPTLPADLIKGDIKFLVNPTGRFVIGGPQGDCGLTGRKIIVDTYGGAAPHGGGAFSGKDPSKVDRSAAYAGRYVAKNIVAAGLASRALIQVSYAIGVAEPTSVMVNTFGTGRVSDETITKLVREHFDLRPKGIIQMLDLLRPIYEKTAAYGHFGREEPEFSWEAADKALALAEAAGVEPAVQVA

SEQ ID NO: 50167 - protein, 206 aa, Burkholderia mallei
MARGKFITFEGIDGAGKTTHLQWFCDRLQERLGPTGRHVVVTREPGGTQLGETLREILLNQPMDLETEALLMFAGRREHLALVIEPALARGDWVVSDRFTDATFAYQGGGRGLPRDKLEALERWVQGGFQPDLTVLFDVQPQVASARRGAVRMPDKFESESDAFFARTRAEYLRRAHEAPHRFAIVDSSESIPQIRKQLEGVLAAL

SEQ ID NO: 50168 - protein, 160 aa, Burkholderia mallei
MKPAAQRSTKPTDAARDAAKTRAPQRLTYVIGNLDRLLRRHMTDALAPLGITLAQYTALSVLEARGPSSNAKVAERSFITPQSANEVTSAMAGRGWIMREADPNHGRVILLRLTPEGAAMLRECEAALRPLESRMLDGVPRADADAAQHWLEIFVRNLRG

SEQ ID NO: 50169 - protein, 259 aa, Burkholderia mallei
MRFVRSLLLFVYFIVYTVPYATACFIAFPFMRPNARYWMAVGWCKSTLFVARWLTGIRYRVEGYENLPDGPAVLLPKHQSAWETIALPALMPKPLCYVFKRELLYVPFFGWALGMLHMVHINRKDGKNAFDSVIRQGRKRMAEGAWVIMFPEGTRTPVGSQGKYKTGGARFAIGAGAPVVPIAHNAGRVWPRNSFTKYPGTVTVSIGQPIDTQGLTPDQLNERVENWIEAEMRRIDPHAYRHERDGARGAARASDAAHP

SEQ ID NO: 50170 - protein, 745 aa, Burkholderia mallei
MTADSASTAAAPSLDDVLAFVREHAGDARLSSGERLADHAAGTSTIMQRLNVDPPATQAAALFALAPYLSDPDKQIAEHFGDEVAHLVADVRKLLRLGTVSLRAVQSAPVDAGRDAQAERRAQIEALRKMLLAFAQDIRVVLIRLASRLQSLRYYAAAKIEPPPDVARETLEIYAPLANRLGIWQLKWELEDLAFRFEDPVTYKRIAKLLDEKRVEREAYVAGAIERLQHELAAAHIQAEVSGRPKHIYSIWRKMRGKELDFSELYDVRAFRVIVPDIKDCYTVLGIVHHLWQPVPKEFDDYISRPKPNGYKSLHTVVIGDDGRAFEVQIRTQEMHRFAEYGIAAHWRYKEAGARGYGGQFSASEKYDEKIAWLRQLLAWKDEIADGGGAEVSGQQAWAQLREATLDDDHIYVLTPQARVIALPQGATPVDFAYHLHSELGHRCRGARVDGAMVPLNTQLANGQTVEIVAVKEGGPSRDWLNPQLGYLHSSRARQKVRAWFNAVDQQENVAHGRALVEKTLQREGKTSVNLEHLAAKLGFKSPDELFSVVGKEEFSLRNVEQALSDAPAPEPEPEAPANFEKRASGANVAHGASAGVLVVGVDALLTQLARCCRPAPPDPISGFVTRGKGMSIHRSDCATFRRMAERAPERVLQTTWSADVLGGRGASVYPVDLMIEATDRQGLLRDISEVFAREKMNVIGVKTQSRRNAAFMQFTVEVSSASQVQRACTLLGEIQGVVRAARKA

SEQ ID NO: 50171 - protein, 145 aa, Burkholderia mallei
MKKSARRQSRELATQGLYQWLLSNAAPGEIDAQLRGALGYDKADKTLLDTILHGVIREHATLAEAISPSLDRPIDQLSPVERAVLLIATYELTHQIETPYRVIINEAVELAKTFGGSDGYKYVNGVLDKLAVKLRPAETQARRGA

SEQ ID NO: 50172 - protein, 217 aa, Burkholderia mallei
MPDRRPDSVDRTGAPRRRAGGIGCARPFAFDDIAMTDSIIDTAPHDARAKPLIDALIDEYATRYHAYRPDSRASAQAELARYPAELFAPPEGAFILLIRGGETIGSGAFKRYDAQTAELKRIWTRADLRRQGLARRVVRELELRAARQGYRRVYLTTGFRQPEAWALYLDTGYAALFDRDVDPQIYVHLPFGKDLIEPGRIGALDDLRAPVPAAPVE

SEQ ID NO: 50173 - protein, 256 aa, Burkholderia mallei
MRNSPVSPGPGYAPARGSERARRRGVARWLAYVGGVFAGAWLATQLYYAVQIAMWSVFDPGSSAFMRADAWRLSNAQPATTIRHRWVPYDQIARTLKRAVIASEDADFANNSGYEVDAILQAWEKNRARGRIVSGGSTITQQLARNLFLSGERSYIRKGQELIITWMLETLLDKERIFEIYLNSVEFGCGVYGAQAAAQYYYRIPASRLSAWQSARLAVMLPNPKYFDAHRGSPYLAQRAGVIARRMGAAELPASQ

SEQ ID NO: 50174 - protein, 253 aa, Burkholderia mallei
MTNLQTWPYPRVVAHRGGGALAPENTLAALDAGAHYGHKMVEFDAKLSADGVAFLLHDDTVERTSNGAGAARDMRYAALEALDAGAWYDARFSGERMPTLAQAAARCLALGLAANVEIKPCPERDAETGSVVAALAAELWRDAAVPPLLSSFSAAALDAAREAAPALPRGMLYEEIPAGWLEQTQRLGCVSLHAHHAQFNAALVRDLKASGLRLLAYTVNDPVRARELADWGVDLICTDRIDLIGADFADREG

SEQ ID NO: 50175 - protein, 402 aa, Burkholderia mallei
MLRRFWLFFAQAVTVLLALMFIVATLKPQWLQRQGQLGKQLAAPIVALREVAPGVGGAPAQSSYADAAQKAMPAVVNVFSSKDGSLPPDPRAKDPLFRYFFGDRNARRQQEEPAANLGSGVIVSSEGYILTNQHVVDGADQIEVALADGRTATAKVTGSDPETDLAVLKINMTNLPTITLGRSDQSRVGDVVLAIGNPFGVGQTVTMGIISALGRNHLGINTFENFIQTDAPINPGNSGGALVDVNGNLLGINTAIYSRSGGSLGIGFAIPVSTARNVLESIITTGTVTRGWIGVEPQDVTPEIAESFSLAQKSGAIVAGVLQGGPADKAGIKPGDILMSIDGEDITDTTKLLNVVAQIKPGTPAKVHVVCKGKELDVTVVIGKRPPPPKQALDDQNSDEEE

SEQ ID NO: 50176 - protein, 90 aa, Burkholderia mallei
MNDSVKTSLKRTLVGKVVSNKMDKTVTVLVEHRVKHPIYGKYVVRSKKYHAHDEANTYNEGDLVEIQETRPVSKTKAWAVSRLVEAARVI

SEQ ID NO: 50177 - protein, 984 aa, Burkholderia mallei
MTSSAFDSSRQGCGSGQCACRRAAQMRRADPFDDTDYGTPTRHADTDVTLDIDGRAVTVPAGTSVMRAAIEAGINVPKLCATDSLEPFGSCRLCLVEIEGRRGYPASCTTPVEAGMKVRTQSDRLQALRRNVMELYISDHPLDCLTCAANGDCELQDMAGAVGLREVRYGFDGKNHLSDAKDESNPYFSYDPSKCIVCNRCVRACEETQGTFALTIASRGFESRVAASAGEAFMDSECVSCGACVAACPTATLIEKSVARLGQPEHEIVTTCAYCGVGCALKAEMKGEQVVRMTPHKNGLANEGHACVKGRFAWGYATHKDRITKPMIREKITDAWREVSWDEAIGYAAARFRRIQDEHGRDSIGGITSSRCTNEETYLVQKLVRAAFGNNNVDTCARVCHSPTGYGLKTTLGESAGTQTFASVGSADVIVVIGANPTDGHPVFGSRLKRRVREGAQLIVVDPRRIDLVDGPHVKAVHHLQLRPGTNVALVNALAHVIVTEGLVDEAFVDERCEPQAFDVWRAFAARPENSPEATADITGVPADAVRAAARLYATGGRAAIFYGLGVTEHAQGSTMVMGIANLAMATGNLGIEGAGVNPLRGQNNVQGSCDMGSFPHELPGYRHIGDAAVRARFDEAWSTTLQPEPGLRIPNMFDAALDGSFKGLYCQGEDIVQSDPNTQHVAAALASLDCLVVQDIFLNETAKYAHVFLPGATFLEKDGTFTNAERRISRVRRAMRPLSGYADWEVTLMLSRALGYDMHYAHPSEIMDEIARLTPTFAGVSYALLDELGSVQWPCNDAAPQGTPTMHVDQFVRGKGKFVITQYIASPEKVTPRYPLILTTGRILSQYNVGAQTRRTENVRWHGEDRLEIHPHDANDRGIRTGDWVGVASRAGQTVLRALVTERMQPGVVYTTFHFPESGANVITTDSSDWATNCPEYKVTAVQVAPVAQPSEWQRAYTRFRAEQLALLEQRTAERAPAIATGK

SEQ ID NO: 50178 - protein, 240 aa, Burkholderia mallei
MRVGLFVTCVVDLMRPEIGFSALKLLKQAGCDVVVPPAQTCCGQPAYNSGERAIARDLAEKTLAEFESLDYVVVPSGSCGGMIRVHYGELFRDDPELMARYGRLRTKVYELTDFLVNVARVTLEPGAFKGPVTYHDSCSGLRELGVKAQPRALLAQRGVAVAEMKDCEHCCGFGGTFAVKYGDISTAIVDEKCANVRATGAGAVVLGDLGCMLNIEGRLRRTGDRDTRVLHVAQVLAGDV

SEQ ID NO: 50179 - protein, 239 aa, Burkholderia mallei
MELRWQDAYLQFSAAENEQQLFQQIAAYTKRLGFEYCCYGIRVPLPISKPVVAIFDTYPNGWMERYQEMNYLEVDPTVREGALSSNMIVWPEASASDATTLWSDARDHGLAVGVAQSSWASRGVFGLLTIARHTDRLTSAEINHLTLQANWLANMSHSLMSRFLVPKLAPESGVALTHREREVLCWTGEGKTACEIGQILSISERTVNFHVNNILDKLGATNKVQAVVKAIAMGLIDAP

SEQ ID NO: 50180 - protein, 390 aa, Burkholderia mallei
MPLPLLALAISAFAIGTTEFVIMGLLPDIARELAVTLPSAGLLVSGYALGVAAGAPLLAVLTSRMPRKAALQLLMAIFIAGNVLCALAQSYGMLMVARVVTSFAHGSFFGIGAVVAASLVSADKRASAIALMFTGLTLANVLGVPFGTFVGQTLGWRATFWIVAALGVASFAGVAALVPKRRDAAGAALSRELRVLRQPQVWLALAMTVLGFGGVFVVFTYIAPILEDVTGFAPRAVSLVLVLFGAGLTIGNTIGGRLADRALMPSLVAILVALIAVMAAFAKTSHMPAAAAVTVFVWGIAAFATVPPLQSRVVEKAAHAPNLASTLNIGAFNVGNAGGAWLGGVALSHGVPLDALPWVAAVVTLAALAVTALAARLDTRVSSGAATAAQ

SEQ ID NO: 50181 - protein, 305 aa, Burkholderia mallei
MANPLRQAAVPGGHARGVVNNARHREQRKLPRDDAQRLHARTVHQHFDRRHAPGQPVDEIVRLVRHVADAAAAPVPAEVVAPVVAGPRDVARRDVADLLAVVREIVARHVVVDRAAPQMHADLVVDDEVAADRVVFGVVDEQAALVAGDDVVLDQRILDRAQHDAVIGVAPYPVAAHDLVARLHDREAAAVVIDVVAVPDVVVRVHVMRAVAHVVDRVVLEARVMRHVDIDAVARVADRVAGDARARRVVELDAVAAPGRQQIALADDHVARDAHVGRALDPEAEQGGDKLPAASIPCHPGPGPP

SEQ ID NO: 50182 - protein, 331 aa, Burkholderia mallei
MGNRARVVRRHRRRDRARARVRRRRVPFRVARLEQPAVRRGPRGRGARAAVRARRARGGGARRAGAGGLRHARCGLRGVFRRAGDRGPPRGRVDGSAAMNASPLSTVPLFSVGPVGISAPVLATWAIMAVLVALALVARRRLSVDAPSRLQSVLELFVATVDAQIADTMQTPPARYRALIGTIFVLVFCANGASLVPGVEPPTAHLETDAALALVVLAATLYYGVRARGVRGYLATFAEPTWVMIPLNVVEQLTRTFSLIVRLFGNVMSGVFVIGIVLSLAGLFVPIPLMALDLLTGTVQAYIFMVLSMVFIGAAVSGDETSAPRRGQENT

SEQ ID NO: 50183 - protein, 410 aa, Burkholderia mallei
MSQYGPLRLHVPEPTGRPGCKTDFSYLRLSPAGKVRKPPIDVAPADTSDLAYGLVRVLDEHGRAVGPWAPDLDPDILRKGIRAMLKTRIFDARMQIAQRQKKISFYMQCLGEEAIAVAHTLALERGDMCFPTYRQQGILMVREYPLVDMMCQLMSNERDPLKGRQLPVMYSTRDAGFFSISGNLATQFIQAVGWAMASAIKGDTRIASAWIGDGATAEADFHTALTFAHVYRAPVILNVVNNQWAISTFQAIAGGEGATFAGRGVGCGIASLRVDGNDFLAVYAASRWAAERARRNLGPTLIEWVTYRAGPHSTSDDPTKYRPGDDWTNFPLGDPLERLKRHMIGIGVWSEQDHEDTKAALEAEVLAAQKEAERYGMLADEHVPNVASIFEDVYKEMPAHLRRQRQQLGV

SEQ ID NO: 50184 - protein, 453 aa, Burkholderia mallei
MGAVQGSMLLIYTVIAIAVLILMIARYKVYPFLVLIIVSLGLGLAVGMPMDKIVKSFEGGTGGTLGHIAIVVGLGTMLGKMMAESGGAERIATTLIDWFGEKNIHWAMMFVAIIVGLPVFFEVGFVLLIPIAFNVAKRTGKSLLVVGLPMVAGLSVVHGLIPPHPAALLAVQQYGADIGKTIAYGLIVGVPTAIVAGPLFALTISKFVKLPEHNPLASQFVETRAAGETRALPSFGITLFTILLPVVLMLVGSWADLVFAPKSLPNSLLRFAGNSDVALLIAVLVSFFTFGKLQGFNREQIQKFCGDCLAPIAGITLIVGAGGGFGGILRDSGISQQIVATATHAHLSPLLLGWFVAALIRLATGSATVAMTTACGIVAPIAAASGVTVRPELLVLATGSGSLIFSHVNDGGFWLIKEYFGMTVGQTFKTWTLLETIISVLGLTFTLALSAVL

SEQ ID NO: 50185 - protein, 850 aa, Burkholderia mallei
MIRHRVADVGFSRIRVTMLAAALTALSATARGQQALEFDPAFLELGGGQGGADLSVYATSNRVLPGVYPVSVFVNGEAIERRDITFVSESARDGREDAIPCLSARMFDEWGVDIAAFAKLAQAGEDACVDIADSVPHARTEFDSHQLRLNVTVPQAALKRRARGAVDPARWDQGIDAALLDYQLSAAQYAGGNFASARSRTTLYAGLRGAVNLGAWRLSHTSSFLRGLDGRNRFQIVNTFVQRDIAGWNSRLTAGEGTTPANIFDGFQFLGVQLNTDETMLPDSLQGYAPTVHGVAQTNAQVTIRQNGFVIYSTYVPPGPFTIDDLYPTSSSGNLEVTITEADGHVTTFTQPYSAVPMLLRDGSWRYNVTAGQYRDGISGSHPSFAMATLARGLAGEFSLYGGFIGAGMYQSVLVGIGKNLGSIGAVSLDVTHARSAVDLADSSTVSGHAFRVLYAKAVGSWGTDFRLLAYRYSTAGYRSFADAVQLRDGSEPAALGAKRQRLEGTVNQRLGRLGSMYATVAVQTYWGSAARSTVYQLGHSGNWGRASYGLYAAYSKGSGVPSSWNVSLSLSMPLEVFFGGARVRAPAGGSANVSYFVSRNNENHVNQQMTASGSSSEQRLNYSVGVAHSSESDVSGSVSASYLAPFGRYDASIGSGRGYTQAAFTAAGGMLWHGTGVLFTQPLGETVAVVDVPNVRGVRFEMHPGVSTDRAGEAVIPRLNPYRVNRIAVDQRRMPQDVEIRNPVSEVVPTRAAVVQTHFDSVVGLRALFTLTRADGSFPPQGATAENDEGQVLGVVGMDGETFVAGLPAAEGHFVVRWGAARQNRCRVNYALPGKAAIGAYLAVEATCD

SEQ ID NO: 50186 - protein, 231 aa, Burkholderia mallei
MSTPAYQEIKDFILARIHAGEWAEGDQVPSENELAREFKVARMTVNRALRELTAEQVLTRIQGAGTFVARPKYESTLVAIRSISDEVAARGHRHHARVLDLVTMKADEALADEMQVPPHTRLFRSVMLHYENDEPVQLEERWVNPAVAADYADQDFSAITPNQYLMRVAPLQRVEYRIEAAMPDRAMREALEMADTEPCLVLHRRTWSQGVVASVVNLWHPGSRYRFTGHF

SEQ ID NO: 50187 - protein, 273 aa, Burkholderia mallei
MLKTRVITAVVLLAVLLPVTLFAPLAAFGALIAFALVFAAWEWGRLLKLGGAGPLAYAAVAALALGASTRLGIGAAAARPLFAAAGVFWLLAGPYALWRKPALAERAWKPFLLVAGLVVFSACWHALVAARAQGVPFVLSLLVVVWLADIGAYFAGKAFGKHKLAPSVSPGKTWEGAAGGWLAVMIVAGAAVAAHAFEPTLYSTFVARYGAAGAFAALTVLVAFSVVGDLFESLLKRQAGVKDSSGLLPGHGGVLDRVDALLPVLPLAMLLLG

SEQ ID NO: 50188 - protein, 243 aa, Burkholderia mallei
MKQKMAITGAVALAFAAAATGAHAQSAGSFYVTTGWFHLAPQDSSDPLKIMNVGGSPVNHEVPNTGAGIDNADTIGLAAGYFLTDHIATELVAGIPPRFNLNGKGSLEQFGVLGHAYQWSPALLLKYYFNDAKAKFRPYVGIGASYIWFTGAKITNTAFERGALGGPTSVQTSNQWAPVLNAGFTYNFTDHWFGGLSVSYIPVSLTATLTTQRPTPIGNVTQTSQAKITLNPIVTYLNIGYRF

SEQ ID NO: 50189 - protein, 610 aa, Burkholderia mallei
  MISC_FEATURE (537)..(537): X=any amino acid
MCGIVGAVAQRNIVPVLIEGLRRLEYRGYDSCGVAVLDAGAPAPGTPKRARSVARVADLDAQVRESHLEGETGIAHTRWATHGAPVTHNAHPIFSSDALALVHNGIIENFEPLREALRAKGYAFVSQTDTEVIAHLIHSLYRGNLFAAVQQAVKQLHGAYAIAVTHKDEPHTVVGARQGSPLVVGFGERENFLASDALALAGSTDRFTFLEEGDVCELTLEGVTVVDRDGARAARDVRVVAAYGGAVELGPYRHFMQKEIFEQPRAIADTIAQTDAFDPPLFGERASSVFAGIDSLLILACGTSYYSGLTAKYWLESIAKIPTQVEIASEYRYRESVPNPRALVVVISQSGETADTLAALKHAQALGHAHTLAICNVATSAMVRQTELQFLTHAGTEIGVASTKAFTTQLVALFVLAATLGKLRGHVDAAREADYLKQLRHLPAALNSVLALEPQIIAWSDEFARKENALFLGRGLHYPISLEGALKLKEISYIHAEAYPAGELKHGPLALVTEAMPVVTVAPNDTLLEKLKSNMQXVRARGGELYVFADADTHIVNDEGLHVIRMPEHYGPLSPILHVVPLQLLAYHTACARGTDVDKPRNLAKSVTVE

SEQ ID NO: 50190 - protein, 260 aa, Burkholderia mallei
MTYTSSTVRVPDVAAVPRHIAIIMDGNGRWATERRLPRVAGHTRGVDAVRSVVEGCARAGVEYLTLFAFSSENWRRPNDEVSFLMRLFITALEREVGKLHANGIRLRVVGDLTKFEPRIQALIRRGETKTARNTRLTLTIAANYGGHWDILQATRKLVEEAAREGRAPEIDEDAFARHLAMAYAPEPDLFIRTGGEQRISNFLLWQLAYTEFYFTDTFWPDFDAGALAEALASYTHRERRFGRTSAQLEPQAQDADSLSC

SEQ ID NO: 50191 - protein, 533 aa, Burkholderia mallei
MNDFWQHCSALLERELTPQQYVTWIKPLAPVAFDAAANTLSIAAPNRFKLDWVKSQFSGRISDLARDFWNAPIEVQFVLDPKAGQRSPAGATPLAPRAPLPSANPAPVAPGPACAPAVDAHAPAPAGMNAATAAAVAAAQAAQAAQANAAALNADEAADLDLPSLTAHEAAAGRRTWRPGAANANSEAADSMYERSKLNPVLTFDNFVTGKANQLARAAAIQVADNPGISYNPLFLYGGVGLGKTHLIHAIGNQLLLDKPGARIRYIHAEQYVSDVVKAYQRKAFDDFKRYYHSLDLLLIDDIQFFSGKSRTQEEFFYAFEALVANKAQVIITSDTYPKEISGIDDRLISRFDSGLTVAIEPPELEMRVAILMRKAQSEGVSLSEDVAFFVAKHLRSNVRELEGALRKILAYSKFHGREITIELTKEALKDLLTVQNRQISVENIQKTVADFYNIKVADMYSKKRPANIARPRQIAMYLAKELTQKSLPEIGELFGGRDHTTVLHAVRKIADERGKDAQLNHELHVLEQTLKG

SEQ ID NO: 50192 - protein, 379 aa, Burkholderia mallei
MHIGVPAETRANEARVAATPETVRKYAAAGHRVTVERGAGAGASFPDDAYAAAGAELADAAAAFGADIVLKVQAPTDAECGQLKRGSVLIGMLEPFNAEQAARLAAAGVTGFALEAAPRTTRAQSLDVLSSQANIAGYKAVLVAAALYPRFFPMLMTAAGTVKAARVLVLGAGVAGLQAIATAKRLGAVIEASDVRPAVKEQIESLGAKFLDVPYETQDERDAAQGVGGYARPMPASWLGRQAALVHERAKQADIVITTALIPGRPAPTLISVETVQSMKPGSVLVDLAAGRGPEFDGRKSGNCPLTVADQVIVHHGVTIAGHTNLAAMVPADASSLYARNLFDFLKLIVTKEGALNIDLSDDIVAATLLCRDGEVVRK

SEQ ID NO: 50193 - protein, 373 aa, Burkholderia mallei
MSLAARRHSARPISAERGSTCASRALAALRRRRARWTLATLIAALAAASIAALCIGAYRLSPAQLLGALTATDAQLAGDAALRQARAVLVDIRAPRVVLALFVGAGFGAAGAAMQALFRNPLADPGLIGVSSGAALGASALIVLGPLFAARLALGLLPVAAFAGALAVAALVYRLAVARGRLALPLLLLAGIAINALAGAGIGLLTYLADDAQLRSLTFWSLGSVGGAQWRTIAAVAPFALAGCVLLARERHALNALQLGEAEAMHLGVPVPRVKRRVLVGTAMCVGALVSCTGAIGFIGLVAPHCVRLAAGADQRIVIPGAALFGALLAVAADLAARTLAAPAEIPLGILTALIGAPFFLALLWKRRGALGG

SEQ ID NO: 50194 - protein, 338 aa, Burkholderia mallei
MKVFYDKDADLSLIKGKQVTIIGYGSQGHAHALNLKDSGVNVTVGLRRGGASWSKAENAGLAVKEVAEAVKGADVVMMLLPDEQIAAVYAQEVHANIKEGAALAFAHGFNVHYGQVIPRADLDVIMVAPKAPGHTVRGTYAQGGGVPHLIAVAQDKSGAARDIALSYAAANGGGRAGIIETNFREETETDLFGEQAVLCGGTVELIKAGFETLVEAGYAPEMAYFECLHELKLIVDLIYEGGIANMNYSISNNAEYGEYVTGPRVVTEETKKAMKQCLTDIQTGEYAKSFILENKAGAPTLQSRRRLTAEHQIEQVGSKLRAMMPWIAKNKLVDQSKN

SEQ ID NO: 50195 - protein, 496 aa, Burkholderia mallei
MVLVLGLGESGLAIARWCARHGCRLRVADTCETPPNLAALTAAGVDFEFVGGAFSPALVDGGIELVALSPGLSPLAEDLAPLVAAARERGIPVWGELEFFAQALAALGANGYAPKVIAITGTNGKTTTTSLAGLLCERAGKKVAVAGNISPAMLDKLTEAIDAAALPDVWVLELSSFQLDTAHTFAPDAATILNITQDHLDWHGGFAAYAAAKGRVFGPRTVRVLNRDDAEVMRFAPPAAAADAPRAVTFGLNEPAADGDYGLLRENGIAWLVEAIDRDGADAPAAPSRRRKQEAANPPDIALKRLMPADALRIRGLHNAANALAAYALARAIGLPAAPLLHGLREYRGEPHRVEVIATLDGVDYVDDSKGTNVGATVAALDGLAQRAVLIAGGDGKGQDFEPLAAPVARWCRAVMLIGRDAPALREALADTGVPLADHATLEAAVRAASALAQPGDAVLLSPACASLDMFRNYAHRADVFRSAVEDIALEKGTTL

SEQ ID NO: 50196 - protein, 70 aa, Burkholderia mallei
MTIIRVKENEPFEVAMRRFKRTIEKNGLLTELRAREFYEKPTAERKRKKAAAVKRHYKRIRSQMLPKKLY

SEQ ID NO: 50197 - protein, 510 aa, Burkholderia mallei
VASSMPITFVFAIALSFAADAIAIPRAAVRRPFLAGALHTASVLFVACVILALTRRPHFAAFLALALVALAGAVQQCEIYIPTRAFCFYRPESVQSLFSHPRLYLPFLSATTVVAMVLGSVALAAGFFLDPAVSAQTAWQAAMAALICFATGGLCAARLPLTLDPLDDQRRHGFFAVFVAYLLNGMRPATFRSVAGLTCAGPFASEDELPGHPDVIVIQSESFFDPRPLSAAIDSSILGHFDRVCRESVEHGQLAVPAWGANTMRSEFAFLTGLPSSHLGYARFYPYAFVRRISASLAGWFRRAGYRTTAIHPYYADFFGRDRVFPLLQFDRFFDIRAFGDAPRVGPYISDAAVLDQIVAVLDEKRTQPAFLFAMTMENHGPLHLEPVEAGEAARYHTLGDDATWRDLTAYLRHVANADAMIGRLVAYLRQCRRDTILCFYGDHVPALSHVFERFGNIPDQSNYFIWRNFGEHAPRKQDRAVEELGTALLRAMKTTGRQAVSTGASEITT

SEQ ID NO: 50198 - protein, 367 aa, Burkholderia mallei
MEAERLNAIESSLADLRRRAGELRGYLDYDVKSERLAEVNKQLEDPNVWNDSKNAQALGREKKSLESVVTTLTALDNDLRDAQDLFELAHEEGDEETLVATESDAAKLEARVADIEFRRMFSNPADPNNCFIDIQAGAGGTEACDWASMLLRQYLRYCERKGFKAEVLEESDGDVAGIKNATIKVSGEYAYGYLRTETGIHRLVRKSPFDSSGGRHTSFSSVFVYPEIDDSIEVEINPADLRIDTYRASGAGGQHINKTDSAVRITHMPTGIVVQCQNDRSQHRNRAEAMAMLKSRLFEAELRKRQAEQDKLESSKTDVGWGHQIRSYVLDQSRVKDLRTNVEMSNTKAVLDGDLDDFISASLKQGV

SEQ ID NO: 50199 - protein, 214 aa, Burkholderia mallei
LEIVAMPRNGVDTLAALNAARPDLAFLDIRMPGIDGLKLASLVPDVHVVFVTAYDEYAIEAFERSAIDYLLKPVTDERLLRCIAKLQRGGFAPAGRAAAGGRARPQEPTPIRWLTVGLKDTTRLVSVDDVLYFQALDKYTEVVTAGERHVIRTPLKELLQRLDPDRFARVHRGVIVAYAAIDRIERDLLARLRIHLRGHRDVLPVSRAYAGLFK

SEQ ID NO: 50200 - protein, 312 aa, Burkholderia mallei
MTQRLLAAAWRRPVWLLWVPPAFWAGNVVLGRAFSTSFPPVSLAVGRWLVALVALAPFVWRDVLRERRLLLRHWKLIWACGALGIAGYNALAYVALRTVPAASVAFLNSTLPLMVPLAAAMLGVERITSRAIVGIVVSFGGVAWIVARGHWEDLVALRFDHGELIVILATANYAIYSVLLRRKPAAIGPLAFLAATMAAGLAVLAPFWALELAGGARIPFDPKAIGAVLYIGVFASLIAFILWGHCVQVLGATVTGVSFHLVALFTAVLAALTLGEPVRSYHLVGIALILFGFFVATRAAPGVRSAPNARSL

SEQ ID NO: 50201 - protein, 400 aa, Burkholderia mallei
MFPDRIFSGMRPTGSLHLGHYHGVLKNWVKLQSEYPCFFCVVDWHALTTHYETPEVIEKNVWDVLIDWLASGIDPAQATLFIQSKVPEHAELALLLGMSTPLGWLERVPTYKEQIEKLKDKDLSTYGFLGYPVLMAADILLYRGSLVPVGEDQVPHVEMTREIARRFNYLYGREPGFEEKALEAAKKLGGKRAKLYHELRNAYQQEGDDEALEQARAMLQESQSLSMSDRERLFGYLEGARKIILVEPQALLTEASRMPGLDGQKMSKSYGNTIGLREDAETITKKVRTMPTDPARVRRSDPGDPDKCPVWQLHQVYTDETTHEWVQQGCRSAGIGCLDCKQPVVEGILREQQPMLERAQKYMDDPSLLRAIVADGCDKARKHATETMRDVREAMGLSYS

SEQ ID NO: 50202 - protein, 254 aa, Burkholderia mallei
MRTARVVFNGALHAAEPAGDALVRLDTGRVLAETEVSWLPPVVPRTAFALGLNYADHAKELAFSAPAEPLIFLKGPNTFIGHRAQTVRPADATHMHYECELAVVIGREARRVTRARALDHVLGYTIGNDYAIRDYLENFYRPNLRVKNRDTCTPLGPWLVSRDEVGDASDLALRTTVNGVETQRGNTRDMIFDVASLIEYISGFMTLSPGDLILTGTPEGLADTQPGDEVVTEIEGIGRLVNTIVGEADYYRAG

SEQ ID NO: 50203 - protein, 367 aa, Burkholderia mallei
MSAALPDAFWPPADELTEAAERIRATLGAWPRPAVRTRICLAPPEQPRAADLWVAIAGDAGAHAAHIARLNAAGARAIVIDDASATLHTGAARHALASRAPLADDWIAALAAFLDCGFAASDALVLALAWRDGDEARGGDPWPVDPARFPRVLGLPAAPEPAFAPCPQRLGLYPVLPSAEWVERVLDCGVRTVQLRVKDASPDALRAEIERAVAAGRRHPDARVFINDHWRLALDAGAYGVHLGQEDLETADLGAIARAGARLGLSSHGYYEMLVALQFKPSYLALGPVFATATKAVAAPPQGLARLARYVRFAGPQAPLVAIGGIAPDTLGAVLAAGVGSAAVVSAITAAADYREAIVALQQNFGR

SEQ ID NO: 50204 - protein, 179 aa, Burkholderia mallei
MARFQEFYKEKVVPGLIEKFGYKSVMEVPRITKITLNMGLGEAVADKKIIENAVGDLTKIAGQKPVVTKARKAIAGFKIRQGYPIGAMVTLRGRAMYEFLDRFVTVALPRVRDFRGVSGRAFDGRGNYNIGVKEQIIFPEIDYDKIDALRGLNISIMTTAKTDDEAKALLASFKFPFRN

SEQ ID NO: 50205 - protein, 769 aa, Burkholderia mallei
MSTSSSSSSSKEKLREAALDYHEFPTPGKVAIAPTKQMINQRDLALAYSPGVAFACEEIVENPLNAARFTARSNLVGVVTNGTAVLGLGNIGPLASKPVMEGKAVLFKKFAGIDVFDIELNESDPHKLVGVIAALEPTFGGINLEDIKAPDCFIVERECRKRMKIPVFHDDQHGTAIVVAAAVTNGLKVVGKSIKEVKLVASGAGAAALACLDLLVDLGLPLEHITVTDLAGVVYKGRAELMDPDKERFARETDARTLSEVIDGADIFLGLSAAGVLKADMVKKMAERPLILALANPTPEILPEVALEARPDAVLATGRTDYPNQVNNVLCFPFIFRGALDVGATTITREMEIAAVNAIAELAQQEQSDIVATAYGIQDLSFGPEYLIPKPFDPRLIVKIAPAVAQAAMDGGVATRPIEDMEAYKVHLQQFVYHSGTTMKPVFQIARGAPAEKKRVVFAEGEEERVLRAVQIVVDEKLAKPILIGRPAVIEHRIQRYGLRLTPGVDFTIVNTEHDERYRDFWQTYFKMMARKGISEQLARVEMRRRTTLIGSMLVKKGEADGMICGTISTTHRHLHFIDQVIGKRAGCSVYGAMNALVLPGRQIFLVDTHVNVDPTPAQLAEITIMAAEEVRRFGIEPKVALLSHSNFGTSNAPSAQKMRDTLAILRERAPDLHVDGEMHGDVALDAALRKEILPESTLEGEANLLVLPNIDAANIAYNLLKTAAGNNIAIGPILLGAAQPVHVLTESATVRRIVNMTALLVADVNAVR

SEQ ID NO: 50206 - protein, 480 aa, Burkholderia mallei
MPGHAGTVFLEGDMEGSQTGLGTGLKQRHVTMLSIAGVIGAGLFVGSGHAIVEAGPAALIAYAIAGLLVVLVMRMLGEMAVAQPDSGSFSTYADRAIGHWAGFTIGWLYWWFWVLVIPIEATAAATILNAWFPGVATWIFALGITSVLTVTNLFSVKNYGEFEFWFALIKVVAIVVFLAIGGAAIVGLLPGSNVSGAARLVNAGGFMPNGVGAVLAAMLTTMFSFLGTEIVTIAAAESEHPERQIVRATNSVIWRISLFYLGSIFVVAALVPWNDALLPAHGSYQRAMELIGVPHAKGIIDVIVLVSVASCLNSALYTASRMIFSLSTRGDAPAFLRRTDASGTPRAAVLASTAFGFLTVIANYVMPEQVFGFLLATSGAIALLVYLVIAISQLRMRSTLDATGERLPLRMWCFPWLTWAVIVFICGVLVVMLLREDHRMEVGATAVLALAVVVASRMNRRARGGDEPTPAASRVSANLR

SEQ ID NO: 50207 - protein, 377 aa, Burkholderia mallei
MISPARAKSRTRRARRLDGRVAVKCPVVPAPRRFSAPPMSASPALSPRRVSVAPMMDWTDRHCRSFHRTISRHAWLYTEMVTTGALIHGDVARHLAFTPDEAPVALQLGGSEPADLAHSAKLGERWGYDEINLNCGCPSERVQRGAFGACLMNEPQLVADCVKAMRDAVSIPVTVKHRIGVDAVEDYAFVRDFVGTVAAAGCDVFVVHARNAILKGLSPKENREIPPLKYDYAYRLKRDFPQIEIVINGGVTTLDEVEQHLRHVDGVMLGREAYHNPYVLAGIDARFYGASAPAPTREEVEAKLVEYCAAELARGTYLGAIVRHALGLYRGVAGARGWRRVLSDNKRLGRGDLSIFDEARTHLPRPEEFFEKKALQS

SEQ ID NO: 50208 - protein, 376 aa, Burkholderia mallei
MRTDRHFTGAPTFAQGRELDRAPAQPRMPMSRPDSAVSLLPDYSLRAHNTFGFDARARVAARIGSPGQFASLARDPRVAGLDRLVLGGGSNVVFTRDFDGLVLLDEIRGRALVREDDGAWYVEAGGGENWHAFVEWTLAEGMPGLENLALIPGTVGAAPIQNIGAYGLEMKEHFASLRAVDLATGELVEFDAARCAFGYRDSFFKRDGRGRFAIVAVTFRLPKAWTPRIGYADVARELAARGIDARAARARDVFDAVVAIRRAKLPDPLALGNAGSFFKNPVIDAQAFAALRAREPDIVSYPQPDGRVKLAAGWLIDRCGWKGRALGAAAVHERQALVLVNLGGASGADVLALAHAIRRDVLGRFGVELEMEPVCL

SEQ ID NO: 50209 - protein, 554 aa, Burkholderia mallei
MTDTHDIDSSESAHAVATARADDAPEQSAADAGGEDRPRRGLRRGPRSLIARRRAAAKSKHSDAPESADAAPAADAGAGADVAKAPARAPRGKDAAAKPPRKTAGKREGAARQGAQPKRGAQQAAAAVAPSAEAGQDDVFAYVISPAFDADNNAPGGGVRAPMLRRGRQTQPKRVLSPDDDAPKLHKVLAEAGMGSRREMEELIIAGRVSVNGEPAHIGQRIMPTDQVRINGKPVKRKLPSKPPRVLLYHKPTGEIVSHADPEGRPSVFDRLPPMKTAKWLAVGRLDFNTEGLLMLTTSGDLANRFMHPRYSVEREYAVRVVGELSEASRQKLLHGVELDDGPANFLRIRDGGGEGTNHWYHVALAEGRNREVRRMFEAVGLMVSRLIRTRHGPIPLPRGLKRGRWEELDEAQVRRLMSTVGLKAPTEDKGGKRGGPVERRQPDPMQTSMGFINREPVLTTHGQLDQPRRGRRGPAGGGFGAGLGGGYAGLPGYGGASRQGGRDVDGNRASYGGAGANKRGAGKGGRNPNGNRAEGGARGGPRTPQQRNRSRSR

SEQ ID NO: 50210 - protein, 931 aa, Burkholderia mallei
MTTGFLQKIFGSRNQRLVKQYQKTVAAINALETQIETLTDDQLRGKTGEFRQRIAAGESLDKLLPEAFAVCREASRRVLKMRHFDVQMIGGMVLHYGKIAEMRTGEGKTLVATLAAYLNALAGRGVHVVTVNDYLAQRDAEWMGRLYNFLGLSVGINLSGMEHDQKQAAYAADITYGTNNEFGFDYLRDNMVYETDSRVQRPLNFAVVDEVDSILIDEARTPLIISGQAEDHTELYVRMNALPPLLERQIGEEKADGTGVEKPGDYTLDEKGRQVFLTESGHEKAERMLAEWGLIGDGESLYAPQNITLMHHVYAALRAHTLFHRDQHYVVQNDEVIIVDEFTGRLMPGRRWSDGLHQAVEAKEHVKIQSENQTLASITFQNYFRMYAKLSGMTGTADTEAYEFNEIYGLETVVIPTNRPPKRIDKQDQIYKTAKERYDAVIRDIRECHERGQPVLVGTTSIENSELLSHLLKQAGLPHEVLNAKQHAREAAIVAEAGRPKRITIATNMAGRGTDIVLGGNVEKQAAFIEADESIPADEKARRIQQLHDEWETLHEQVKTAGGLHIIGTERHESRRIDNQLRGRAGRQGDPGSSRFYLSLEDPLLRIFAGDRVRAIMDRLKMPEGEAIEAGIVTRSIESAQRKVEARNFDIRKQLLEYDDVSNDQRKVIYQQRNELLEAHDIAETIGAMRHGVISEVVRQFVPAGSIEEQWDLPELEETLRNDWQLDLAIQEMVNESSSINADEILDAVTTAADEHYEAKVALVGRESFSAFERSIMLQTLDRLWREHLAALDHLRQGIHLRGYAQKNPKQEYKREAFELFAAMLDAVKQEVTRIVMNVQIQSPEQLEEAAEQIEEQGGQLGNVEFQHADFAAAAAAATAGGAVVADATAEMVGHAMSHSGPAGEVPRVGRNDPCPCGSGKKYKHCHGKLN

SEQ ID NO: 50211 - protein, 475 aa, Burkholderia mallei
MHSHPEVADTLIVGAQLYDGTGAPSVERDVAIRGDRIVAIGNLTNWLAEQVVEANGRALAPGFVDVHTHDDTHVIDAPQMLPKISQGVTTVIVGNCGISASPVALKGDPPDPMNLLGAAKPAVNVAALVGHTALRSNQMDRLDRAATGAEIAAMRAQLEEALAHGALGLSSGLAYGSAFAAPTEEVMALAEPLANAGAVYTTHMRTEFDAILEAMDEAYRVGRHARVPVVISHLKCAGPSNWGRSAEVLASLERARRIQPVGCDCYPYSRSSSTLDIKQATGDIDITITWSDPHPEMAGKLLRTIAAEWRVSEQDAARRLQPAGAVYHNMSEDDVRRILSHPATMVGSDGLPNDPLPHPRLWGAFPRVLGYYARDERLISLEDAVRKMTALSARRFGLARRGEVRVGYHADLVLFDAARVRDAATFEQPQQPAHGIEAVWVNGALSYRDGAPTGVRAGRFVARGERAPATPGDAF

SEQ ID NO: 50212 - protein, 146 aa, Burkholderia mallei
MVVFLVLAWFTMKFVWPPLINALDERSKKIADGLAAAEKGKAELEAAHKRVDQELAQARNDGQQRIADAEKRALAVADEIKTNAQAEAARIIAQAKAEAEQQIVKARETLRGEVAALAVKGAEQILKREVDQTAHAELLNQLKAEL

SEQ ID NO: 50213 - protein, 460 aa, Burkholderia mallei
MNAPKDPQIESLKVPPHSIEAEQSVLGGLLLDNGAWDRIADFLSQSDFYRYDHRIIFEHIGRLIAATRPADVVTVYEALTTSGKAEDVGGLAYLNALAQNTPSAANIRRYAEIVRDRAVLRRLVSVADEISADAFNPQGKEVRQLLDEAESKVFSIAEDGARGTQGFLEIGPLLTQVVERIDTLYHTANPSDVTGTPTGFVDLDRMTSGMHGGELIIVAGRPSMGKTAFSMNIGEYVAVEYGLPVAVFSMEMPGTQLVMRMLGSVGRLDQHRMRTGRLTDEDWPKLTHAVQKMSEAQLFIDETGGLNPMELRSRARRLARQCGKLGLIIVDYLQLMTGSSQGENRATEISEISRSLKSLAKELDVPVIALSQLNRGLEQRPNKRPVMSDLRESGAIEQDADVILFIYRDEVYNPDSPDKGTAEIIIGKQRNGPIGPVRLTFLGQYTKFDNFAGAQNFYGE

SEQ ID NO: 50214 - protein, 407 aa, Burkholderia mallei
GERAGGLRDTAGLIEISAAAPASTPIPAAPRRFAQPFAQPARAFAVASACAPSWPRWDRFKRDFVSADGRVIDVGSADERTVSEGQAYGLFFALVANDRAAFDALLRWTEDNLAQGDLSARLPAWLWGRAADGAWRVLDANAASDADLWLAYALLEAGRLWRERSYTARGALLAKRVLDEETATLPGLGLVLLPGPMGFRPARDAWRLNPSYSPPQAIRGIGAHVPDDARWARLAAGVGRVLTDSAPRGFAPDWALYRAGRGFEPDAETHAVSAYNAIRVYLWAGMLDAGDPLARPLVAHFAPFAEHVAAHGAPPEAVDATTGAAAPRDGNAGFSAAAVPFLEARGERASADAQLARVARLERETASGYYANVLTLFGLGWRDGRYRFAADGTLRVRWSEPCSTPAR

SEQ ID NO: 50215 - protein, 282 aa, Burkholderia mallei
DGDELQGEHRYRLGAVLGEGGAGRVHEAIRLDTSARVAIKLLREDAPRGARERARLRARFRRETALCARLSHPHIVALLDSGETPDGLLFAVFEHVAGRTLRALLAADGALAAETTGALMAQVLDGLAHAHANGVVHRDLKPQNVMVTTRDGEPCAKILDFGIGALLPDAHAADELTLTATTEVLGSPQYCAPEQLRGEPPTAKSDFYAWGLIVIECLTGHPVMQGASLADVLYQHLSPVRRRAAARDRRASARRRLRDALNKDPRQRAESAQALANRFRAI

SEQ ID NO: 50216 - protein, 355 aa, Burkholderia mallei
MLLLNPGPVTLTERVRQSLLQPDLCHRESEFFDLQDEARARLVAAYALDPAEWSAVLMTGSGTAAVESMIAALVPENGKLLVIENGVYGERITQIATQYRIAHDVLKHDWMQAPDLARVAEKLDADRAITHVAVIHHETTTGRLNDLDALAAVCRARGVRMLVDGVSSFGAEAVDFAGGDIDALAATANKCLHGVPGAAFVIVRRRALASAASRTYYLDLGRLAKLQDARNTPFTPSVHAYYALVEALREFDEAGGWRARHARYAALAEQVRAGLAARGMPLVLPDGESSVVLRAYRLPAGVAYEQLHDGLKARGFVIYAGQGGLSSALFRVSTMGAIEPADVERLLDGFTALAR

SEQ ID NO: 50217 - protein, 230 aa, Burkholderia mallei
  MISC_FEATURE (18)..(18): X=any amino acid
  MISC_FEATURE (37)..(37): X=any amino acid
GFGLSPRQRAGGPAPLLXKSGNFPNLSPVSLRPPPCXNPSPPKMPAAAFVRITPFRKPPICSSGLRPGPIEMRDRGACRSPERMVGLSFEHLYNKPLVAVVRAGHPLAASASPAAQLARYPVVLPPYGTIIRQAAEQLLSACGAPPLESFVEVLSVSVARALALENDAVWFVPATRTVFDLAAGTLTRLALPVDGADEPVGLILRTDAQPSPVARALIDAVRAIARRRLA

SEQ ID NO: 50218 - protein, 413 aa, Burkholderia mallei
MPRDGAPKRRYRGGLASARPPNQGLETSIMKKHVISAAALLAFAAPVFAQSSVTLYGVIDEGFNYTSNVNVNGVGKSNYQLASGFVQGSRWGLRGSEDLGGGLKAIFTLENGFDVNNGRLGQGGRMFGRQAFVGLSHAQYGSLTLGRQYDSLVDYLAPLTANGNWGGTLFSHPFDNDNTDNSFRVNNTVKYASPDWNGLQVGGTYSFSNATGFSNNRQYSIGAAYTLGGLQLAAAYLQANNPGKTAGGAIADNDANFTADRLRIFGGGVNYTFGPATVGFVYTKTDVKNPVSTVYLPTATFAGLGLSATKFQNFEINGKYQLTPALFIGAQYVYTDGKFDAAAGSVKPKYHTVGLMADYNLSKRTDVYLQGAYQKVAGDKTGTIADGGYVVGTDGPSASANQFAVRAAIRHKF

SEQ ID NO: 50219 - protein, 382 aa, Burkholderia mallei
MKITRLETFVVPPRWLFLKIETDAGIVGWGEPIVEGRAHTVEAAVHELADYLVSQDPLRIEDHWQVMYRAGFYRGGPITMSAIAGIDQALWDIKGKHHGAPVHALLGGPVRERIKVYSWIGGDRPSDVANNARAVVERGFQAVKMNGSEELQIVDTFDKVDKVIANVAAVRDAVGPYVGIGVDFHGRVHKPMAKVLARELDPYKLMFIEEPVLSENAEALRDIANQTSTPIALGERLYSRWDFKRILEGGYVDIVQPDASHAGGITECRKIATLAESYDVALALHCPLGPIALAACLQLDAVSYNAFIQEQSLGIHYNQGSDLLDYLRNPDVFRYADGFVAIPQGPGLGIDVDEDKVREMAKTGHRWRNPVWRHADGSVAEW

SEQ ID NO: 50220 - protein, 195 aa, Burkholderia mallei
MNSVCVYCGSANGAKPVYADAARAFGRALANAGLTLVYGGGRVGLMGVIADEVIASGGRAIGVITELLYDKEVGHTGLTELHVVPDMHHRKKMMAELADAFVAMPGGAGTLEEFFEVYTWAQLGYHRKPVALYNVDAFYQPLITLLEHTVDEGFMQRTYFDALCIDAAPDALIDQLVRYRPPARDKWTFVSTQEA

SEQ ID NO: 50221 - protein, 487 aa, Burkholderia mallei
MRDDARRSCAARARIGAGANRCDRSLTSARRRRYNVAIRSTFQSTMSHPTPQTPRVPMLSTADALTALLAAARPLAEIETVPTLEALNRVLAADVASGLDVPPMNTSAMDGYAVRIADLTRGERRLPVSQRIAAGHPAAPLAPGTAARIFTGASVPAGADAVVMQEQTEAAGDQVDILHTPTVGEWITAQGADIRRGSVILPAGTRMTPQAMGLAASVGCVSLAVTRRVKVAVFFTGDELTMPGEPLKPGAIYNSNRFTLRGLLERLGCDVTDYGIVPDRLDATRAALREAAREHDVIVTSGGVSVGDEDHVKPAVEAEGRLALWQIAMKPGKPLAFGAIRRDGAASGAAAVEANAHGASDASDTRAMHATSGGEAYFIGLPGNPVSSFVTFLLFVRPFLLRVAGAAQVAPRAVSLRADFTQNKADRRNEFLRARVNAAGGLDLFPNQSSAVLTSTVWGDGLIDNPPNHAISAGETVRFIPFSELLG

SEQ ID NO: 50222 - protein, 476 aa, Burkholderia mallei
MPGLQRACHRTRRRASRTKPRRPAHPAPRPASSASETMFSFFKRFKKAPDAAPAEPQQAPDAPRDASRAPASPDAARVDAPAAPQPRDERSENHDRPEHDETPTAEHSRSGAQPAARATPPASAAASEAPVGQPRAAAARASEPAPSVVMTVTPSSNGRHGVVETVEIVPPPAPEPAAKKSWIARLKSGLAKTSSSITNVFVNTKIDDALYEELETALLMSDAGIDATEHLLDALREKVRAGRLTDPQQVKDALRGLLVELLAPLEKSFVLGRAQPLVMMIAGVNGAGKTTSIGKLAKHLQSFDQSVLLAAGDTFRAAAREQLAIWGERNNVTVVQQESGDPAAVIFDAVSAARARNIDVMMADTAGRLPTQLHLMEELRKVKRVIGKAHDGAPHEVLLVIDANTGQNALAQVKAFDDALGLTGLIVTKLDGTAKGGILAAIARQRPIPVYFIGIGEKVEDLQPFSAEEFADALLG

SEQ ID NO: 50223 - protein, 379 aa, Burkholderia mallei
SFFIPCVTLIGPGCARETGARAKSLGAKKALIVTDAGLHKMGVSEIVAGHIREAGLQAAIFPGAQPNPTDVNVHDGVELYRREGCDFIVSLGGGSSHDCAKGIGLVTAGGGHIRDYEGIDKSTVPMTPLISINTTAGTAAEMTRFCIITNSSHHVKMAIVDWRCTPLIAIDDPSLMVAMPPALTAATGMDALTHAVEAYVFTAATPITDACAEKAIALIGEWLPKAVANGESMQARAAMCYAQYLAGMAFNNASLGYVHAMAHQLGGFYNLPHGGCNAILLPHVCEFNLIAAPERFAAIAPLLGVRTAGMSTPDAARAAIAAIRALSASIGIPSGLAALGVKAEDHEVMAGNAQKDACMLTNPRKATLAQVIVIFAAAM

SEQ ID NO: 50224 - protein, 330 aa, Burkholderia mallei
MDSMTDHQPTPIRFGIVGAGSIARRFAHSIAHVRGAELSRIWARRADAAAAFCAAHGGAPCDSVDALLASDIDAVYIATLNDSHAHYARTALAAGKAVLCEKPATVNARELETVLDAAHAAKRLFMEAMKPPFYPLYRKLRAHLERDPIGEIALVRAGCASSRVPADHPVYRFEQAGGALLDIGVYEMFLAVDWLGAPLDVQTLGRVGATGVDVFASVNARHARGVSQLFCGLDVMGRGDALLAAPGGYVTIHENWWNPARATIRYADGRVVELDEPFDGGGLNYEIAHFCELLRAGELESPVMTHDHSRRMIAMTDAARAALGVRYPMD

SEQ ID NO: 50225 - protein, 367 aa, Burkholderia mallei
MTSTQRTLMVMAGGTGGHVFPGLAVAHRMQAQGWRVVWLGNPAGMEATLVPRHGIPMEYVRFGGLRGKGLATKFALPFNLLRACAQSLRALRRVKPDVVLGMGGYITFPAGLVTVLTGRPLVLHEQNSIAGLTNKVLAKLAKRVLVAFPGALPNAEWTGNPIRTELARTEPPQARYAARSGKLRLLVVGGSLGAAALNEVVPRALALLAPDERPQVVHQAGAKHIDTLKENYEAAGLSCGSDVALVPFIDDMASAYANADLVICRSGAMTVAEIAAVGVAALFVPFPHAVDDHQTTNAEFLAEQGAAVLVQQRDLSAELLADWLRGQSRDSLAAMAERSRSLAKPDATDEVARVCAAVAGANLEGKQ

SEQ ID NO: 50226 - protein, 510 aa, Burkholderia mallei
MTKIIGPFRAIVTALSPFRATCGNLGGAHARLAARAEAVYRWAPEIFRPSMHSESPFAGSGGAPAGDGVIPVSALNRAIGTMLERTFPLLWVAGEVSNFTRAASGHWYFSIKDQQAQMRCVMFRGRAQHAEFTPREGDRIEVRALVTMYEPRGEVQLSVEAIRRTGQGRLYEAFLRLKAQLEAEGLFAPERKRAPPTHPRAIGIVTSLQAAALRDVLTTLARRAPHVPVIVYPAPVQGAGAAEKLAAMVATANARREVDVLIVCRGGGSIEDLWSFNDEALARAIAASDVPVVCGVGHETDFTIADFAADVRAPTPTGAAELVSPQRALLLRELGERQGALARGLRRGLDARAQQLDWLARRLISPAERLQRQAMHVGQLAARLAAAGARPVRDARARFSLVQLRWQRARPDFAQARQVLAAFAQRLDATLQRRIERDTARVAACAARLEVLSPQRTLERGYAALIDAQTGRAVRAPASLKPQRRLTVHLAEGSADVSLADVQPRLSDTF

SEQ ID NO: 50227 - protein, 242 aa, Burkholderia mallei
MSMVEFRNVSKSFGHVPVLKDIDLRIDAGEVVVVVGPSGSGKSTMLRCINALEKITGGDLLVDGQSVKGKAAVIHGIRLEAGMVFQQFNLFPQMTALENVMFGPIQVRGASRAQARDQAMALLAKVGLEARANHYPSELSGGQQQRVAIARALAIRPKLMLFDEPTSALDPELRHEVLKVMRDLANEGMTMIVVTHEIGFAKQVGTRLLFMDQGGIAEDGDPKTLIDHPPTPRLKDFLKHVS

SEQ ID NO: 50228 - protein, 530 aa, Burkholderia mallei
MLSTANITMQFGPKPLFENISVKFGEGNRYGLIGANGCGKSTFMKILGGDLEPSAGNVALEPNVRLGKLRQDQFAYEDVRVLDVVMMGHTEMWAAMTERDAIYANPEATDDDYMHAAELEAKFAEYGGYDAEARAGALLLGIGIEEKFHSGPMRDVAPGWKLRVLLAQALFSNPDVLLLDEPTNNLDINSIRWLEDTLNNYDSTMIIISHDRHFLNSVCTHMADMDYGTLKVWPGNYDDYMLASAQARERQAAANARAKERVAELQDFVRRFSANKSKARQATSRAKQIDKIKIEEFKPSSRQNPFIRFEFEKKLHNIAVVADSITKKYERTIFENFNLSVQPGERIAIIGENGAGKTTLLRALFGNLTLDHGTVKWAENANVGYMPQDTYEEFPNDVTLMDWIDQYRKDGDDETMVRGTLGRLLFSADDIKKSVKVLSGGEKGRMIWGKLMLGRHNVLLMDEPTNHMDMESIESLQIALEKFEGTLIFVSHDREFVSGLANRIIEVTTEGKLVDFGGNYEDFLASKGLQ

SEQ ID NO: 50229 - protein, 679 aa, Burkholderia mallei
MSTTLNENLLLAIPLAPLAGSLIAGLFGNAVGRKGAHRVTILGVALAFVLSALVFFQVLDGASFNATVYEWMNVGSLKLEVGFLVDTLTAMMMVVVTFVSLMVHIYTIGYMSEEDGYQRFFSYISLFTFSMLMLVMSNNFLQLFFGWEAVGLVSYLLIGFYFTRESAIYANMKAFLVNRVGDFGFLLGIGLILAYAGSMNYGEVFAKRAELASLHFPGTQWGLLTVACICLFIGAMGKSAQFPLHVWLPDSMEGPTPISALIHAATMVTAGIFMVTRMSPLFELSDAALSFITVIGAITALFMGFLGIVQNDIKRVVAYSTLSQLGYMTVALGVSAYPVAVFHLMTHAFFKALLFLGAGSVIIGMHHDQDMRNMGGLRKYMPITWITSLVGSLALIGTPFFSGFYSKDSIIDAVKLSHLPGSGFAYFAVVASVFVTALYSFRMYFLVFHGEERFRHPKTFGNNHGAESAAHHGHDDHGHAHEPHETPWVVWVPLVLLAIPSVIIGAIAIGPMLYGDFFQHGVAFDKVIFIGQNHPALAEMAEEFHGWTAMGLHSVSGLPMWLALAGVVVAWFLYLKRPDLPAAIRRAFGPIYTLLDNKYYMDKINEVVFTKGSIAIGRGLWKEGDVVVIDGLVNGSARFIGWFAGVIRFLQSGYIYHYAFAMIIGMLGLLTLFVTLGGK

SEQ ID NO: 50230 - protein, 208 aa, Burkholderia mallei
MSTGRPKSRPARRDGASLQRWRAQRPPAAASTMKFLFDLFPIILFFAAFKLWGIFTATAVAIAATLAQVAWVAFRHRKVDTMLWVSLGVIVVFGGATLVLHDEKFIQWKPTVLYWLFAVGLVAARYAFGKNLIEKMMGKQLTLPEPVWDKLNLAWAAFFAALGVTNLYVVRNFTESQWVNFKLFGTTGAIVVFVILQSLWLAKYLKEE

SEQ ID NO: 50231 - protein, 359 aa, Burkholderia mallei
MRLGATVRRRLRDALAARIGRDVPYYRPTGFPAVLLQIVRDAADRIGLARAQIDVTIAVVVDRVIADAARQELRDADRARVRAEHARRVELAVARPDEEIFEILAERRLPRVAIRRVRIVERERRQRVERAEVAHVAAVDRLDADDADDHLGRHAEFRGRALQRALVRAPEFHAGVHAHRVEKARLVDAPVLDGWRRRGHHELRGGRRVAHAREQRMQRVRIEVVARDHVGDERVDLRVVRVALRNDFFFECLPLLYARLRLRLRLRLQLQLRLRLRLRLRRLLRDDGCGGLRLRDGGRREERRGERQRGEREAKTESERGGCGRLVEDHVEAKRTRRTISGQYNRHARRAGPAGGVMW

SEQ ID NO: 50232 - protein, 129 aa, Burkholderia mallei
MTTETSSHQSGHGPLRRLLGSVLALLQTRLELVGIELAEEKERLMGVLFVGLAAMMLATMALISLTVLIAIAFWDTYRWQSLAVVTALYALGALACWLKARSGLRDAPSVFEATLNELEKDRELFRGKP

SEQ ID NO: 50233 - protein, 172 aa, Burkholderia mallei
MTDMENQSAARRPQAAPTPANMNRLAKILPLENVVIDLSVTSKKRVFEQAGLIFENQNGIARSTVTDNLFARERLGSTGLGEGVAIPHGRIKGLKHPLAAFVRLAEPIPFEAPDGQPVSLLIFLLVPEQATQAHLEILSEIAQLLSDRDTRERLHTEPDRDELHRLLTQWQP

SEQ ID NO: 50234 - protein, 243 aa, Burkholderia mallei
MSKTHFGFETVEENEKAKKVAGVFHSVASNYDLMNDLMSAGLHRAWKAFTIAQANVRPGGKVLDIAAGTGDLTKAFAKAAGPTGEVWHTDINESMLRVGRDRLLDKGVVTPSLLCDAEKLPFPDNYFDVVTVAFGLRNMTHKDSALAEMRRVAKPGGRVMVLEFSKVWEPLKKAYDVYSFKVLPWLGDKFAKDADSYRYLAESIRMHPDQETLKTMMEQAGLDAVKYYNLSGGVVALHVGTKY

SEQ ID NO: 50235 - protein, 155 aa, Burkholderia mallei
MSDSAAAPLVYLLRPAASGDFEFAEALTHGNMNAYYQRHGLRWRADLFFASWRDSENFILELDSVSIGLLRITEEGDSLHIRDVQIAPGHRQRGAGTYLLETSHRFAKARGLRETQLRVFVDNPAARLYLRMGYRLAGPRLAQFGSIRHMVRPVS

SEQ ID NO: 50236 - protein, 176 aa, Burkholderia mallei
MSRVGKSPIALQGAEVKLADGAITVKGPLGTITQAVNPLVNVANNDGTLNLSPVDDSREANALSGTMRAIIANAVHGVTKGFERKLTLVGVGYRAQAQGDKLNLSLGFSHPVVHQMPEGIKAETPTQTEIVIKGIDKQKVGQVAAEVRGYRPPEPYKGKGVRYADEVVILKETKKK

SEQ ID NO: 50237 - protein, 192 aa, Burkholderia mallei
  MISC_FEATURE (134)..(134): X=any amino acid
  MISC_FEATURE (138)..(138): X=any amino acid
  MISC_FEATURE (159)..(159): X=any amino acid
GRRQCGHRYAIRAGRNLPDKEFRYLRTVIVTAAVYRDFNQELAPHHLIFRHRAGVTPYTSTFVFAECCVFIKQSQPPVYCNPFTLLAQASQATRAYLIPKLRYQFAEFLLPSSLKRLRILISPTCVGLRYGHRXTEAXRLFLEPLPIASLPKELAPHPXILRPDLPKRLLQCSDRDFQHPDNLPRSVPPSHL

SEQ ID NO: 50238 - protein, 568 aa, Burkholderia mallei
MTLRLSRRAYAEMYGPTTGDRIRLADTELLIEVERDHTLYGEEVKFGGGKVIRDGMGQSQLPAADVADTVITNAVILDHWGIVKADIAIKHGRIAAIGKAGNPDIQPGVTIAIGAATEIIAGEGLIVTAGGIDTHIHFISPQQIDEALASGVTTMIGGGTGPATGTNATTCTPGPWHMERMLQAADGWPINLGFLGKGNASRPQPLVEQIEAGAIGLKLHEDWGTTPAAIDNCLTVADDTDTQVAIHTDTLNEAGFVEATVAAFKGRTIHTYHTEGAGGGHAPDILKVCGEANVLPSSTNPTRPYTINTLDEHLDMLMVCHHLDPSIAEDLAFAESRIRRETIAAEDILHDLGALSMLSSDSQAMGRVGEVIIRTWQTAHKMKVQRGALAGDGARNDNFRAKRYVAKYTINPALTHGIAHEVGSIEPGKWADLVLWEPAFFGVKPAMIVKGGMIAVAQMGDPNASIPTPQPVHYREMFATRGGALARTSLTFVSQLALDAGIGARYGLAKRLVPVRGCRTVTKRDMIHNAWQPAIRVDPETYDVVADGALLTCEPAAVLPMAQRYFLF

SEQ ID NO: 50239 - protein, 334 aa, Burkholderia mallei
  MISC_FEATURE (240)..(240): X=any amino acid
MRRSRAARRSARPRDADIARPRARRARAGSRRVGGRRASRQRHDARRGRRAPAAFGAGTLARRPGFARDPPAPASPSRADAPGAARPSGARSHRDKSPHESDRLDRARHETIRRSLDFSSPLRRMNVPMLRAAPAALLLAVCAGTQAQPLAGSPSSAATANPAAQAPTRSRTPPDARSPALPAGSLASQTLSQHAPPDAKPQYAAPLQRNFAFAQDQSRQEECDELAATIDNLARHTQAXTRSAPPALLAPSTANSQTPWKIPAPPVYEPPPSRPPPSANGHARPNYAPLPFDYRSRPWAQPYPATEQDAKEQRARSAQQIELETRYRQLHCRP

SEQ ID NO: 50240 - protein, 465 aa, Burkholderia mallei
MTYPPTATPFSALALTPATLANLAQLGYTDMTPIQAASLPIALAGHDLIAQAKTGSGKTAAFSLALLARLDARRFDVQALVLCPTRELADQVAQEIRRLARAEENVKVLTLCGGTPMRPQTQSLEHGAHIIVGTPGRIMDHLDRGHLTLDALNTLVLDEADRMLDMGFFDDIAKVARQCPPTRQTLLFSATYPDGIAKLSQQFLRHPKRVKLEERHDDSKIRQRFYEVTEDERLHAVGLLLNHYRPVSTIAFCNTKQQCRDLLDVLHAQGFHALALHGELEQRERDQVLIRFANRSCSVLVATDVAARGLDIAQLEAVINVDVTPDPEVYVHRIGRTGRADQDGWALSLASMNEMGRVGGIEQALAREVKWHPLAELKAGGDAPLLPPMETLQILGGRKDKIRPGDVLGALTGDAGFSGAQIGKINVTEFSTYVAVERGIARDALRKLNAGKIKGKRVKVRLMDE

SEQ ID NO: 50241 - protein, 789 aa, Burkholderia mallei
MSTTPSSASSEAGHAEATASSHARQYIDAVLEQSFRHLFGPTATPEQPRKHGVVSIAKLTAALADYLGAEEIKEVKAAFHFSDEAHLGQYRQSGEPYITHPVAVAEICAGWKLDAQAIMAALLHDVMEDQGVTKSELAERFGPKVAELVDGLSKLDKMEFRSREEAQAENFRKMLLAMARDVRVILVKLADRLHNMRTLGAVPMEKRRRVARETLDIYAPIAHRLGLNNTYRELQDMSFANFNPHRYATLEKAVKAARGNRREVIGKILESVQRAMADAKIDAEITGREKTIYSIYKKMRDKQLSFSQVLDVYGFRIVVEHPLDCYTCIGVLHALYKPVPGKFKDYIAIPKVNGYQSLHTTLVGPFGAPIEFQVRTRKMHEIAEAGVAAHWLYKNGGADLNDVQKRAHQWLKSLLDIQSEAGDSSEFLEHVKIDLFPDAVYVFTPKSKIMALPRGATALDFAYSIHSDLGNQCVAVKINNELLPLRTELKSGDIVEVITAPYSKPNPAWLGFVRTGKARSAIRHYLKTMRLNESVQLGERLVDQSLKGYGLALADVTPEVWEKLVQWTGNKSRQEIFADIGLGRRVAAVMAKRIEVLMSGRDADDDLPRAERHAANHAPPVVITGTEGMSVQLSACCRPIPGDDIMGYIGIGLGMAIHTTACRVAQRIHRRDPGRWIDVAWAPQPGRLFDVAVKALVKNTKGIFARVAADITSADANIVHIAMDEDLTHESTVLRFVIQVSDRVHLANVMRRVRTNPDVMRIMRERSNDDVVHARHDGGMRIDRERQDY

SEQ ID NO: 50242 - protein, 93 aa, Burkholderia mallei
MLAASGSSGAGGAGAAGADGDGHNGGYGAAGAGYDGGRDMEHGAGAGRASGGGGAGARSGGGGGGGGGGGGGASRPSAPAGGGFDEMDDDIPF

SEQ ID NO: 50243 - protein, 297 aa, Burkholderia mallei
MNFALILFVLVVVTGIAWVLDKLVFLPRRKKAADTAVAEFDRQQERVGERFADENAPQTRARLRDEKLRQPWWLEYTASFFPVILVVFVVRSFVVEPFKIPSGSMVPTLLVGDFILVNKFDYGLRLPITNQKITAGRPLERGDVVVFRYPKDESVDYIKRVIGLPGDTVAYQDKKLTINGQPVPEAPLPDYFDEERMNYAKQFEETLGTRKNAILNNPSVPPFVMGADDYPYRNNCQYDSRGVVCKVPPGHYFMMGDNRDNSADSRYWGFVPDKNIVGRAFFIWMNFSDLKRIGSFN

SEQ ID NO: 50244 - protein, 262 aa, Burkholderia mallei
MSAVCRPCAATPPAGRAARPSQGIPIMSASSPSRARPGARPHDGAPAPVRDACPAPRRDASAPENLFWHAGRVAADARSTQFGRPPLTLWLTGLSGAGKSTLAGELERLLLRDRWPCAVLDGDNLRHRLNRDLGFGAEDRHENIRRTAEVARLMNGVGLVVIASLISPFRDDRAMAREIVGSDWFSEVYVSTPLDECERRDPKGLYRKARGGLLPNFTGVSAPYEPPVSADLAIDTTRLSVAAAAAMLRAHLIARCAGRHVD

SEQ ID NO: 50245 - protein, 367 aa, Burkholderia mallei
MQLVKTERDTLLRPLQTVSGIVERRHTLPILANLLITKNGPDVSFLSTDLELQITTRADFGVGGDQVATTVAARKLLDILRAMPDGQVTLSLADKRLTVQSGKSRFALQTLAADEFPTVAQSKDFGASLAVPQKAFRQLLGMVYFAMAQQDIRYYLNGMLLVVDGDRLMAVATDGHRLAFSSMKIEGSFGRQEVIVPRKTILELQRLLEDIDDTVKIDIAQTQAKFTFGQVELVSKLVEGKFPDFQRVIPKAHKNTFEIGREELQRSLQRAAILTSDKFKGVRCIIAPGQLKIMSTNADQEEAQEELEIAYQGDTVDIGFNVTYLLDVLANLKVDTVQVSLGDASSSALITVPENDEFKYVVMPMRI

SEQ ID NO: 50246 - protein, 162 aa, Burkholderia mallei
MHGEMPRCGLETFASSCRFGIDYTDVTRRQSEQLSPAGAHGARHDIRFVARSIRRSLDEVLDEVLDEVLDEVLVEARDVVRDSDDDSDSDGDGNSHHDSDSDSDSDSESWHRIRACQPARHAVDQRLRARHSTRAVAQFRSRLAAAAGDRSTGRSAHARIGA

SEQ ID NO: 50247 - protein, 313 aa, Burkholderia mallei
MGNEFQHRTVLLDEAVDALVTRPDGVYVDGTFGRGGHSRAVLARLGDAGRLIAFDKDPRAIETAESIEDARFEIVHDSFAAMKGALDARGVGRVSGVLLDLGVSSPQVDDPARGFSFRANGPLDMRMDPTRGESAAEWLARASVQELTEVIRDYGEERFAFQIAKAIVARRAESDRLGPLDSTGELAQIVGHVVKTREKGKDPATRTFQAIRIHVNQELADLQVVLEAALSLLEQGGRLVVISFHSLEDRIVKRFLQAHASAPAVDRRLPIRAADLPRPPLKLLGRMFPNDAEVAANPRARSAVMRIAERVAP

SEQ ID NO: 50248 - protein, 360 aa, Burkholderia mallei
MKTSMQSKLDQLTTRLAELNDLLSRENVTADLDQYRKLTREHAEIGPVVEHYAQWRQARADELAAQELLADASMRDFAEDELRGARDRMGRLAAELQTMLLPKDPNDERNIFVEIRAGTGGDESALFAGNLLRMYLRYAERQRWQVEMMSESPSDLGGYKEVIVRIAGYGAYSRLKFESGGHRVQRVPATETQGRIHTSACTVAVMPEADEIGEVEINPADLRIDTFRASGAGGQHINKTDSAVRVTHIPTGIVVECQDDRSQHKNKDRALKVLAARIKDKQYHEQHAKEAATRKSLIGSGDRSERIRTYNFPQGRMTDHRINLTLYKLEQIMDGDLDELIAALVSEHQAELLASLGDAE

SEQ ID NO: 50249 - protein, 171 aa, Burkholderia mallei
MTQRDVNIDDIEAQEMAAALLDAVQNGATLKDLHQVPQDLMDGIYAFAYRFYQQGRLDDAEVFFRFLCIYDFYNAEYAMGLAAVCQLKKEYARAIDLYALAYSLSKDDHRPMFHTGQCHLLMGKAALARRCFGIVVERSRDERLAQKAQSYLDGLDEVGADAAPASAGNDH

SEQ ID NO: 50250 - protein, 179 aa, Burkholderia mallei
MKSASRLAAWAAYAAFAGYSAVAAAASASTPAAGADAASSPKPAVEDIKMFPAAQAGQKREVIVLPAEKLEEDIRVELVVGRTIKVDCNQHWFGGDLKHETVQGWGYPYYVLADAKGPAATLMACPGQESQQAFVPVRGSGYLLRYNSRLPIVVYVPKEFEVRYRLWYGSNEVARAVEK

SEQ ID NO: 50251 - protein, 135 aa, Burkholderia mallei
MNFKISTEPGARLRIDKWLWAARFFKTRSLAADAVEKGRVRIGGAAVKPAKEVRVGDRVDVTIERVVWEIDVLGVCDVRGPASVAQTLYAETEAGRAKRLAELERRRHFREPSAELHGRPTKRDRRIIDRFSNGS

SEQ ID NO: 50252 - protein, 719 aa, Burkholderia mallei
MARAGLAAAGAQEADGAAVRSCMFMIRSAYVGSRIGHHRVRLDRLAFEHRLDTALPEHRDAIAQADDLRQLARDQHDRIAARAQLAHQLIDFRLRADVDAARRLVEDQDPRVMVEPARDHDLLLIAARERVDARVRRRRLHAEPLHQLERRARLGRRVDEPAQPAVLAEVVDRDVVPDRERGDEPLRLAALRQEADARGERGGGIGEAHRAAAHAHSPHARGLRADQRERARRAPGADEAREAENLALAQREAVHGAVLAHLQRVHLEHGRGVARKTRLRRKALLDAPAHHHLDERADIGARDLGRADVLPVAQHGDPIAHLEDLVEVVRDEDHRDAPALELAHHAEQVRGFGGRERRGRLVEDQQPRVERQRLADLDELLLRDRQLAHRRRQIDRDVEPREDVRRRAAHPRALAQPEPAAPLAAEEQIVDRVQLRNQAELLKHDADARRDRVVMVREAPRLAVERDHALVRRVDPAEDLHQRRLARAVLAEQRVNLAARDAQIDSAQRDDAGKPLRDAGERQYRVHRLLARFVRRARRAARFVHVVGLVARAAHQLNVFALPLSIRFTSTGIAFGTLAPHFFASPMPIARRIWSRGNCADVSMNFEFGFCIAAIASGAPSTLVSLMSRPDASIADSAPIEPPSLTLKMPLSNGCAWIMFSVTASALARSCLPFCTSTILTFGNFASAARQPRTRSRIGTTGMPSRIATSPPPPIAFAR

SEQ ID NO: 50253 - protein, 127 aa, Burkholderia mallei; identical to SEQ ID NO: 50106
  MISC_FEATURE (77)..(77): X=any amino acid

SEQ ID NO: 50254 - protein, 275 aa, Burkholderia mallei
MSQQLQQIIDNAWENRAELSPKAASAEIREAVAHAIEQLDRGALRVAEKIDGAWTVHQWLKKAVLLSFRLEDNAPMPAGGYSQFYDKVPSKFANYTAEDFAAGGFRVVPPAIARRGSFIAKNVVLMPSYTNIGAYVDEGTMVDTWATVGSCAQIGKNVHLSGGVGIGGVLEPLQANPVIIEDNCFIGARSEVVEGVIVEENSVISMGVYLGQSTKIYDRETGEVTYGRIPAGSVVVAGNLPAKDGTHSLYCAVIVKKVDAKTRAKVGLNELLRGD

SEQ ID NO: 50255 - protein, 262 aa, Burkholderia mallei
MNQQTFFDRPLGILAALPEELGDLVAAMRDDGPVDTVTLGRRDYHVGVAHGVRCVVTLARVGKVAAAATASALIHRFDVRAIVFTGVAGGVASDVSVGDVVVADALLQHDLDASPLFPRFEVPLLGLTRFAADAALAAQLKAACARFVDDEGETLNARFRLHGARVHAGLIVSGDRFVSSEREVSALRDALPDALAVEMEGAALAQVCHEYGVPCAIVRTISDTADDHASTSFTTFLTDIAGAYSSGILKRFLAAHARANAA

SEQ ID NO: 50256 - protein, 183 aa, Burkholderia mallei
MLVEIRMAFAPVDLGHPEIEVAERAPERDVGERVVVADAPRLAGEALRHRDEAVVDLALLARDPRIAAMLRLALRVLDANRDRRVEHAVAERLPAPHLDALAPRRRNQLADGRKRVDVFADHARIEHGRAVLHHEARHLADRIRRMDVRVRRPDVFELQLVVDLLFSEHDPRLADERAAERTD

SEQ ID NO: 50257 - protein, 406 aa, Burkholderia mallei
MQPVAGEREHARQQHEERGRKAGHRREADQQHRGEIQRAMAAAQLPGDLRAERRAVAVVVIVGDARDHHAGRDRDQQRRNLRHHRIADRQDREAVRGVPRRHPVVHHADRDARDDVHERDDEPGDRVALDELHRAVHPAVQLAFLGERRALAARLVRRQDVRAQIRVDAHLLARHRVEREARADFGHALRALRDHDELHDRDDQEHDEADDEIAADDELAEALDDVARVRVQQDRFRRRDVQRQPVQRREQQDRREHRQRHDAADVHRHHQQRDADRDVHAEQHVDHLGRQRQDHQRDDRDDEHRDADLAAGGKFEGFQRHDDLAEETAATARAPERDSTQRRIAATVSNSSSGIDASRSTRYSARATLGLPTIGTPSACAWRRSASAPSSTAFSMTRGSGCSWGA

SEQ ID NO: 50258 - protein, 198 aa, Burkholderia mallei
MQNFNLAVFSALNAGSTPPLGAVRFGVFAADWLVYAVPALLLLTWVMGARPTRRQAIEAGVGACVALALAQVIGHFWYSPRPFVLGIGTQLIPHAPDGSFPSDHTTFVCSVAAGLLIARATRTAGAALAVIAAVIGWGRVYVGVHWPLDIVGGALVGTAGALAAHLYGRPVTALLDRVGESVHAVAFTRLHERPIRID

SEQ ID NO: 50259 - protein, 157 aa, Burkholderia mallei
MAGILIIAHAPLATALRDCIAHIYGGLPARIGCIDVQAENDPAQVMAFAHAELARLKEENGALVLTDMYGATPANIAGQLAKVEGVRVLAGVNLPMLVRAVCYRTTPLDTLVDKALAGSTKGIHEIAAGTPPPRPSALGCGECAPIPPEPKAQTQPH

SEQ ID NO: 50260 - protein, 518 aa, Burkholderia mallei
MTFWNLYFILKLYLFAAGHLKPLWIANLGFALALALSAPARRRSVRLLRHALALALAVPLMYREADVPPLARLVETLGGLRAFSAGYWMELVPRFVPPMLALAALGVVIGYLIVNRWLRVATFVLLALIALPVWQAGSAALARLDAAAAAVPGPAGTGRAVQPQDHNAALAAFRSQESQRQVTFGRPSADPATQFDVIVLHVCSLSWDDLDVARLRNHPLLGHFDYLFTNFSTAASYSGPAAIRVLRASCGQEAHADLYKPAPAQCHLFGQLAAAGFAPQTLLNHDGHFDNFLQLIRENIGVPNAPMIPNADAPVAMHAFDGSAIKDDYATLANWYAKRGASPGPVALYYNTISLHDGNQLTGGRMSSLDSYPLRARKLLDDFDRFADLIAASGRRAVIVFVPEHGAALRGDAKQVAGLREIPTPRIVHGPVGVRLVGFKGDHGATTVIDAPASFFALAQLLANLVSNSPFKPGVTLSQYAADLPQTRMIGENEGTVTMTTPTGYAVKTPDGVWIDEK

SEQ ID NO: 50261 - protein, 396 aa, Burkholderia mallei
MDLTQVSSSRAPRASGAAAPLLFDERPFLRRLSLVDWLFALALVAGAGFALARYHAHMDYYDTAVLIGTVPALVVLGWRWKPARLLMAAIAALSLVSLQLYHGDLARADSAFLLKYFLSSQSAILWMSALFVLATLFYWIGMLSRSETGGAIGQRLTWIAVLMGFTGLMVRWYESYLIGADVGHIPVSNLYEVFVLFSLITALLYLYYEGHYGTRALGAFVLLVISAAVGFLMWYSIARDAQQIQPLVPALQSWWMKIHVPANFIGYGSFALSAMVAVAYLSKERGVLADRLPALEVLDDVMYKSIAVGFAFFTIATILGALWAAEAWGGYWSWDPKETWALIVWLNYAAWLHMRLMKGLRGTVAAWWALTGLLVTTFAFLGVNMFLSGLHSYGKL

SEQ ID NO: 50262 - protein, 496 aa, Burkholderia mallei
MHAKSLTELRAALDAKECSAVELAQHYLKRIDAARDLNAFVHVDAELTLAQAKAADAALANGEAGPLAGLPIVHKDVFVTRGWRSTAGSKMLANYASPFDATVVARLSAAGMVTLGKTNMDEFAMGSSNENSAFGPVKNPWDTSAVPGGSSGGSSAAVAARLAPAATGTDTGGSIRQPASFAGVTGIKPTYGRVSRYGMIAFASSLDQGGPMARSAADCALLLNAMAGFDERDSTSLERADEDYTRHLGKAWAAGGDAGKPLAGLRIGLPAEYFGAGLADDVRAAIDAALKTYEALGATLVPVSLPKTELSIPVYYVIAPAEASSNLSRFDGVRYGHRAAEYRDLLDMYKKSRAEGFGPEVKRRILVGTYVLSHGYYDAYYLQAQKIRRIIAQDFQEAFKSCDVIMGPASPTVAWDIGAKGDDPVQMYLADIYTLSVSLAGLPGMSVPCGFGAGANAKRPVGLQIIGNYFDEARMLQVADAFQRATDWHVQEPAGV

SEQ ID NO: 50263 - protein, 1077 aa, Burkholderia mallei
MFERLIRFAIAHRWLVMLAIVAAASLGVYSYQKLPIDAVPDITNVQVQVNTSAPGYSPLEAEQRITYPVETAMAGLPNLEQTRSISRYGLSQVTVIFKDGTDIYFARQLVNERIQEAKDKLPPGIAPAMGPTSTGLGEIYLWTVEADAGARKPDGTRYTSADLRELQDWVVRPQLRNVPGVTEVNSIGGYVKEYRVAPNPTKLMSYGLTLADVVRALERNNDNVGAGYIEKRGEQYLVRVPGQARSAEDIANIVLVNAGGVPVRMKDIGAVDLGRELRTGAATANGEEVVLGTVFMLMGENSRTVAKAVAARMADVNRTLPAGVRAIAVYDRTVLVEKAVRTVKKNLLEGAVLVIAVLFLFLGNIRAAVITALVIPLSMLMTFTGMVNAKVSANLMSLGALDFGIIVDGAVVIVENCIRRLAHAQQAAGRPLTRDERFAEVFAASQEARRALIFGQLIIMVVYLPIFALTGVEGKMFHPMAITVVMALAAAMALTVTFIPAAVALFIGRRVEEKENRLMSAAKRLYAPVLDAFVARPGQVLAGATAVVALSLVLATRLGSEFIPSLNEGDLAVSAQRIPGTSLTQSVAMQQSIEKTLKARFPEIDRVFARTGTAEIAADPMPPNLSDGYIMLKPADQWPDPRKSRDALRGEIEAVLAQLPGNAYEFSQPIQLRFNELISGVRSDVAVKIFGDDMATLNATGEQIAAALQKVPGASEVKVEQTTGLPVLTVNLDRDKLARYGVTVGDVQDTVAAAVGGRKAGLLFQGDRRFDIVVRLPDELRTDVEAIKRLPIALPLAAPAGASGPLAQAPYVPLAELATVDTSPGPNQISREDGKRRVVVSANVRGRDVGSFVADARERIASDVRVPAGYWLSWGGQFEQLQSASERLKIVVPLALAMVFVLLFVMFNNAKDGLLVFTGIPFALTGDVVSLWLRGIPLSITAAVGFIALSGVAVLNSLVMISFIRNLRDEGAPLDAAVREGALTRLRPVLMTALVASLGFLPMAFATGTGAEVQRPLATVVIGGILSSTALTLLVLPVLYRVAHAAPPRATLGARAAGWLARLAPAAVLRRRRESSR

SEQ ID NO: 50264 - protein, 279 aa, Burkholderia mallei
MPTMNADLHCHSNVSDGQLAPADVARRAHAGGVTLWALTDHDEVGGQRAAREAAEALGMRYLHGVEISVTWASRTVHIVGLNIDPRNPALVDGLHRTRNGRAARAVAIGDALAALGIEAAYEGALAYVSNPDLISRTHFARFLVDKGYAASMSDVFDRYLGDGKPGYVAHRWAKLSDAVAWIRQAGGEAVVAHPGRYAYTSVEFDAFFGEFIELGGVAIEVVTGSHTPDQYREYADVARRFGFEASRGSDFHAPGEGRTEFGSLPPLPSDLKPVWERWL

SEQ ID NO: 50265 - protein, 706 aa, Burkholderia mallei
MTALAVRKRLRHGGRAPESSPASRAAAPGRVGAIAGALVALIVVTAAMRLAPELRAWLAAPAGGDAAQLAHIMLFDLAAPRVAAALVAGGCLAAAGALLQSLTRNPLAAPDLLGITGGAQLGLIAAMLVPALAGHASVPLLFVCGLAAAACVSAAAGGWRATPLRLILAGSVCMLLFSAVTTLLLAFFEQTVVGASLWASGSLYQPGAAGLRDALLWLVAPLAALPLVIRPLDPLALGDDAAAAAGVRVDATRLAGTVVAVGFASVAVSIAGPLSYIGLIAPNLIRQMRGAKASRLGALVPLAALAGGALVLVTDSAVLALGLDATLSTGVAIAFVGTPLMLAMIRRGAAWSGAAQQPAHVRAGTRGGARLVRALAVLPWPAVAVLLLAAGAAVLVVGASFGPVWIGPGRWFAALAQRDDLARTVLDLRAPRLLCALLAGALLGASGVLMQSIVRNPLAGPEVLGVTQGAGLATLATLVAWPLAAHGTLVAASLAGGGATLVLTLALNRRHRYAPLAVALTGIVIGTLWTTLAQWLITQESVQPARFVVWLVGGTYGRSWGEAAALLPWGVLAVPALALLARPLDLLALGDEQAAALGLPIAALRPLVLTIATLAACAAVAAVGPVGFIGLMAPHLAAMLGARAHATRLWLAAAWGALVLAAADIAARTLLAPREIPAGVLTALIGAPYLLALLIAEARRERRGGR

SEQ ID NO: 50266 - protein, 458 aa, Burkholderia mallei
MTVRRALPGPRRKGERSMKYKMLVRSLAFGGALWFGAQQAACAATEIQFWHAMEAALGERVNEIAAQFNASQSDYKIVPVFKGTYDQALAAGIAAYRSGNAPAILQVYEVGTATMMQAKKAVLPVSDVFRQAGVPLDEKAFVPTIASYYSDARTGRLVSMPFNSSTPVLYYNKDAFRKAGLDPNQPPKTWADVKADAEKLKKAGYACGYTTGWQGWIQLENYSAWHGLPFATRNNGFDGADATLEFNKPQQIAHIQFLQDMAKDGTFTYVGRKDEASAKFYSGDCAIMTTSSGALATIHKYAKFDFGTGMMPYDAGVKGAPQNAIIGGASLWVLAGKDPATYKGVAKFLAYLSSPAVAAKWHEDTGYLPVTTAAYDLAREQGFYAKHPGADTAIKQMMNKPPLPYTKGLRLGNMPQIRTIVDEELEQVWAQKKTPKAALDSAAARGDELLRRFEKSGG

SEQ ID NO: 50267 - protein, 347 aa, Burkholderia mallei; identical to SEQ ID NO: 47898

SEQ ID NO: 50268 - protein, 402 aa, Burkholderia mallei
MREAEPCKSWRNARQSCVATRARAHRQCPSAAVLRQRPPQGCARRGRSARPRMARARASPEGAGRFRTQRTSQPGEASMPKAIRYDQPGGPEVMKWVDIDVGAPQPGEVRIKQHAVGLNYIDVYFRTGLYPQPLPGGLGMEAAGEVTELGEGVTALKPGDRVAYVAQPPGAYAQERVLAAAKLVKLPEAIGYEDAASAMLQGLTAQYLLRRTYKVEPGDTIVIHAAAGGVGLLVCQWAKALGATVIGTVGSDEKAALAKAHGCDHPIVYTRENFTERVKEITNGAGVPVVYDSIGKDTYIGSLDCLAPLGMFVSFGNASGPLPPIDSKEFSSRGSLFFTRPTLFSYIAKREDLDRNAAELFDVLASGRVKTSIRQRYPLENVAQAHRDLEARRTTGSTVLLP

SEQ ID NO: 50269 - protein, 469 aa, Burkholderia mallei
MTRPVRTRFAPSPTGFIHLGNIRSALYPWAFARKMKGTFVLRIEDTDLERSTEASVDAILEGMAWLGLDYDEGPYYQMQRMDRYREVLAQMLEKDLVYPCYMSTEELDALRERQRAAGEKPRYDGTWRPEPGKVLPEPPAGVTPVLRFRNPLTGSVVWDDAVKGRVEISNEELDDLVIARPDGTPTYNFCVVVDDLDMGITHVIRGDDHVNNTPRQINILRALGGEVPVYAHLPTVLNEQGEKMSKRHGAMSVMGYRDAGYLPEAVLNYLARLGWSHGDAEIFSREQFVEWFDLEHLGKSPAQYDHNKLNWLNNHYIKEADDARLAELAKPFFAALGIDADTIARGPDLVGVMGLMKDRASTVKEIAENSTMFYRSPAPDAQALAQHVTDAVRPALAEFAAALKTAEWTKEAIAAALKAVLGAHKLKMPQLAMPVRLLVAGTTHTPSIDAVLLLFGRDVVVSRLAAALA

SEQ ID NO: 50270 - protein, 543 aa, Burkholderia mallei
MRARSCASSSSPTRCSSCRRCSRKRLRPFVQPTRFFVSHEISMNLAALSTQHQRQSGFLARRQFGNWIDGRAAEPRSGRYLPVVDPATEMTIAEVAASDARDVDAAVAAARRAFDSGDWPRMRPASREKLLHQLAERLERYADELAALETLETGKLIGVARAIDVLGGAEYVRYMAGWATKLEGSTLDTSIAAPAGAEYFAYTRREAVGVVGAIVPWNFPLAIALWKVATALACGCTVVLKPSEETPLTALRLGELAQEAGLPDGVLNIVTGAGAEAGAALAAHPGIDKITFTGSVGVGRAIGHAAVERMARFTLELGGKSPLIVLDDADPDFAAHGAAQGIFFNQGQVCTAGSRVYVQKRLFERVVAGIAAAAEAMKIGSGFDPNTQIGPLVSKRHFERVLGHVDAAKEEGATLVTGGTRALDGGYFVKPTVFVDAAPAMRIVREEVFGPVVTVTPFDTVDDAVRLANDTDFGLAASVWSQNLSHVHRVVPRLKAGIVWVNTHNMLDPNLPFGGFKQSGYGRELGRAALEQFTELKSVCIAH

SEQ ID NO: 50271 - protein, 290 aa, Burkholderia mallei
MSWLDKLLPPKIKQTDPKSRKGIPEGLWVKCPSCEAVLYRNDVDANQHVCPKCDHHMRIGARERLDALLDPEGRYEIGQEIVPVDTLKFKDSRKYPDRLKEAMDETGETDAMVVMGGAIHTLPVVAACFEFSFMGGSMGSVVGERFARGAQNALEQQVPFICFASSGGARMQESLLSLMQMAKTTAMLTKLSEAKLPFISVLTDPTMGGVSASFAFLGDVVIAEPKALIGFAGPRVIEQTVREKLPEGFQRAEFLLQKGAIDMIVDRRKMRDEIAQLLALLQRQPADALA

SEQ ID NO: 50272 - protein, 99 aa, Burkholderia mallei
MALTLTDVTRIAHLARLEMADADAERTLTQLNEFFGLVEQMQAVDTTGIAPLAHPIEQILEVAQRLREDAVTEHVNRDDNQRPAPAVQDGLYLVPKVIE

SEQ ID NO: 50273 - protein, 162 aa, Burkholderia mallei
MAKKSNATQINIGISDKDRKKIAAGLSRLLADTYTLYLKTHNFHWNVTGPMFNTLHLMFEEQYNELWLAVDLVAERIRTLGVVAPGTYREFAKLSSIPEADGVPAAEEMIRQLVEGHEAVVRTARAIFPDADAASDEPTADLLTQRLQTHEKTAWMLRSLLA

SEQ ID NO: 50274 - protein, 530 aa, Burkholderia mallei
MKHMLSKLAASAALAALAPVLAPAHAATPPGIFVIATQLGEFTTLDPSEIYELVPSEYVANTYERLVRVDLREPSKFEGRIAQSWSVGADGLTYTFKLRTGLKFHSGNPVTADDVAWSLQRTVLLDKGPAGVLADLGLTKDNVARKVRKLDDTTVSIETDRRYAPSFVLNVLSADPASIVDKQLLLSHEKNGDFGNAWLKNADAGSGPYRLVKWTPNESLVLQRFDGYRAPYPMKRIVLRHVPEASAQRLLLENGDVDAARNLSPDSLAALSKAGKIHVASWPVSALLYLSLNTRNPNLAKPEVQEAMKWLVDYDGIQRNIVRTTYKVHQTFLPDGFLGALDANPYRQNVAKAKALLAKAGLPNGFAVTMDMPNDYPYVEIAQALQANFAQGGIQVKLIPGDAKQAIGKYRARQHDIFIGEWSPDYMDPNSNARGFAWNPDNSDNAKHKLLAWRNGWDVPQLTAKTDAALAEPSAAKRAQDYQALQKAVLANSPFVILFEKVVQVATRPGVTGPEIGPINDLVSYRTLKK

SEQ ID NO: 50275 - protein, 367 aa, Burkholderia mallei
MLTGNILTAEGWIHGTLEFENGRITTLSGDAADPSNNDAPYILPGFIDLHVHGAGGADVMEGGDAIETIARTHARYGTTSLLATTMTAPRDELMRVVAELGDVARTRTPGGSRVLGVHLEGPYINPGKLGAQPDAAVSAALDEVLKYLSIAPIRVVTLAPEIAGHIEIISEMAARGVRVQLGHSLGTYDDAVAALKHGACGFTHLFNAMSPLHHRNPGIVGAALAHAEYAEIIPDLLHVHPGAIRAALRAIPRLYVVTDSTSATGMPDGEYRLGSQRVTKCLGGVRLADGTLAGSTLTMDQALRNLVSLGLPIADVSSRMSRYAADYLGLADRGRIARGAWADLAVFDRELNLTATFVEGESIVEYA

SEQ ID NO: 50276 - protein, 312 aa, Burkholderia mallei
MIEIERVSRLFGDLAAVDDVSLAVARGTVTALVGASGSGKSTLLRMINRLIAPTSGTIRVDGVDTASVPAETLRRGIGYVIQGHGLFPHWTVARNVATVPRLLGWRAARVDARVRELLELFELDYDTYARKLPHQLSGGQQQRVGVARALAAEPAILLMDEPFGALDPIIRGKAQDDLVALQRRLGITVVIVTHDIDEALRLGDQIAVMDAGRILQAGSPAEILGRPQPGVVERLVAGLDRPLRLLALTRVDALAEPGAAPGEPISGALTLRDAISELLWRGARALPVSSADGAAARRITLDAIVAQAKRPA

SEQ ID NO: 50277 - protein, 226 aa, Burkholderia mallei
MKILVVLTSHDELGTTGKKTGFWLEELAAPYYALKDAGAELTLASPRGGLPPVDPKSDDPASQTDATRRFAKDAEAQAALASTRKLADVSIDDYDAVFYPGGHGPLWDLAEDRHSIALIERAIATNKPVAAVCHAPGVLRNVKDPSGASFVKGLNVTGFSNSEEAAVELTEVVPFLVEDMLKTNGGNYSRAADWAPHVVVDGLLVTGQNPASSEPVAEALLNLLET

SEQ ID NO: 50278 - protein, 315 aa, Burkholderia mallei
MMHTALSTPASGRRAARALRAAALSLALGAASAAHAAPLKIGMTFQELNNPYFVTMQKALDEAAASIGAQVIVTDAHHDVSKQVSDVEDMLQKKIDILLVNPTDSTGIQSAVVSAKKAGAVVVAVDANANGPVDAFVGSKNFDAGAMSCDYLAKAIGGGGEVAILDGIPVVPILERVRGCRAALAKFPNVRIVDVQNGRQERASALAVTENMIQAHPLLKGIFSVNDGGSMGALSAIEASGRDIKLTSVDGAPEAIAAMQKPNSKFIETSAQFPRDQIRLAIGIGLAKKWGANVPKAIPVDVKRIDKGNAKTFSW

SEQ ID NO: 50279 - protein, 515 aa, Burkholderia mallei
MKNLRASFSTFPRDFVAGTVVFLVALPLCLGIANASGVEPFAGLVSGIVGGLVVAVLSGSPLSVSGPAAGLVVIVVDGIAQLGSFQAFLLAVLLSGVIQFGFGLLKAGRFAAYVPSPVIKGMLAAIGILLIVKQVPFALGLSGDGDAPGHAVFASSAIALASLALLAVWETRAMRRFAFVRLVPAPLAVVILSIGATVLLGFVSPNFAPPAEHRVALPELASFAALGEALKTVDLGPNFAYLLSPDVWRIAITIAVVASLETLLSLEAVEQIDPKRRPSQPNRELKAQGVGNLVAGAIGGLPITSVIVRSSVNVNAGAQSRMSAIVHGVMLVVSVFALTWLLNLIPLASLAAILIHTGFKLAKPALFTSVAKQGPGAFLPFAVTIAGVLAIDLLAGIALGLACSVFAVACANLRSPATLAQHDDHYLLSFRKDVSFLGKVQIKQYLAQIPDRAVVIIDATRADYIDHDVREMIDAFVAEAPRREITVDYRRQVQHVRGAGLRWFFRNPAAQQAPQ

SEQ ID NO: 50280 - protein, 38 aa, Burkholderia mallei; identical to SEQ ID NO: 48043

SEQ ID NO: 50281 - protein, 425 aa, Burkholderia mallei
MIIERCDAVRRQRAERARKAARKRQEIVRRQLARGDPQPVELARHLRGRIEHRRRLRKRREQRLGDLRGERVALARELPPVRVRADHRDGERRRRERERQAQAHERRAVEAPRRELEFELAEVEARIERTAHERVERPDRGARQQALVVERAHRSELRLGTRLAELVELERRAVRERFERRHRARHRRGEAFAERAARERELDARRARRLRQQRRRFLGERRRALRRGEAERDRDDRLGRRRGVRGRARVAAARRVGRGGVLRRLIERDVGDSLGLGRRGRIAARRGRQAARDGHRAQMAMPGRGEGVDDELEPRAVDHREHAAPAVERRRIDRDVAALRILDQLILDDVRQRLLQPRPFQRRQRLLEHQQVARGDDKHRRRRLRQQRERRAARALRVAALVDERERQLGPLPFLQRHGRLARRQ

SEQ ID NO: 50282 - protein, 376 aa, Burkholderia mallei
MMELKKRSDGVDLLRGIAILLVLILHFHLTYRLHVLPFDVPWLSGAIKAISRNGNYGVTMFFAVSGFLITSTSARRFGSFGAIRPATFYRFRASRILPCLVLVLAVIVALGSLGMRSFVNKPDTASVLVSVLSVLTFWHNVLMAKVGYFNYSMNILWSLSVEEVFYLSFPILCLLLKRRRYILLFLCVPILVAPVYRSLHADDEIVALYGYLSCFDAIAMGACAALLPARAMSRGRSRAIQWIAGLAIAVTYLSGPIMQHVVWGVSVVAFSTAALLYCFRGGAPAEAAAPSFVSRFIGWFGQRSYELYLFHIVVLGVLREYVTRENVDIAAKPLWLLFYLCVSALVAQFVFKYYSEPLNAALRRGATRPSAGYLQK

SEQ ID NO: 50283 - protein, 356 aa, Burkholderia mallei
MVQNASVPPASAGRPKAQSIALGALYAALVALALWVIRDFMPAIAWACVVAIALWPALRRIDALPALRGRATLVAAVLTSAVALLVVVPIAAGLVEAVDQSHELLGWLHRVEQTGIPEPDVLSHLPFGSQQASAWWLANLAKPLHPATAVKGVDGASVVTFGRHFGSRLAHAAVLFGFMLVTLFVIFQAGPRLSGSLLTGVRRAFGDSGAALLQRMAAAVYGTVTGLVVVGFGEGVLLGLAYAFAGLPHAALLGLVTAIAAMLPFCAPLVFGGAALWLFVQGALGWAIGLAAFGSVVVFAAEHFVRPVLIGNSARLPFLLVLFGILGGAETFGLLGLFVGPALMTVLTVLWAEWVD

SEQ ID NO: 50284 - protein, 614 aa, Burkholderia mallei
MKPASKRTQGVKFASSPVLSVHLPMWRSKLVVFMLFIAFVALAMRAFWIQGPGNAFYQKQGESRYQRTLELPATRGKILDRNGLVLATSLPVRAIWAIPADVPDDLGADKLDALGKLLGMTTKELKAKLSEDKTFVYVKRQVPLDVAEQVAKLDIPGVYQRGEYKRFYPEGEITAHLIGFTNVEDEGQEGVELADQKLLVGTPGSRHVIKDRVGHIVEDVDAQVPPHNGADVGLSIDSKIQYITYTNLKAAVEKFHAKAGAAMVIDVQTGEVLSLVNYPTYNPNDRSHLTGEQLRNRVLTDVFEPGSIMKPFTVSLALDLHRVTPNTLVETGNGHFVLDGAPITDDSGFGTLTVGGVIQKSSNIGATKIAMTMKPEEMWNMYTGIGLGQAPKVGFPGAAAGRLRPWKNWRRIEQATMSYGYGLSVSLFQLARAYTAIAHDGELMPVTIFKTNDAQPPTGPRVFSPTTAREVRTMLESVVSPQGTSPNAAVPGYRVGGKSGTAYKQVGRGYDHKKYRASFVGMAPMPNPRIVVAVSVDEPTTGGHFGGQVSGPVFSAIVGDTLRALNVPPNMPVKQLVVSDDATNAAAAQKLAANAPAKRLIVSSTTHNRPGVVR

SEQ ID NO: 50285 - protein, 495 aa, Burkholderia mallei
MTTRILARGAVAVAVAAALSAGYVAGTRRAEPQIITPAVAALMPAEAAAKTGIPDFSGLVETYGPAVVNISAKHVVQRAAQRRAAPQLPIDPDDPFYQFFRHFYGQIPGMGGGRQPQPDDQPSTSLGSGFIISADGYILTNAHVIDGANVVTVKLTDKREYKAKVVGADKQSDVAVLKIDASGLPIVKIGDPAQSKVGQWVVAIGSPYGFDNTVTSGIISAKSRALPDENYTPFIQTDVPVNPGNSGGPLFNLNGEVIGINSMIYSQTGGFQGLSFAIPINEAMKVKDELVKTGHVSRGRLGVAVQGLNQTLASSFGLQKPDGALVSSVDPKGPAAKAGLQPGDVILAVDGVPVQDSSTLPAQIAGMKPGTKADLQIWRDKSRKTVSVTLASLADDQAKAGADEPVEQGRLGVAVRPLSPRERNGSSLTHGLVVQQSAGPAASAGIQPGDVILAVNGRPVTSAEQLRDAVKRAGNSLALLIQRDDAQIFVPVDLG

SEQ ID NO: 50286 - protein, 329 aa, Burkholderia mallei
MAQSTLYSRVLGTGSYLPPDRVTNQELADRLAKDGIETSDEWIVARTGIRARHFAAPDVTTSDLALVAAQRAIEAADVDPQSIDLIIVATSTPDFVFPSTACLLQNKLGIKNGGAAFDVQAVCSGFAYALATADSFIRTGQHRTALVIGAEAFSRILDFKDRTTCVLFGDGAGAVVLSASEEPGILGSALHADGSYSNILCTPGNVNRGVIAGSAFLHMDGQAVFKLAVNVLEKVAVEALSKAELASEQVDWLIPHQANIRIMTSTCRKLGLPQERMIVTVDEHGNTSAASIPLALDVAVRDGRIKRGQHVLIEGVGGGFTWGASVFRF

SEQ ID NO: 50287 - protein, 1741 aa, Burkholderia mallei
  MISC_FEATURE (1672)..(1672): X=any amino acid
  MISC_FEATURE (1674)..(1674): X=any amino acid
  MISC_FEATURE (1677)..(1677): X=any amino acid
  MISC_FEATURE (1691)..(1691): X=any amino acid
MRSTHEGARMTPPDLLSLAARFARLPDTQRKQFLAKLGDAGIDFRMLPIPPREDRAASVPASFAQTRLWLHARLLGESAAYHITERLRLDGGLDANALRLSCDALIARHEALRTTFAEGAAGVLQTVHAPMRCPWRFTDLADASAGSREQRAAAIAERDEAEPFDLAHGPLVRAHLIRLDAATHWFVLTTHHIVSDGWSADVMLAELSSFYRSYATGDAVSLAPLPVQYADYALWQRRWLDAGEGERQLAYWRATLDASRDALLLPGAATRPAQRGASGARHAFDISAELARRMRALAQARRATPFAVLLAALATLLARASGETGIRIGVPSANRERGETVGLIGFFVNTLTLAASTPATLAFDALVDATQRGLIDAQSHQDVPFDQVVDALGVARSASHHPLFQVMAAYGARRVLPSFAEVRATELPSGMPYAKFDLALSFDERDDGGLDARFVYATDLFDADAIERFAARYVELLAHALDTPGAAIGDLQWLPEAERRQLAAWNGQTHDFTGRASPARAGAGAAVPRERAGQAGGEPFVPVHDRIAQHARRRPDARGVADIERALTRGEVDARATRLAKRLVAAGVGAEMRVGVALSRSVDLLVGLIAALKSGGAFVPLDPSHPRERLAQMLEDAQIAHVITERGSVDALPLAGATRAWLVDDAIADAEIDGVALPAVSPHQAAYVIYTSGSTGKPKGVVVDHGAFARHCEAIAARYGATERDVFMLFQSVNFDGAHEGWFSQYMSGAAVAVTADTLWPPARTCALAAREGVTMTYVPPGCATQLAEWALEHGAPPSLRSITVGGEATSREAFALMRRAFPNARVVNGYGPTETVITPMLWMFAPGDDPAKLADAAYLPIGTLVGARTAHVLDARLNPLPVGVIGELYLGGEGVGLARGYLGRAALTAERFVPDPYGAPGARLYRTGDLVRRRADGVFDFIGRIDHQVKLRGLRIELGEIEAQLAAHDDVREAVAVVFGEGAHARLAAFVELTGDARARARRADAAELDAHLRRTLPDYMVPAHIVVLDALPRNANSKVDRAALPEPAHVARAYEAPDGELETALAEIWREVLGVERVGRADHFFELGGHSLAAVRVATRVAERLARDVPVRALFEAPILAPYAQRVAAAAPAHAPQRAGSASYAPDADGVLPLSAAQRGLWFLWRAQPDSAAYNIPVALRLRGALDVDALADALAHAAVRHPALRTRIVARADGAPGQRIAPARRIELPVVDLRADARIADDDARLAAAIALTDADALAPFDLAADAPLWRARVIRLGAHDHVLSLVVHHIVSDGQSIDLWLDAVRAAYVARRADEPATAAARAAADRRTDRHAGSRAASLAPARAKEAPAQSATIAPIQAPADAPQPAPDAPVLPAAAPHARLAFWREALAGAPSHALPPPRAGRACAPRWDAGRLAFEFDAALVRRARAMALDAHATLPMLLHAALNAAFYRATGATDQPVGVLASTRELTGDAAERALGLFINAVVVRTRLSGADTPATLVAAVRDAALAAYAHADAPFCDVVAALRAPRTVNGNPLFQVMFNYLRLAGAAARDWAGLAVDAFNDVRHRVVFELELDIVEHPDGRVTGAFSYAAERVDGAFVAALAADYLDVVRGFVDAPARALGACAARFPLASHEAYVPPPPAAADARAAARAARALAELWRAXLXHAXPAPEANLFEAGATXFDVVRFVDAARSAGFALAIADVFAAPSLAALGERAAHTAGQPATQARDAD

SEQ ID NO: 50288 - protein, 268 aa, Burkholderia mallei
MPIPHALATLAAAALLMHAACAATLAVHPGERIGAALAAARPGDTVLVQHGRYEENLRIDKPLTLRGVGRPTIDGRLAGDVIRVAAPDVAISGFSIVDSGASLTAQNAGVYVAPGSDRTRIERCELVYNLFGLWIERSADVRVTGNVIVGKRDLLSPRRGNGIQLYNTTGARIAGNTISYTRDGIYVDVSHHARFEHNTIHDVRYGTHYMNSYYNVWDGNDVYHNRGGLAIMEARDQIVRGNRVWGNTDHGIMLRTIQDSLIENNVVA

SEQ ID NO: 50289 - protein, 680 aa, Burkholderia mallei
MTKKLNEVSVDDDANQSDDQPTAASGKGEKAKARDRRAKEKALLKEAFATSTPGTAEELEERRTKLRALIKLGKERGFLTYAEINDHLPDNFTETEALEGIIGTFNDMGVAVYEQAPDAETLLLNDNAPAASSDDEVEEEAEVALSTVDSEFGRTTDPVRMYMREMGTVELLTREGEIEIAKRIEDGLRHMVMAISACPTTIADILAMAERVANEESRVDELVDGLIDPNAADTDGFSEKDAEEIENEDAEAEEDDEEEEEDDDGAAQATANAAQLEALKRASLEKFALISEWFDKMRRAFEKEGYKSKSYLKAQETIQNELMSIRFTARTVERLCDTLRAQVDEVRQVERQILHIVVDKCGMPRSEFIARFPGSETDLDWAEKVAAEGHSYGAILSRNIPAIREQQQRLLDLQARVVLPLKDLKETNRQMAAGELKARQAKREMTEANLRLVISIAKKYTNRGLQFLDLIQEGNIGLMKAVDKFEYRRGYKFSTYATWWIRQAITRSIADQARTIRIPVHMIETINKMNRISRQILQETGLEPDPATLAEKMEMPEDKIRKIMKIAKEPISMETPIGDDDDSHLGDFIEDTNTVAPADAALHASMRDVVKDVLDSLTPREAKVLRMRFGIEMSTDHTLEEVGKQFDVTRERIRQIEAKALRKLRHPSRSDKLKSFLEGN

SEQ ID NO: 50290 - protein, 473 aa, Burkholderia mallei
MRLDVTVIAPKSRVGGTRGSPRTVAADYPRKSARTRAPLSGPRATYGKIALFATFLPLAPMSTDPTSKPAFPITDEVRHALAVTKRGVDELLIEEEFAQKLAKSAATGKPLRIKLGLDPTAPDIHLGHTVVLNKMRQLQDLGHTVIFLIGDFTSLIGDPSGRNATRPPLTREQIESNAKTYFEQAALVLDREKTEIRYNSEWSMPLGADGMIKLASRYTVARMLEREDFTKRFQGGIPISIHEFLYPLMQGYDSVALNADLELGGTDQKFNLLVGRELQKQYGQEQQCILTMPLLEGLDGVEKMSKSKGNYVGISEKPTDMFGKLMSISDVLMWRYFELLSFRSLDEIARFRGEAEGGRNPRDFKVMLAQEIVARFHSQADAERALEDFNHRAKGGVPDDIPAVTLAGAPLAIGQLLKQAGLVPSTSEALRNIEQGGVKIDGATVSDKALKVDAGEFVVQVGKRRFARVTLTA

SEQ ID NO: 50291 - protein, 436 aa, Burkholderia mallei
MTQTAFRARLLRFDGDPAQSDDALAYDEDGLLIVENGRVVAAGAHAALAARLAPGATLVEMRDKLIAPGFIDTHVHYPQTEMIASPAPGLLPWLDRYTFPTERRFADPAHARDVAEFFLDTLLACGTTTALVYCTVHKQSADALFGASEARGLRMIAGKVLMDRHCPEFLRDTAQSGYDDSAELIARWHGHGRQSYALTPRFAPTSTHAQLEACGALARLHPDVFIQSHVAENLDELRWAAELFPERRSYLDVYDHYGLLRRRAVYGHCIHLDDDDRRRFAETGAIAAHCPTSNLFLGSGLFDFERANARHMAVTLATDVGGGTSFSMLQTMNEAHKIARMTGHHLSATRMFWLATAGAAHALDLADTIGTLAPHAEADFVVLDPAATPLLARRTARAESLEELLFALALLGDDRAVYRTYAAGRCVHRRDIADAG

SEQ ID NO: 50292 - protein, 189 aa, Burkholderia mallei
MRRTAWAGTPDEAAGAADRSVRDAGHAAARQQSHAFARAEHFGRRRLRDRAQVAVVEAHGDFDAVRRAEALADRVAGHRAGDAARDRGQHRAAAAADRAAGDRAERAAAERAERAAAAVALNPHRADAFHRAHPHGLFALRLADAIDIGGTRRREAACERHRRGQHRGEREGFPGQHVSSSPNKIHFGL

SEQ ID NO: 50293 - protein, 188 aa, Burkholderia mallei
MASVNKVILVGNLGADPEVRYLPSGDAVANIRLATTDRYKDKASGEFKEMTEWHRVAFFGRLAEIVNEYLKKGSSVYIEGRIRTRKWQGQDGQDRYSTEIVADQMQMLGGRGSSGGGGGGGGGGGGGGDDGGYGGGGGGYGGGRDMERGGGGGRASGGGGAGARSGGGGGGGGGGGGGASRPSAPAGG

SEQ ID NO: 50294 - protein, 753 aa, Burkholderia mallei
  MISC_FEATURE (468)..(468): X=any amino acid
  MISC_FEATURE (470)..(470): X=any amino acid
  MISC_FEATURE (540)..(540): X=any amino acid
QTLYDKLWNSHVVHTEEDGTALLYIDRQLLHEVTSPQAFEGLKLAQRPVWRISANLAVSDHNVPTTDRSHGIADPVSKLQVDTLDANCDAYGITQFKMNDVRQGIVHIIGPEQGATLPGMTIVCGDSHTSTHGAFGALAHGIGTSEVEHVLATQTLLQKKSKNMLVKVEGQLPRGCTAKDIVLAIIGQIGTAGGTGYAIEFGGSTIRALTMEGRMTVCNMAIEAGARAGMVAVDDTTVEYLKGRPFVPTGAEWDQAVEYWKTFRSDEGAQFDRVVELDAAQIVPQVTWGTSPEMVTSIDGRVPDPEREKDPVKRDAMERALAYMALAPNTPIEAIKVDKIFIGSCTNARIEDIRAAAYVVKKLNRRVAPNVRLAMVVPGSGLVKAQAEREGLDKVFTEAGFEWREPGCSMCLAMNADRLEPGERCASTSNRNFEGRQGQGGRTHLVSPAMAAAAAIEGHFVDIRRLGXAXTHRFSGASPPRSRWRAACSAWPAATRSPAWARTSTPPPRDQARGGLTARASAPIRASILPARAAGLQSGXRIMEKFNVHTGVVAPLDRENVDTDAIIPKQFLKSIKRTGFGPNAFDEWRYLDHGEPGQDNSKRPLNPDFVLNQPRYQGASVLLARKNFGCGSSREHAPWALQQYGFRAIVAPSFADIFFNNCYKNGLLPIVLTEQQVDHLFNDTYAFNGYQLTIDLDAQVVRAPDGREYPFEITAFRKYCLLNGFDDIGLTLRHADKIRQFEAERLAKQPWLD

SEQ ID NO: 50295 - protein, 346 aa, Burkholderia mallei
MRSMNDATSESNAAGASAGLPFAGLTPERVLDALDSVLIPAGSRTDGRLLALNSYENRVYQAGIEDGAPIVAKFYRPQRWSNDAILEEHTFVAELAAREIPAVPPLAFDGRTLHEFDGFRFAIFERRGGRAPELDRRDTLEWLGRFIGRIHAVGATKPYAARPTLDLRTFGYEPRDFLMSHDFVPDDVRPAYEAAVALALEGVERAYERAGDVRMLRAHGDCHPSNVLWTDAGPHFVDFDDSRMAPAGQDLWLLLPGDRPGASRALTDLLAGYEDFCEFDPRELHLIEALRTLRLIHYAAWLARRWDDPAFPAAFPWFNTHRYWEARVLELREQIGAMQEGPLWPV

SEQ ID NO: 50296 - protein, 596 aa, Burkholderia mallei
MSVKPTLSKPIGGQDASSPAVVMRRLWPYVKPLVWVLVAGVLAMAAVAATEAGIPALLKPLLDHGFGSKGDMTTKLYVPAAVVGLALARAIAQYASGYLLQYVSNRILLDLRIQMFERMIHTGVSFFQRETASTVINAVVFEVNQVLSVLMGVTITLVRDSLTVVFLLGYLFYLNWRLTLIVAILLPCIGWLVGKINRRLRRLNREHQTLTNQLAYIVEETVGGYKVVKVHNGEPYEIGRFNELSRKLRGYSMRMTVSGGLAQPLTQFLASIALAVVLTIAVVQSANDQTTVGGFVAFVTAMLLIISPLKHLMDVNQPLQRGMTAAELIFGLIDEPREPEGGGKPLARASGAIEFSHVSFSYGMSRDGRQTLDDVSFTVAPGEMVALAGPSGSGKTTLVNLLPRFFDPSSGSVRVDGVALPEYSLRDLRNQIAMVSQDVVLFNDTIAANVAYGQAPERDRVEAALRAANLWETVTAMPDGIDTLVGDNGMRLSGGQRQRLAIARAIYKDAPILILDEATSALDSESERHVQAALETLMKGRTTLVIAHRLSTIERADRILVLEGGKIVESGSHRELLEQGGLYAHLHRIQFQQDAG

SEQ ID NO: 50297 - protein, 489 aa, Burkholderia mallei
MHTDSSFTFVLFGGTGDLSMRKILPALFEAHRANMLSEAGRIVAVARHAADREGYLQWVEEHVKPHAAKAAGGAFDEAVWRSFLERIVYVKLDLGRAEDYALLRDTVGGLSGIRVFYLATGPSLFVPICKALAAVGLNEGARIVLEKPLGYDLRSSNAINDAVGEIFAEDQIYRIDHYLGKEPVQNLLALRFGNALFEPLWRREWVESIQITIAEELGVEARGDFYDNTGALRDMVQNHLLQLLSIVAMEPPHSMDSDSVRDEKLRVLRALKPVDPRDIGKVAVRGQYHAGVIKGAQVPAYATEPGVKADSQTETFVALKVEIENWRWAGVPFFLRTGKRLADRVAEIVVNFRPVPHSALGPTALRAGANRLVIRLQPNESIRLYCLAKQPGEGMNLASVHLDLAFDQFFKEGQMEAYQRLLLDVINGRLALFVRRDEQEAAWRWVEPILNEWARTTKPPKPYAAGTWGPAAASAMLAQHGTCWLEEEN

SEQ ID NO: 50298 - protein, 154 aa, Burkholderia mallei
MPMRDASRIAPPARPVNHPGIRIMSATQPEWIAVCRLDDIPPLGARVLTREAGMPIALFRTASDAVFALLDRCPHKGGPLSQGIVHGEQVTCPLHGFNVAFSSGCALPPDEGCTSVFSVKRDGDTVLLERTELATLGVDDAAQPAALASPGAAA

SEQ ID NO: 50299 - protein, 324 aa, Burkholderia mallei
MHRFCWAAASVRVKYRAFGRRRRRPAREAGLAEIDEREFWPPRIRPARACPDASGRAAGEVRKRNDMKKLALCAALALAAGGAFAKEWKTVRIGVDASYPPFESTAPSGEIVGFDVDLAKEVCKRINAKCTWTPQDLDGIIPALKAKKFDVIVSSLTVTDKRREQIDFSDKLYDAPARMIAKAGSPLAPSVESLKGKRVGVEQGSTQETFAKAHWEPKGVTIVSYQNQDQVYADLGSGRLDATLQDELQADYGFLRTPRGKGFAWAGPAVKDPRTLGDGTAMGLRKEDADLKDAINRALASMHKDGTYDRLSRKYFPYSVYSAK

SEQ ID NO: 50300 - protein, 372 aa, Burkholderia mallei
MTVLKTTPLHAAHRALNARMVDFGGWDMPVNYGSQIEEHQAVRTDAGMFDVSHMCVVDFTGPRVRAFFEHAIANNVAKLQTPGKALYSCLLNPQGGVIDDLIVYYFTEEFFRVVVNAGTAEKDIAWFNQLNEQGGFGLTIAPRRDFAIVAAQGPNARAKVWDTVPCARAATSELKPFNAAQVAGTPFGDLTVARTGYTGEDGFEIIVPATHVEALWNALAERGVRPCGLGARDTLRLEAGMNLYGQDMDESVSPLDAGLAWTVDLSAPRAFVGRDALEAHGSRAAFVGLILQKENGRAGGVLRAHQKVATPHGEGEITSGTFSPSMQESIAFARVPKDVAIGDTVHVQIRDKQLPARVVKLPFVRNGKVLAA

SEQ ID NO: 50301 - protein, 250 aa, Burkholderia mallei
MWNNVRQLNLAASALYALLLLVLAAAGCYWLIQRPAFALREIRIDGDTEHINAPTVRAGVVGRLKGNFFTVDLDLARVAFEQMPWVRHASVRRVWPNALAVTLEEYKPLGTWGNDQLVSVDGELFTANQGELDAELPSFDGPEGSAKEVVARYRDFAKWFAPIHATPEEVTLSPRYAWTVKLSNGMQVELGRERNSDTLPDRIQRLVAAWPSVTQRWGGDIEYADLCYPNGFAIRAAGMRFLTDTDKGKK

SEQ ID NO: 50302 - protein, 578 aa, Burkholderia mallei
MKASRFFIGTLKEAPADAEIVSHKLMVRAGMIRRVAGGIYNYLPVGLRSIRKVEAIVREEMNRAGAIELLMPAVQPAELWQESGRWEQYGPELLRFKDRKQNEFVIGPTHEEVVTDIARNQIKSYRQMPVNFYQIQTKFRDEIRPRFGVMRGREFIMKDAYSFDKDHESLKESYKKMYDAYVRIFTRIGFEFRPVAADNGSIGGSGSHEFHVIADTGEDAIAYCPTSDFAANVEAAEALPLLASRAAPAEAMQKVATPGKAKCEAVAELMGIPLERTIKSIVLATDNEGAEPTIWLLMLRGDHDLNEIKTAKLPGLAGHRFATEAEIVEWFGTPPGYLGPIGTKKPVRVVADRTVANMSDFVVGANEVDYHIAGVNWGRDLPEPVVADIRNVKAGDPSPDGKGALDICRGIEVGHVFQLGTKYSDAMGATFIDESGKAQPMVMGCYGIGITRILGAAIEQNFDDKGIVWPEAIAPFEVVLCPMGYDRSDAVREAADKLYADLAAAGIDVILDDRGERPGVMFADWELIGVPHRLVIGERGLKDGKIEYQGRRDAEATLLPADSAAAAVAEKVRAALAR

SEQ ID NO: 50303 - protein, 356 aa, Burkholderia mallei
MPRPISATIHTAALANNLSVVRRHAAQSKVWAIVKANAYGHGLARVFPGLRGTDGFGLLDLDEAVKLRELGWAGPILLLEGFFRSTDIDVIDRYSLTTAVHNDEQMRMLETARLSKPVNVQLKMNSGMNRLGYTPEKYRAAWERARACPGIGQITLMTHFSDADGERGVAEQMATFERGAQGIAGARSFANSAAVLWHPSAHFDWVRPGIMLYGASPSGRAADIADRGLKPTMTLASELIAVQTLAKGQAVGYGSMFVAEDTMRIGVVACGYADGYPRIAPEGTPVVVDGVRTRIVGRVSMDMLTVDLTPVPQAGVGARVELWGETLPIDDVAARCMTVGYELMCAVAPRVPVRAE

SEQ ID NO: 50304 - protein, 524 aa, Burkholderia mallei
MLGLVRPEWPPCDARSFDRPGRRASGPSGESRAAEPPRARRTCLRRVRPVRHSRGLPARVPLLSLRFAPHRRAAAGLPPRAGKRTGMPRERPSKPAGKPTPVGPATPPRAARRRPSGQRGGPPRRVRRKPAARGVKYALSLPPDPFMTLASTPDIIAELKAGRMVILVDEEDRENEGDLVLAAEFVTPEAINFMARYGRGLICLTLTQERCKQLNLPLMTYRNGTQYGTAFTVSIEAAEGVTTGISAADRARTIATAVAHDVRPEHIVQPGHVFPIMAQPGGVLVRAGHTEAGCDLTALAGLTPAAVICEIIKDDGTMARLPDLLEFGKEHGLKIGTIADLIHYRSRTESIVERVAERTMQTAHGPFKTVLYRDHPTGSPHIALVRGTPTPNDETPVRVHEPLSVLDLLETGVSTHSWTLDAAMKEIAARELGVIVLLNCGDTKEHLVDVFLAFDEKEKAAELKRRPVDFKTFGIGAQILRDVGVGRMQVLSNPRKLGSMSGYGLEVTGFAPMPGSAAPASGAA

SEQ ID NO: 50305 - protein, 410 aa, Burkholderia mallei
MSKDYKDLLVALDIGTSKVVAVVAELKGEGHYEVIGLGQSESKGLKKGVVVNIEATVQSIQRALEEAELMADCKITNVFTGIAGSHIRSFNSSGMVAIKEKEVTQTDVARVIETAKAINIPTDQQVLHILTQEFIIDGQEDVREPIGMSGIRLEVKVHIVTGAVSAAQNIVKCVRRCGLEVNDLILQPLASSLAVLTEDEKDLGVVLVDIGGGTTDIAIFAEGAIRHTAVIPIAGDQITSDIAMALRTPTPDAEDIKVGYGIAKQALADPDEMVEVPGLGERGPRTLSRQALAAVIEPRVEELFSLVQQVVRESGYEELLSSGVVLTGGAAMMPGMVELGEDIFLKPVRIGAPEYAGGLSDVVRNPRYSTAMGLLVEGSAQRMRGRKVAVQSGSAGQIFSRMKEWFLSNF

SEQ ID NO: 50306 - protein, 297 aa, Burkholderia mallei
MLDYALLDALAEVIRHGSFERAAKALNVSPSAVSQRVKLLEERVGSVLVKRGQPCVATTSGALLCRHTERVRMLEAELSGHMPAFAGAQAAAWPTLRVAVNDDSVATWFVDAVGPFCAQSGTLLDLVIDDQDYTAERIRDGSVQGAVTALAEPIQGCRSTRLGRMRYHAVCSPAFHARYFGNGVNRDALRRAPCVMFNPKDSLQARFIRRATRVDLDPPQHWIPHVAGYLRACEAGLGWGMCPERMVERQIAEGGLIDLSDGRSIDIELYWQSWRLSIGWLDEFSAALKASAAQYLD

SEQ ID NO: 50307 - protein, 296 aa, Burkholderia mallei
MNNETVAALAARALSVGYRDHRVLDGLDLTIAVGRVTALCGPNGCGKSTLLRTLAGLQPALSGTVDVNGAPLGSYRRRALARTLTMLAQFNQIPAGLTVRELVAYGRYAHGGWLRGLARADRDAIDEALAATGLEPDAARDVAALSGGERQRAWIAMALAQQAPIVLLDEPTTYLDIHHQLDILRELRRLNRARGLTIVWVLHDLNQAAAYSDEIVLMRAGRIVAQGTPDAMLEPRHLQAAFGVTMLKTAHPLTGAPMCVPAYEGVLDTDHADPAHAAAPGGRGAAVARARRDLAA

SEQ ID NO: 50308 - protein, 375 aa, Burkholderia mallei
MLLKNQDRQLPLDAAGLKRIAVIGGHADAAVLAGGGSGNTRHPVTGAFPGCGGLTFPTTTGCNWWPNPWLKLDVPIVQAIRDLAPGATVAFAGNSDRQSPFAAYTPQQIDAAADLARRSDVAIVFVTQAAGEDFGELRSLALANPTNQDALVQAVAQANPRVIVVVESGNPVLMPWRDQVPAIVQAWFPGEGGGNAIANVLFGKVNPSGKLPVTFPARDEDTPTWGADGTLAPNPVYSEKLKIGYRWYDAHRIAPMFPFGHGLSYTHFSYSGLEVKQRPDAATTVSFALTNDGPVAGAEVPQVYLGDLDDPQEPPKRLVGWDKVGLRAGETRRVRIVIPAEMRRVWDASRNGWALAKGERIYVGASSRDIRLQQP

SEQ ID NO: 50309 - protein, 175 aa, Burkholderia mallei
  MISC_FEATURE (36)..(36): X=any amino acid
MAHPGSTAPARAVPPAPPRLARRVGGHRARRRDEPXPRSATRPIAAFSRRSRASAAFARAARSPVATRARATRRRTSSASGPRPAAAAPAPPSHVTLNQATSHRAAPRHARSNSNTSARSPRSNTTRPTSAIRAPSPAASISPLTTTHPRATCTYARRPAGSANSARSSPSTRPA

SEQ ID NO: 50310 - protein, 115 aa, Burkholderia mallei
MSAACSPIDLSGMRASADAACALLKVLSNPDRLLMMCELAQCGELCVSDIEARLDIHQPTLSQQLGVLREHALVDTRRDGKNIYYALTSEPAVAIMAVLYEQFCATHQKGKRRGR

SEQ ID NO: 50311 - protein, 294 aa, Burkholderia mallei
RDTRGRTEADMKPRYERVAIPDGCSVRVYRRRLAQIPFEWHHHPEYELTLTLNSLGKRFVGDHVADYAGDDLVLVPPNLPHTGVSDERLDPGEPLVALVLWFDGDWAQRVADCCPEFAGLRTLLRRAAPGLAFAPQAAADVRARLPALVDRAPRVRLAAALDVLACLADAPATPLATAAAYRAASGAALAPEAERLDRVLDLLDRRFHEPLRVAELAALAHLSERSLQRRFARHVGESIGSYLQRLRLSHAARLLASTDWPVSLVATRSGYANLANFNRQFLAARRVTPRAYRR

SEQ ID NO: 50312 - protein, 164 aa, Burkholderia mallei
MKVAIGCDEAAYALKESIKRHLRATHPELELVDFGTHSADEAVLYPDIAIEVAQRVAAGEFPRAILLCGTGIGVAISANKVPGIRAAQCHDTYSAERARRSNDAQIVTMGARVIGTELANSIVDAWLRAEFDGGRSQPKVQRIADYERRAGLTQAGPNDAHRGS

SEQ ID NO: 50313 - protein, 437 aa, Burkholderia mallei
MPLPTVPTAPFCPAEVKGSIAIDAGVSRLTKLRRFAGPGLLVAIGYMDPGNWATDIQAGSQFGYALLWVVVFSSVAAIFLQTLAARLGLVAGRDLAQASYDRYGPFGRIVQWITAEVSIIACDIAEVLGCALAFKLLLGVPLAWGIVLTALDTMIVLGLQGKGFRQVEAIVFGLIGTMAFCFVAQVAMVPPDWRAVLHGLAPSVPGHDRKDAIVLALGIVGATIMPHNLYLHSSVVQTRRVVGGAGDAIKETLAMVRIDTWISLVVAMLVNAAILVLAGAAFHATGQTGVADIEQAYRLITPIVGGAAAWLFGIALLASGQSSTLTGTIAGQVIMDGFLHMKMPCYQRRLITRGLALAPALTGVLWLGDGALGQLLVWSQVLLSLQLPFAMWPLIRSVGDRSIMREYAIGRGTKVVAWTLFVLVSITNLVLVTGFVG

SEQ ID NO: 50314 - protein, 261 aa, Burkholderia mallei
MSTLTHSLKARLRDGDEPLFGLWLTLASEAATEALAHAGFDWLCIDMEHAPNDSRDVAAQLRALAAAHLPSEPVVRVPAREPWFVKRALDAGARTLMFPGVETADEAAHAVRLTRFQAPDAPDGLRGVAGIVRAAAYGMRRDYVQTANAQIATIVQIESARGVDEAERIAATPGVDCVFVGPADLSASLGHLGDTKHPDVAAALEHVLAAGRRAGVPVGIFAADTAGARQSLEAGFRVVALSADVVWLLRATRQALQEVRG

SEQ ID NO: 50315 - protein, 256 aa, Burkholderia mallei
MAKIFCVANQKGGVGKTTTTVNLAASLAAQGQRVLLIDLDPQGNATMGSGIDKAECESTVYEVLVDGVTVADARVRPEAVKYDVLPANRELAGAEIELVSVENRERQLKAALAKVADDYDFVLIDCPPALSLLTLNGLCAAHGVVIPMQCEYFALEGLSDLVNTIKQVHANLNRDLKVIGLLRVMFDPRITLQQQVSDQLKAHFGDKVFDAVIPRNVRLAEAPSYGLPGVVFDRGSRGAQAYIQFGAEMIERVRAL

SEQ ID NO: 50316 - protein, 865 aa, Burkholderia mallei
MRIDKLTTKFQEALSDAQSFAAGRDNQYIEPVHVLAALVAQQDGSARSLLSRAGVHIQALQGALNEAISRLPQVTGTGGDIQVGRELAGLLNQADKEAQKLNDTFVASEMFLLAVADDKGEAGKLARQHGLTRRALESAIAAVRGGSQVHSQDAESQREALKKYTVDLTERARAGKLDPVIGRDDEIRRSIQILQRRTKNNPVLIGEPGVGKTAIVEGLAQRIVNGEVPETLKNKRVLSLDMAALLAGAKYRGEFEERLKAVLNDIAKDEGRTIVFIDEIHTMVGAGKAEGAMDAGNMLKPALSRGELHCIGATTLDEYRKYIEKDAALERRFQKVLVDEPSVEATIAILRGLQEKYELHHGVEITDPAIVAAAELSHRYITDRFLPDKAIDLIDEAASRIKMEIDSKPEEMDKLDRRLIQLKIEREAVKKEPDEASQKRLALIEEEIERLGREYADLDEIWTAEKAAVQGSAQLKEEIDKVRADIARLQREGKLEKVAELQYGKLPQLEARLKQVTQAEESEQHNPTRPRLLRTQVGAEEIAEVVSRATGIPVSRMMQGEREKLLHIEEKLHERVVGQNEAIDAVADAIRRSRAGLADPNRPYGSFLFLGPTGVGKTELCKALAGFLFDSEEHLIRIDMSEFMEKHSVARLIGAPPGYVGYEEGGYLTEAVRRKPYSVILLDEIEKAHPDVFNVLLQVLDDGRMTDGQGRTVDFKNTVIVMTSNLGSQLIQSMSGSSQEEIKDAVWVEVKQHFRPEFLNRIDDVVVFHSLDRGNIQAIAKIQLARLHDRLAKLDMALDVSEAALEQIGKVGYDPLFGARPLKRAIQQEIENPVAKLILAGRFGPKDVIPVDMQDGRFVFERVVH

SEQ ID NO: 50317 - protein, 232 aa, Burkholderia mallei
MTVQQRRRPPIASRETLQALLSEGAQALGVALSDAQRGALLDYVALLAKWNAVYNLTAIRDPRQMLIQHILDSLSIVPHLGAHGAAAAALDVGSGGGLPGVVLAIALPGWRVTLNDIVHKKSAFQNQAKAELKLGNLSVVTGRVETLRPGADVPAKFDVIVSRAFADLADFVTLARHLVAPGGSIWAMKGVRPDEEIGRLPDGARVKQMIRLTVPSLDAERHLIEVELDEAI

SEQ ID NO: 50318 - protein, 284 aa, Burkholderia mallei
MNLAGFEVGLDKPFFLIAGTCVVESEQMTIDTAGRLKEICATLGVPFIYKSSYDKANRSSGKSFRGLGMDEGLRILAEVKRQLNVPVLTDVHEIDEIAPVAAVVDVLQTPAFLCRQTDFIRACAQSGKPVNIKKGQFLAPHDMKNVIDKARDAARDAGLSEDRFMACERGVSFGYNNLVSDMRSLAIMRETGAPVVFDATHSVQLPGGQGTSSGGQREFVPVLARAALATGVAGLFMETHPNPAEAKSDGPNAVPLGRMAALLETLVTLDRAVKRVPFLENDFN

SEQ ID NO: 50319 - protein, 134 aa, Burkholderia mallei
MELKLLNSNGQEGAVVNASDVVFGRDYNEALIHQVVVAYQANARQGNRAQKDREQVKHTTKKPWRQKGTGRARAGMSSSPLWRGGGRIFPNSPDENFSHKVNKKMHRAGLCSIFSQLARESRLSVVEDIVLEAP

SEQ ID NO: 50320 - protein, 131 aa, Burkholderia mallei
MRHRHGLRKLNRTSSHRLAMLRNMSNSLIEHEVIKTTLPKAKELRKVVEPLITLGKKPSLANRRLAFNRLRDRDSVAKLFDVLGPRFANRPGGYLRILKFGFRVGDNAPMALVELLDRPEVEETENVQEAE

SEQ ID NO: 50321 - protein, 208 aa, Burkholderia mallei
MEKHMKVVAFERQQQGTGASRRLRNAGKTTGIVYGGEAAPQMIELDHNALWHALKKEAFHSSILDLEVAGKSQRVLLRDVQYHPFRQLVLHVDFQRIDPKKKLHTKAPLHFLNAETSPAVKLSSAVVSHVVTEIEIECLPADLPEFLEVDLSKIEAGQSLHAKDIALPNGVALTAHVDAENPVIASATIPAGAVSDEAAAGEGETPAA

SEQ ID NO: 50322 - protein, 363 aa, Burkholderia mallei
MTNRNDETQQMTAIVCHAPEDYRVERVAKPRANARELVIRIGACGICASDCKCHAGAKMFWGGPSPWVKAPVIPGHEFFGYVEALGEGAAEHFGVALGDRVIAEQIVPCGTCRYCKSGQYWMCEVHHIFGFQREVADGGMAEYMRIPSGAIVHPIPLGISLEDAAIIEPLACAIHTVNRGDIQLDDVVVIAGAGPLGLMMTQVAKLKTPRRLVVVDPVEARRALARAYGADVTIDPAREDAPAIVRALTGGYGCDVYIETTGVPAGVTQGMALIRKLGRFVEFSVFGKDTALDWSIIGDRKELDVRGAHLGPYCYPVAIDLLARGLVTSKGIVTHGFSLDEWDEAIRVANSLDSIKVLMKPRG

SEQ ID NO: 50323 - protein, 955 aa, Burkholderia mallei
MSDTTLAKSFEPQTIESQWGPEWEKRGYATPALDPSRPDFSIQLPPPNVTGTLHMGHAFNQTIMDGLVRYHRMLGHNTLWVPGTDHAGIATQIVVERQLDAQGVSRHDLGREKFVERVWEWKERSGSTITGQVRRIGASPDWSREYFTMNDKMSEAVREVFVRLYEQGLIYRGKRLVNWDPVLLTAVSDLEVVSEEENGHLWHIRYPLADGSGHLSVATTRPETMLGDVAVMVHPEDERYRHLVGRHVKLPLCEREIPIIADDYVDREFGTGVVKVTPAHDFNDYQVGLRHALAPIEILTLDAKINDNAPAAYRGLDRFDARKAIVDELDAQGLLESVKPHKLMVPRGDRTGVVIEPMLTDQWFVAMTKPAPQGTFHPGKSITEVSLEVVRRGEIKFVPENWTTTYYQWLENIQDWCISRQLWWGHQIPAWYGENGEIFVARNEEDARAQAAAKGYTGALKRDDDVLDTWFSSALVPFSSLGWPNETPEMKHFLPSSVLVTGFDIIFFWVARMVMMTTHFTGKVPFGTVYVHGLVRDAEGQKMSKSKGNTLDPIDIVDGIGLDALVAKRTTGLMNPRQAATIEKKTRKEFPDGIPAFGTDALRFTMASMATLGRNVNFDLARCEGYRNFCNKLWNATRFVLMNCEGHDCGFDKPEVCGAGDCGPGGYLDFSPADRWIVSLMQRVEADIAKGFADYRFDNIANAIYKFVWDEYCDWYLELAKVQIQNGTSEQQRATRRTLLRVLETVLRLAHPIIPFITEALWQKVAPLAGRYPAGKAEGEASLMVQAYPVAEPKKLDEACEQWAAELKAVVDACRNLRGEMNLSPATKVPLLAAGDAAQLQAFAPYVQALARLSEVRVLPDEAALDADAHGAPIAIVGGNKLVLKVEIDVAAERERLSKEIARLEGEIVKCNAKLGNEAFVAKAPPAVVAQEQKRLAEFQSTLTKLGAQLARLPA

SEQ ID NO: 50324 - protein, 148 aa, Burkholderia mallei
MNHETKTLPIVYSCSGCSNVAQLANHVAVRLDRGGDAEMSCIAGVGGDVPSLLKIAHSGRPILAIDGCPLVCAKKSLERHGIAPDAHLQLGEHGVRKRFHEDFAPGDASRILAIAKAEAARLAGSRPAPEPEHAQAGEDAGAALERKR

SEQ ID NO: 50325 - protein, 343 aa, Burkholderia mallei
MKALAKLERGPGLTLTRVKKPEVGHNDVLIKIRRTAICGTDIHIWKWDDWAQKTIPVPMHVGHEYVGEIVEMGQEVRGFSIGDRVSGEGHITCGFCRNCRAGRRHLCRNTVGVGVNREGAFAEYLAIPAFNAFKIPPEISDDLAAIFDPFGNATHTALSFNLVGEDVLITGAGPIGVMAVAIAKHVGARNVVITDINDYRLELARKMGATRAVNVSRESLRDVMADLHMTEGFDVGLEMSGVPSAFTSLLESMNHGGKVALLGIPPAQTAIDWNQVIFKGLEIKGIYGREMFETWYKMVAMLQSGLDLSPIITHRFAVDDYEKGFAAMLSGESGKVILDWADA

SEQ ID NO: 50326 - protein, 79 aa, Burkholderia mallei; identical to SEQ ID NO: 47901

SEQ ID NO: 50327 - protein, 135 aa, Burkholderia mallei
MTFFTDYTNLALIAILVVSGSLLAWPALRRGGGGLSAAEATQLINRRNALVVDLRPAAEYGAGHLPSARSVEFGELQAKAGQLAKNKATPVLLVCQNGQQSQKARKIVEEAGYQDVHVLQGGVAAWQQAGMPVVK

SEQ ID NO: 50328 - protein, 185 aa, Burkholderia mallei
MSDTSASPSGKRWYVVHAYSGMEKSVQRALQERIERAGMQDKFGQILVPTEEVVEVKGGHKAVTERRFFPGYVLVEMEMTDETWHLVKNTAKVTGFVGGARNRPSPISPREVEKIMSQMQEGVEKPRPKTLFEVGEMVRVKEGPFTDFNGTVEEVNYEKSRVRVSVTIFGRATPVELEFGQVEKV

SEQ ID NO: 50329 - protein, 437 aa, Burkholderia mallei
MRKPIDSLFGRLALLVVCVLLLSHFAWYFAIRLERNQFQTRYAVEEAAFLVDAVRQHAERSPDQPLPSRVRLVAPGSGDVPEAKQDLPPSLKRFADELRERLPAGTQVRIGRPSHPPVLWVKQPSDRDWIVVPVQPLRPPRSLDRMVLWLVMIFSAAVMAALFAAWQLQQPLSSLARAVARFGRGMAVPPLPERGPRELRQLTHGFNQMVQQVSRAENDRAVMLAGVAHDLRTPLARMRLRAEMMDDARLRDGVVRDVDSMTHIVDQFLVFAHGDADRSEAVPVDQACERIARTYRAVSPNAPTVRTELAAGPGFRLPAATLDRVLSNLLDNAHAYGAPPVVIATARTATGYTLTVSDHGKGIAPRDLADATRPFVRLDPARGGNGHSGLGLAIVERLVQRTGGACEIGNREEGGLRVAMTFAFDVVPKAEPQTEAP

SEQ ID NO: 50330 - protein, 109 aa, Burkholderia mallei; identical to SEQ ID NO: 47531

SEQ ID NO: 50331 - protein, 398 aa, Burkholderia mallei
MEFEMLETETNGTIIKVIGVGGAGGNAVQHMINKGVQGVDFVVMNTDAQALSRSRAPSVIQLGNTGLGAGAKPEMGRAAAEEARERIADALRGAHMVFITAGMGGGTGTGAAPVVAQIAKEMGILTVGVVSKPFEFEGGKRMRVAEAGSQQLEDHVDSLIVVLNDKLFEVMGDDAEMDKCFQCADDVLNNAVAGIAEIINVDGLVNVDFEDVKTVMGEQGKAMMGTATVAGVDRARLAAEQAVASPLLEGVDLSGARGVLVNITSSRSLRLSETREVMNTIKSYAADDATVIFGAVYDDAMGDALRVTVVATGLGRAAKKQQSAPMTLLRTGTDNQPISAAPQGYAASHHVSTGDYGAFDTPAVWRNSRETAASHVQALQEKGVDTYDIPAFLRKQAD

SEQ ID NO: 50332 - protein, 321 aa, Burkholderia mallei
MNIHRLPMLNALRVFEAAARHESFSRAADELSVTHGAVSHQMRALEAELGVPLFVRHGKRLALTDAGGRYAQQVRAALALLADATREVRASERDKRLVVSTLPSFAARWITPRIGPFIERHPEIDLELRASDSLVDFARDDVDVAIRFGHGVYPGLHVEPLLDETFFPVCAPTLNGGMLPETPADLVRYPLLRSDDELWRPWFDAAGLDTLTEPKRGVLYQDSSNLLQAAIDGQGIALVRRSLAVPEVAAGRIVRLFDIAGPSPWHYFFVCPPSLAQTPRVQALRSWLLDEIARFRALCAAQEAQHTAAYAAARARGKEEN

SEQ ID NO: 50333 - protein, 460 aa, Burkholderia mallei
MVGLLNKLLDVALVAVGALLAQMLYDGGLFDVSDAQRTAIALLCALTLLVFAAIGVYDGAREQMSYRTLSRVLLGWLGVAAAAAAFTLLLQRDADVSLAWLGRTMLMSGAVLLLGRASIHGVLNGLRRTGAKPRAVAIVGSEVYGRAVIEQLRASSLHGYEAVCVFDDSARAADAELRVGGVPVVSDLREFKCRVRAGAIKEIWLALPLSHERRIQRIVREFRHDFVNLRFLPDVRGITFFNRSVAQVAGMPAINLATSPLSIPQLWPKFIFDRLFALAVLIPLSPILAALALAVKLSSPGPVLFRQKRKGVDGREFEILKFRTMRVHAEETGVVRQASRNDSRITKVGAFLRRTSLDELPQFFNVLFGQMSVVGPRPHAIEHDDLYKELVDGYMYRYRVRPGITGWAQVNGYRGETRKVEKMAARVKFDLFYMQNWTFWFDIKIILITLVKGFVGRNAF

SEQ ID NO: 50334 - protein, 262 aa, Burkholderia mallei
MNALGTNVMEIDLNADLGEGCGSDEALLDLVTSANIACGWHAGGAQAMRDCVRWAVEKGVSIGAHPSFHDPENFGRKEMDLPASEIYAGVLYQLGALSAIAQAEGGRIAHVKPHGALYNQAAREPEIADAVVSAIHDFDPSLAVFGLAKSGFVDAAQQAGLVAVEEVFADRGYRADGSLVPRSQPGALVDDENEMLARTLEMVRGQRVRAVTGEWVPLNAQTVCLHGDGPHALAFAKRIRDALEAAGIDVHAPGALHAGERA

SEQ ID NO: 50335 - protein, 184 aa, Burkholderia mallei
MLNEVRDASCEAHRFWRLTVPLNREDKQAVVAEVAAQVAKAQTVVLAEYRGIAVGDLTTLRAKAREQKVYLRVLKNTLARRAVEGTPFAPLAEQMTGPLIYGISEDAIAAAKVVHDFSKSNDKLVIKAGSYDGKVMDKAGVQALASIPSREELLSKLLFVMQAPVSGFARALAALAEKKQAEAA

SEQ ID NO: 50336 - protein, 390 aa, Burkholderia mallei
MSETKEAAATGAAGGFKPKKSVALSGVAAGNTALCTVGKTGNDLHYRGYDILDIAGSSEFEEIAHLLVHETLPNVTELAAYKAKLRAMRGLPANVKAALEWIPASAHPMDVMRTGVSVLGTVLPEKDDHNLPGARDIADRLMASLGSMLLYWYHYSHNGRRIETETDDDSIGGHFLHLLHGKTPSKSWIDAMHTSLILYAEHEFNASTFTARVIAGTGSDMYSSITGAIGALRGPKHGGANEVAYEIQNRYRTPDEAQADIRRRVENKEVVIGFGHPVYTISDPRNKVIKEVARKLSKEAGDLKLFNIAERLESVMWEIKKMFPNLDWFSAVSYHMMGVPTAMFTPLFVIARTAGWSAHIIEQRVDNKIIRPSANYTGPEDLKFVPIEKR

SEQ ID NO: 50337 - protein, 526 aa, Burkholderia mallei
MSPVSAFKLVLLSFLAIVALELLAKRLRLPPAAALLVGGAGIAFLPGLPPVNLDPDLVLIVFLPPLLMDGAYFSVWEEFKRNVGGIMMLAIGAVAFTTLAVGVAVHLVAPGLPWAACFALGAIVSPPDAVAAKAVLERVALPRRLMVLLEGESLLNDAAGLVLFRFAVAAALTGAFSTGDAVVRFAQLGVGGVAVGFIVGWLIVRFLKLVEDDYLVITVAVLAAWISYIAGELFEVSGVIATVTTGMMLGWHQHEVFSASVRNRGTAFWQVIVFLLEALVFVLIGLSLRGVIERLGGLGEVFATMTPAVAAVVAAVVASRFVWVFAVELLKAPVARLRGRGPRGDWKAATVMGWAGMRGVVTLAIALSLPDAMPGRDLILVAAFAVILVTVLLQGTTIGPLIRLLKLRDPGPAAHHLTEPQTWARVEAAQLSAIQPLVHDAEGNVIHPRLLEQYTYRASVTARHQDEPAFPQRERDAHYDVVLAAIAAGRAELLRLHRGGQIHDEMLYLLERDLDLQEIAAQHAKG

SEQ ID NO: 50338 - protein, 506 aa, Burkholderia mallei
MREARVRAAFLHVPACEENIMAEVTQEQGVAAKSAANKLRLGALTALVVGSMIGGGIFSLPQNMAATAEAGAILIGWAITAIGMLTLAFVFQTLANRKPQLDGGVYAYAQAGFGDYMGFSSAWGYWISAWLGNVGYFVLLFSTLGYFFPVFGEGNTPAAIAGASVLLWAVHFLVLRGIREAAFVNLVTTVAKIVPLVVFILIGFFAFKLDVFRTDIWGRANPSLGSVMNQVRNMMLVTVWVFIGIEGASIFSARAEKRSDVGRATVIGFVGVLLALVLVNVLSLGIMTQPQLAKLQNPSMAAVLEHVVGHWGAVLISVGLVVSLAGALLSWVLLCAEIMFSAAKDRTMPAFLRKENANHVPANALWLTNAMVQVFLLITLFSQSTYLSLIYLATSMILIPYFWSAAYALLIAVRGETYEGDARARRKDLFVAALAVLYAVWLLYAGGLKYLLLSALLYAPGALFFAKAKRELGKPVFTAAEKLIFAAAAAAALAAAYALHSGLITL

SEQ ID NO: 50339 - protein, 449 aa, Burkholderia mallei
MQVTVNEHDAVECVATATPAGNREAHAHGTDKLAIEGGRRLAGEIAVSGAKNAALPILCAGLLSAEPVRLDNVPDLKDVRTTLALLGQMGMREETDGARVVLDASRVDNPVAPYELVKTMRASILVLGPLLARFGYAKVSLPGGCAIGARPVDQHIKGLQAMGAEIHIEHGYIEARAKRLSGARIVTDMITVTGTENLLMAATLADGETVIENAAREPEVTDLAHLLVAMGAKIDGIGTDRLVIQGVERLHGATHAVIPDRIEAGTFLCAVAAAGGDVTLTGMRAHILDAVIDKLREAGATIDEGVDTLRVRMDGRPSAVAIRTSEYPAFPTDMQAQFMALNAVAQGAAQVTETIFENRFMHVQELNRLGANIAVDGNTALVTGVPKLSGASVMATDLRASASLVIAGLCAQGETLVERIYHLDRGYDRMETKLTAVGANVRRISGSEA

SEQ ID NO: 50340 - protein, 89 aa, Burkholderia mallei
MSVADIKKSEVVAQFARGANDTGSPEVQVALLTARITELTGHFKTHAKDHHSRRGLLRMVSRRRKLLDYLKGKDADRYRALIEKLGLRK

SEQ ID NO: 50341 - protein, 573 aa, Burkholderia mallei
MNATNRFKSTVLAALVSSALAGFLPSAPAHAKGPQQRVVLDGSAVAVADKYSADAAEEIFRQGGNAVDAAVAIAFTLAVTYPEAGNIGGGGFMTVYMGGKPYFLDYRERAPLAATKDMYLDKDGNVVKGMSLYGDRAVGVPGTVAGMWEAQKRFGKLKWKQVIAPAIRYARDGFVVDEQLAQRGVDASKEFGGKTNFDQYFSGLKAGATFKQPELAAVLARIANDGAKDFYDGKTADLIAASMKKGGGLITKQDLVQYKAVWRQPVQANWNGYRVITAPPPSSGGIGLVQLLTMKADRKADFDGVALNSPQYVHLIAEIEKRVFADRAQYLGDPDFYKVPVAQLTDAAYIAKRAAEVNPEKPSDTKSVLPGLGTSMPEKAETTHFSVVDKWGNAVSNTYTINGYFGSGVVAEGTGIVLNDEMDDFSAKPGVANMFGVVGSDANAIEPKKRPLSSMSPTVLTKDGKVALVIGTPGGSRIFTSIFQVITNLYDFKMPLKDAVGAMRFHHQLLPPNTIFWEPYHSIDGELAKGIEAKGYTLKGQDFSGDIQAIRIDGKTPEAVSDPRGRGVSRVIR

SEQ ID NO: 50342 - protein, 241 aa, Burkholderia mallei
MDSDEMLLLAVLRPVELDVDRELRLLLVVLSPVDSEPMPVDVEVDSDVIALLADDSPVDADVDNDATLLLVVLNPVDSEPIPVDVEVDSDVIALMADDSPVDADVDSDATLLLVVLSPVDSEPMPVDVEVDSDVIALLADDSPVDADVDNDATLLLVVLSPVDSEPMPVDVEVDSDVIALLADDSPVDADVDNDATLLLVVLNPVDNEPMPVDVEVDSDVIALLADDSPVDADVDSDVSCS

SEQ ID NO: 50343 - protein, 513 aa, Burkholderia mallei
MQLNPSEISELIKSRIQGLEASADVRNQGTVISVTDGIVRIHGLSDVMQGEMLEFPGNTFGLALNLERDSVGAVILGEYEHISEGDIVKTTGRILEVPVGPELVGRVLDALGNPIDGKGPVNAKLTDAIEKIAPGVIWRKSVSQPVQTGLKSIDSMVPIGRGQRELIIGDRQCGKTAVAIDTIINQKGKDLICIYVAIGQKASSIMNVVRKLEETGALEYTIVVAASASESAAMQYLAPYAGCTMGEYFRDRGQDALIIYDDLTKQAWAYRQISLLLRRPPGREAYPGDVFYLHSRLLERAARVSEEYVEKFTNGEVKGKSGSLTALPVIETQAGDVTAFVPTNVISITDGQIFLETDLFNAGIRPAINAGVSVSRVGGAAQTKVVKKLSGGIRTDLAQYRELAAFAQFASDLDEATRKQLERGRRVTELLKQPQYQPLQVWELAVSLFSANNGYLDDLDVKDVLPFEKGLREYLKTSHADLIKRIEDTKDLSKDDESALHAALKDFKKSGAY

SEQ ID NO: 50344 - protein, 646 aa, Burkholderia mallei
MIRFNQFSLARGTKPLFDATSFTLNPGEKAGLVGANGAGKSTLFAVLRGELHADAGDFSMPPAWRIAHVSQETPAVERSALDYTLDGDAALRAIEARIAQASAAHDGAAEADAHAAFADADGYTAPARAEALLLGLGFTLAQTREPVASFSGGWRMRLNLAQALMCRSDLLLLDEPTNHLDLDAIVWLEDWLHRYPGTLVIISHDREFLDAVCDVTLHLENRQVKRYGGNYSQFEVLRAQQLELQQSAYEKQQKTIAHLQSFVDRFKAKASKAKQAQSRVKALEKMERIAPAHIASPSTFEFRTPDSAPNPMLVMENVRCGYRADDGGEIPIVERVALSIQNGQRIGLLGANGQGKSTLIKTLAGTLAPLSGELRTGRGLTIGYFAQHQLETLREDDSALAHLARLAPDTREQELRDFLGGFNFSGEMATAPIAPFSGGEKARLALALIIWRKPNLLLLDEPTNHLDLETRHALTMALAQFEGTLILVSHDRHLLRATTDQFMLVAKHRLQPFDGDLDDYRDWLLQHAAEQRAAAKAACGPAGDADGGAPAVNRKDQKRQEAEARQRLSQLKKPLQARITKIEKEMERLHAQKAELDAFVADPASYAADQKTRLTEAIRKLGDVNGQLETLEADWLGAQDELEKIG

SEQ ID NO: 50345 - protein, 342 aa, Burkholderia mallei
MKLPPGPVMLDVAGTTLTRDDARRLAHPHTGGVILFARHFESRAQLVALTEAIRAIRDGILIAVDHEGGRVQRFRTDGFTVLPAMRRLGELWDKDVLHATKAATALGYVLASELRACGIDMSFTPVLDLDYGRSKVIGDRAFHRDPRVVALLAKSVNHGLALAGMANCGKHFPGHGFAQADSHVALPTDDRPLDEILANDAAPYDWLGLSLSAVIPAHVIYTQVDSKPAGFSRVWLQDVLRGRLRFAGAVFSDDLSMEAAREGGTLAQSAQAALEAGCDMVLVCNQPDAAERVLDELRTTASRESSRRIKQMRPRGKALEWRKLMREPRYLNAQSLLRSTFA

SEQ ID NO: 50346 - protein, 336 aa, Burkholderia mallei
MTIRVAINGYGRIGRNTLRAFYENGKKHDLEIVAINDLGDAKTNAHLTQYDTAHGKFPGEVSVDGDYLVVNGDRIRVLANRNPAELPWGELGVDVVMECTGFFTSKEKASAHLKGGAKKVIISAPGGKDVDATIVYGVNHDVLKAEHTVISNASCTTNCLAPLVKPLNDKIGLETGLMTTIHAYTNDQVLTDVYHEDLRRARSATHSQIPTKTGAAAAVGLVLPELNGKLDGYAIRVPTINVSIVDLSFIAKRDTTAAEVNAIMKEASEGALKGILGYNDAPLVSIDFNHNPASSTFDATLTKVSGRLVKVSSWYDNEWGFSNRMLDTAIALANAK

SEQ ID NO: 50347 - protein, 468 aa, Burkholderia mallei
MTMLTLREAAAMIPGATVLGDERASFERVSTDSRSAGPGDLFVALKGERFDAHDFVGDVAARGASAAIVSRSPAEWNLPALKVADTRAALGALAHGWRMRFSMPLVAVTGSNGKTTVKEMIASIFAAAVGEHARLATAGNFNNDVGLPLTLLRLNAAHRLAVVELGMNHPGETEMLAKIAAPTVALVNNAQREHQEFMATVEAVALEHAAVIHALGPDGVAVFPADDAYAGIWRVAATGNRIVDFALHGAAGGAPAAVTGALDGSLLAIDTPGARIDVRLNALGEHNARNALAATAAALAAGVPLAAIKAGLEAFAPVKGRLQVARAAAGSLAGATVIDDTYNANPDSMRAAIDVLAAQSAPRVLVIGEMGEVGDEGPAFHREIGAYARERGIDALFALGAATRPACDAYGAGARHFDDAAALVAALLAANFGAHATLLVKGSRFMKMERVVDALANETASGAAPGAH

SEQ ID NO: 50348 - protein, 86 aa, Burkholderia mallei
MNKVVMYSTQVCPYCMQAERLLKLRGVEHIEKVLIDKEPERRAEMMERTGRRTVPQIYIGDTHVGGYDDLSKLDREGGLKPLLEAA

SEQ ID NO: 50349 - protein, 381 aa, Burkholderia mallei
MLASSMIAFSSARFGAYFCARRARFFSRSISASLATVTSVSERELEAGEQSLRFVVGLRGRHDADVQPTQRVDLVVIDFGENDLLFHTDVVVAAAVESTTRHAAEVAHAGQGNRHETIEEFIHRAATQRDHRADRVALTDLEARDCLASLRHDGLLARDLRQIAHGVLDDLLVGNRLAKTHVQGDLGDARHFHDRLVAELLDQAGNNLLFVKLLKTCHFSTPQRQALSTAPVVFRKRTFLPSSTLMPTREALPFASTSATFEICSGIVFASTPPVVPFIGFGFTCFLTRLIPSTVTCSAPTASTTPRLPLSLPVMTMTSSPLRILFIATPYSTSGASDTIFMNRSLRSSRVTGPKIRVPIGSSLLFKSTAALPSNLISEPS

SEQ ID NO: 50350 - protein, 103 aa, Burkholderia mallei
MQQQKIRIRLKAFDYRLIDQSAAEIVDTAKRTGAIVRGPVPLPTRIQRFDILRSPHVNKTSRDQLEIRTHQRLMDIVDPTDKTVDALMKLDLPAGVDVEIKLQ

SEQ ID NO: 50351 - protein, 150 aa, Burkholderia mallei
MQIILLEKVANLGNLGDIVKVKDGYARNFLIPNRKARRATKDAIAEFEVRRAELEKVAAEKLAAAQAVGEKLNGQTFEITQKSGVDGRLFGSVTNGDVAELLKKAGYEIEKAQVRMPEGPLKMIGEHGVQVALHTDVVVDVTVNVIGDHA

SEQ ID NO: 50352 - protein, 214 aa, Burkholderia mallei
MRRQTIRTCTTAIACAAGLAMIPSLSHAASPGEGINQGDIIARVRGISIMPDERTSNTLSALNVGVNNAIVPELDFTYMIRDYLGVELILGTSRHQITSSLGDLGGVGVLPPTLLLQYHFNHAGKVRPYVGAGINYTLFYNNGLHAGGEGIGINNHSFGPALQFGVDVQVTKKVFVNVDVKKIWMHTDATLGGQPLGRLNIDPLVVGVGVGMKF

SEQ ID NO: 50353 - protein, 469 aa, Burkholderia mallei
MTSQLHKKGEAWSARFSEPMSELVKRYTSSVFFDKRLALVDIAGSLAHAGMLAAQKIISADDLAAIERGMAQIKGEIERGEFEWQLDLEDVHLNIEARLTALIGDAGKRLHTGRSRNDQVATDIRLWLRGEIDRIGGLLNDLRGALIDLAEQNADTILPGFTHLQVAQPVTFGHHLLAYVEMFSRDAERMRDCRARVNRLPLGAAALAGTSYPIDRHAVAKTLGFDGICANSLDAVSDRDFAIEFTAAAALVMTHVSRFSEELVLWMSPRVGFIDIADRFCTGSSIMPQKKNPDVPELARGKTGRVNGHLMALLTLMKGQPLAYNKDNQEDKEPLFDTVDTVADTLRIFAEMVAGITVKPDAMRAAALQGFSTATDLADYLVKRGLPFRDAHEAVAHAVKVCDARGIDLADLTLDEMKQELPNVAHLIGEDVFDYLTLEGSVASRNHPGGTAPDQVRAAAKAARAALGQ

SEQ ID NO: 50354 - protein, 354 aa, Burkholderia mallei
MPVLGSHVLRNNLFVAPMAGVTDRPFRQLCKRLGAGYAVSEMVASNAQLWKSEKTMRRANHAGEVEPIAVQIAGADPAMMAEAARHNVANGAQIIDINMGCPAKKVCNVAAGSALLQNEPLVQRIVEAVVGAVGAGPDAVPVTLKIRTGWDRDHKNALRIATLAEAAGISMLTVHGRTRADLYRGDAEYDTIAAVKAAVRIPVVANGDITSPRKAKAVLDATRADALMIGRAAQGRPWLFREIDHFLQSGELLPPPRIDEIRQVMNEHLEDHYAFYGEFTGVRTARKHIGWYTRGLSGANGFRHRMNTLETTREQLAAVNEFFDAQQALSDRLVYVDDEDGDRGEPDDSNQLAA

SEQ ID NO: 50355 - protein, 250 aa, Burkholderia mallei
MNVLLVYAHPEPKSLNGSLKNFALRHLEEAGHAVQVSDLYAMQWKAALDADDNTARRPDTRFDPSLDSKHAFENGTQAADIAREQDKLRWADALVLQFPLWWFSMPAILKGWVERVYAFGFAYGVGEHSDTHWGDRYGEGSMKGKRAMLIVTTGGWASHYGPRGINGPIDDLLYPIHHGILYYPGFDVLPPFLVHRTNRIDETRFATIRDALGQRLDTLWTTAPIAFRAQNAGDYEIPQLTLRADIAPGR

SEQ ID NO: 50356 - protein, 293 aa, Burkholderia mallei
MLKVTKAVFPVAGLGTRFLPATKASPKEMLPVVDKPLIQYAVEEAIAAGITEMIFVTGRSKRAIEDHFDKSYEIEAELEARGKEKLLDLVRSIKPSHVDCFYVRQPEALGLGHAVLCAEKLVADNPFAVILADDLLDGDPPVMKQMVDVFDHYHSSVIGVEEIPPEDTKSYGIVDGKEWEDSIIKMSAIVEKPAPEVAPSNLGVVGRYVLKPRIFDHLRALKPGAGGELQLTDAIQALLADEQVLAYKYRGTRFDCGSKLGYLKATVEFALRHPEVKTEFETYLRSRSETQHG

SEQ ID NO: 50357 - protein, 172 aa, Burkholderia mallei
MPAAIAAPIRDARTHLVHERRPIVNAAEICTREVVACRRTDTVLDAAHLMRDRHVGDLIVVDDAGHAHAPVGMLTDRDIVLSLIAKEVDPAALFVGEIMSAPAAVVHEHDSLWTIAQRMRLTGVRRMPVVNADGALVGMVSVDDLLASVAALFDEIASISRRQIHFEEKARD

SEQ ID NO: 50358 - protein, 418 aa, Burkholderia mallei
ASPLTPRRSNMSKLQHLAAAVCGALCVSAAHAAPVWITLSEPALHELRALDPAVTSRYSAALATGDAKRTETIHVAQVDDSLLESLSQAIRRARGHGPGFFVHATFDEARASLQPSAAKQAAAIDYPITYSQQVRNWISQLQASNIVSTIVSLSGFTNRYYTTTHGVAASDWIAQQWKQLAGSRTDVTVEQFTHAGWPQKSVILTIKGSDPAAGVVVIGGHLDSTVGRMSENTRAPGADDDASGIASLTEALRVLLANRYQPKRTLKFIGYAAEEAGLLGSQAIAKQFRAQNVNVVGAFQLDMTNYKGDPKDIYLISDYTNATQNTYLANLAKAYLPELAVGTSQCGYACSDHASWNAQGYPASFPFEADQNDNPYIHSAYDTLERSDSQGNHALKFSKLALAYAAELGGGLSASAKR

SEQ ID NO: 50359 - protein, 696 aa, Burkholderia mallei
  MISC_FEATURE (617)..(617): X=any amino acid
ARTVTVSGPAVPTTPVGEPALELSAIRGDETLSEIYSYTLDCLTPPDPLLAHERAANLDLKAMIGKALTVTVQLEGMGSFVPGMPGMAGAANIGAGAREISGIVTGARFEGQLNRQCRYRLTMRPWIYLADLRSDYRIFQNRSVDEIVDEVLNAYSYSYDKRLSGRYPKLGYQVQYGETDFAFIQRLMQEHGIYWFFEHTNQVHRMVLVDHLGAHKPVESAAYRTLRYYPPGHKIDAEYIDRFSTEEHIRPGRWATGDFDFEKPNADLGVENALPRDTAHNGLERYEWPGDYTAREHGEHLARVRMEQTRARGERASGGGNVRDIVCGTTFALAGHPHASANREYLVIGATFEATETVGASGPGAYRIDTSFVAQPATTAFRPPRTVRKPRTRGPQTAIVTGPRGQDIWTDQYGRVKLKFHWDRSLVDDQNSSCWVRVSYAWSGNNYGGVNIPRVGSEVVVDFEHGDPDRPLVTGQVYNALHMPPWPLPENATQSGFMTRSPAGGGENANMLRFEDKAGEEQVKLHAERNYDVSVERDATTAVGRKHLTLVGVDLMPVMSTRSPLERLIDLLRTGGAASPAASGQPRRLPGNRRDSSSNINSNTSNISGNTSPISSXSSSARCSARADGRRSRANVAKTLQEIVAVLTDPFVTASVSTVQGASTSVVFGDAKGVHVGDTVKITSGDAHSEVNGTAS

SEQ ID NO: 50360 - protein, 138 aa, Burkholderia mallei
MTRIDFHTNVGDSLAYACRLLRKAYQAGQPVVVCAEPARLRALDERLWTFSPLDFIPHCAIDNAHAASTPIVLTADLERAPHHGILLNLGAQVPAQFARFERLLEVVGNPPDELAAGRDRYRFYRDRGYALNNHKQGG

SEQ ID NO: 50361 - protein, 332 aa, Burkholderia mallei
MSIHPLHRPRRMRRDDFSRRLMRENILTTNDLIYPVFVVEGTNVRQPVPSMPGVERVSIDLLMGVAEQCVELGVPVLSLFPAIEPSLKTPDGREAANPEGLIPRAVRELKRRFPELGVLTDVALDPYTSHGQDGVLDEAGHVLNDETLEILVEQARAQAEAGVDIVAPSDMMDGRIGAVREMLEREGHIYTRIMAYSAKYASAFYGPFRDAVGSASNLGKGNKMTYQMDPANSDEALREVRLDIDEGADMVMVKPGMPYLDIVRRVKDEFRYPTYVYQVSGEYAMLKAAAQNGWLDHDKVVLESLLAFKRAGADGILTYFALDAARLLRAQK

SEQ ID NO: 50362 - protein, 416 aa, Burkholderia mallei
MFGGHAPRRVSHAVDVRWGGTLVTIGGAAPVRVQSMTNTDTADAIGTAIQVKELANAGSELVRITVNTPEAAAAVPAIREQLDRMGVTVPLVGDFHYNGHLLLRDYPDCAQALSKYRINPGNVGQGAKRDSQFAQMIEAAIKYDKPVRIGVNWGSLDQDLLARMMDENGARAEPWEAQSVMYEALIQSAIGSAERAVELGLGRDKIVLSCKVSGVQDLVAVYRELSRRCGFALHLGLTEAGMGSKGIVASTAAIGLLLQEGIGDTIRISLTPEPGAPRTGEVVVGQEILQTMGLRSFAPMVVACPGCGRTTSTLFQELALRIQTYLREQMPVWRSEYPGVEKMNVAVMGCIVNGPGESKHANIGISLPGSGENPAAPVFVDGEKVKTLRGEHIAEEFQQIVSDYVARTYGRAAAQN

SEQ ID NO: 50363 - protein, 130 aa, Burkholderia mallei
MIGNWNYGTGRRKSAVARVFIKAGKGDIVVNGKPISDYFSRETSLMIVRQPLELTNHAQTFDIKVNVSGGGETGQAGAVRHGITRALIDYDATLKPALSNAGFVTRDAREVERKKVGLHKARRAKQFSKR

SEQ ID NO: 50364 - protein, 380 aa, Burkholderia mallei
MVLKNLIKARAGHPERLSDDDRLVRSGLLTGLEALPTVVLVLDRRTLRIAFANPSAEAMLDISRRQLSQMPWGEIFPNASELATTITAIGEERFHATHLDTVLDRPGREPLHVHAIVGFLEGAPEFVLVELFENERQSRTDREERIHDLTAVNKQLIRNLAHEIKNPLGGIRGAAQLLEFELGERERDELREYTQVIIKESDRLQTLVDRLLEPHRHPHIVGDVNIHEVCERVRAVMLAEFPRGLTIERDYDVSVPDLRGDKEQLIQALLNIVRNAAQALRERIAQGDARIELRTRVARKVTIAKRLYRLALDLRVIDNGPGIPDDIRDRIFYPLVSGRDDGSGLGLTLAQTFIQQHDGMIEVDSRPGRTEFQILLPLDH

SEQ ID NO: 50365 - protein, 691 aa, Burkholderia mallei
MARSPVEPPASQPAKRAAWLRAELERANYAYYVLDQPDLPDAEYDRLFVELQRIEAEHPDLVTPDSPTQRVGGEAASGFTPVVHDKPMLSLNNGFADEDVIAFDKRVADGLDKATDLAGTVTEPVEYACELKFDGLAISLRYENGRFVQASTRGDGTTGEDVTENIRTIRAIPLTLKGKRIPRMLDVRGEVLMFKRDFARLNERQRAAGQREFANPRNAAAGSLRQLDSKITASRPLSFFAYGIGVLDGADMPDTHSGLLDWYETLGLPVNRERAVVRGAAGLLAFFHSVGERRESLPYDIDGVVYKVNRRDEQDRLGFVSRAPRFALAHKFPAQEALTKLTAIDVQVGRTGAITPVARLEPVFVGGATVTNATLHNEDEVRRKDIRIGDTVIVRRAGDVIPEVVSAVLDRRPADAQEFVMPTECPECGSRIERLPDEAIARCTGGLFCPAQRKQALWHFAQRRALDIDGLGEKIIDQLVEQNLVRTPADLFNLGFSTLVALDRFAEKSARNLIDSLEKAKHTTLARFIYALGIRHVGESTAKDLAKHFGSLDPIMDAPIDALLEVNDVGPIVAESIHQFFAEEHNRTVIEQLRARGKVTWPEGPPAPRAPQGVLAGKTVVLTGTLPTLTREAAKEMLEAAGAKVAGSVSKKTDYVVAGADAGSKLAKAEELGIPVLDEAGMHTLLEGHAR

SEQ ID NO: 50366 - protein, 1368 aa, Burkholderia mallei
MQYSFTEKKRIRKSFAKRSIVHQVPFLLATQLESFSTFLQADVPTAQRKSEGLQAAFTSVFPIVSHNGFARLEFVSYALSSPAFNIKECQQRGLTYCSALRAKVRLVLLDKESPSKPVVKEVKEQEVYMGEIPLMTPTGSFVINGTERVIVSQLHRSPGVFFEHDKGKTHSSGKLLFSARIIPYRGSWLDFEFDPKDVLYFRVDRRRKMPVTILLKAIGLTPEQILANFFVFDNFTLMDEGAQMEFVPERLRGEVARFDITDREGKVIVQKDKRINAKHIRDLEAAKTKYISVPEDYLLGRVLAKNVVDGDTGEVIANANDEITEGVLEKLREAKIKEIQTLYTNDLDQGPYISSTLRVDETVDKTAARIAIYRMMRPGEPPTEEAVEALFNRLFYSEDAYDLSKVGRMKFNRRVGRDEITGPMTLQDDDILATIKILVELRNGKGEVDDIDHLGNRRVRCVGELAENQFRAGLVRVERAVKERLGQAESENLMPHDLINSKPISSAIREFFGSSQLSQFMDQTNPLSEITHKRRVSALGPGGLTRERAGFEVRDVHPTHYGRVCPIETPEGPNIGLINSLALYAHLNEYGFLETPYRKVVDSKVTDQIDYLSAIEEGRYMIAQANAAIGDDGALVDELVSSREAGETMMVTPDRIQYMDVAPSQIVSVAASLIPFLEHDDANRALMGSNMQRQAVPCLRPEKPVVGTGIERTVAVDSGTTVQALRGGVVDYVDAGRIVIRVNDDEAVAGEVGVDIYNLIKYTRSNQNTNINQRPIVKMGDKVSRGDVLADGASTDLGELALGQNMLIAFMPWNGYNFEDSILISERVVADDRYTSIHIEELNVVARDTKLGPEEITRDISNLAEVQLGRLDESGIVYIGAEVEAGDVLVGKVTPKGETQLTPEEKLLRAIFGEKASDVKDTSLRVPSGMSGTVIDVQVFTREGIQRDKRAQQIIDDELKRYRLDLNDQLRIVEGDAFQRLARMLVGKVANGGPKKLAKGTKIDQAYLEDLDHYHWFDIRLADDEAAVQLEAIKNSIEEKRHQFDLAFEEKRKKLTQGDELPPGVLKMVKVYLAVKRRLQPGDKMAGRHGNKGVVSKIVPVEDMPYMADGRPADVVLNPLGVPSRMNVGQVLEVHLGWAAKGLGWRIGEMLARQTKIEELRVFLTKIYNESGRAEDLESFSDDEILELAKNLREGVPFATPVFDGATEEEMSKMLDLAFPDDIAEQLDMNPSKNQVRLYDGRTGEPFERRVTVGYMHYLKLHHLVDDKMHARSTGPYSLVTQQPLGGKAQFGGQRFGEMEVWALEAYGASYVLQEMLTVKSDDVTGRTKVYENLVKGDHVIDAGMPESFNVLVKEIRSLGIDIDLDRN

SEQ ID NO: 50367 - protein, 293 aa, Burkholderia mallei
MFLRKLFGFVATAVILIVAILIGRTLWVHYMDEPWTRDGRVRAEIVNVAPDVSGAVVELPVRDNQFVKQGDLVMQIDPSHFRIAVEQAQAAVAARRAELQMRRADAARRADLDALVVSKESRENSAQTASSAEAQYQQALAALDAAKLNLERTRVVAPVDGYVTNLQVFRGDYASAGQAKLAIVDSHSFWVYGYFEETKLPRVKIGAKAEMRLMSGGVLKGHVESISRGIYDRDNPQSRDLVADVNPTFNWVRLAQRVPVRIHIDEVPKDLVLSAGTTCTVIVEPDGGGKRKS

SEQ ID NO: 50368 - protein, 260 aa, Burkholderia mallei
MELSLNRNQLTEAALKALHLIDLTSLNDDDTEERIASLAASADTPVGTPAALCVYPRFVGAAHAALARHGLVLPVATVTNFPHGAADPDAAARETADALARGADEIDVVFPYRALIDGDERVGRELVAQCRAAAGAQCLKVILETGELRDAAAIRRASEIAIEEGADFLKTSTGKVAVNATLDAAAAMLATIRVAGRMVGFKAAGGVRTAQDAAQYLSLAQRELGPGYLTSATFRFGASGLLGNLLETLGHRAGATRGAY

SEQ ID NO: 50369 - protein, 157 aa, Burkholderia mallei
MDLRKLKTLIDLVSESGISELEVTEGEGKVRIVKNAPPVYVQPSAGFAPQVSAPAPVVTAPSEAASAAAAAAAAAAAAPQGHVVTSPMVGTFYRAPSPGADPFVQVGDTVKEGQTLCIIEAMKLLNEIESDKAGVIKEILAENGQAVEYGQPLFVIG

SEQ ID NO: 50370 - protein, 163 aa, Burkholderia mallei
MNPIESPAVAADAQSTLYQELIVEHKRAPRRFGKLAEPTHEARGHNPQCGDDLKVQLRIEGGRIGDIRFDGHGCAICIASASMMTEAVIGRDVDAARALQQRFRAVLTGQAEHDEAYLGKLSSLVAVRRYPSRIKCALLGWHALAHALDTRVAAPGETEPHAS

SEQ ID NO: 50371 - protein, 1567 aa, Burkholderia mallei
MIDHQQPKSALPAAQGLYDPQNEHDACGVGFVAHIKGKKSHEIIEQGLKILENLDHRGAVGADPLMGDGAGILIQIPDAFYREEMARQDVTLPPAGEYGVGMIFLPKESASRIACEQELERTVKAEGQVVLGWRDVPVDHAMPISPAVKASEPVIRQIFIGRGKDVMVTDALERKLYVIRKTASHRIQALKLKHGKEYFVPSMSARTVVYKGLLLAGQVGVYYRDLQDARTVSALALVHQRFSTNTFPAWELAHPYRMIAHNGEINTVKGNVNWLNARTGAIASHVLGDDLPKLWPLIYPGQSDTASFDNCLELLVMAGYPLVHAVMMMIPEAWEQHTLMDDNRRAFYEYHAAMMEPWDGPAAIAFTDGRQIGATLDRNGLRPARYVITDDDLVIMASEAGVLPIPESKIVKKWRLQPGKMFLIDMEHGRIIDDKELKDNLANAKPYKSWIDAVRIKLDEIEPEGEDVAAERRSAAALLDRQQAFGYTQEDVKFLMAPMAQQGEEAVGSMGNDSPLAVMSNKNKTLYHYFKQLFAQVTNPPIDPIRENMVMSLVSFIGPKPNLLDTNNINPPMRLEVSQPVLDFKDIAKIRSIDRYTGGKFSAYELNICYPVAWGKEGIEARLASLCAEAVDAVKSGYNILIVSDRKTDAENVAIPALLATSAIHTHLVQQGLRTSTGLVVETGSARETHHFALLAGYGAEAVHPYLAMETLAKMAHGLPGDLSPEKAIYNFTKAVGKGLQKVMSKMGISTYMSYTGAQIFEALGLATDLVEKYFKGTASKVGGIGLFEVAEEAIRLHRDAFGENPVLADMLDAGGEYAFRVRGEDHMWTPDSIAKLQHATRGNSYQTYKEYAHLINDQTKRHMTLRGLFEFRVDPAKAIPIDEVEPAKEIVKRFATGAMSLGSISTEAHTTLAIAMNRIGGKSNTGEGGEDENRYRNELRGIPIKVGDTLKSVIGDEIVRDIPLKEGDSLRSKIKQVASGRFGVTAEYLASADQIQIKMAQGAKPGEGGQLPGHKVSEYIGKLRYSVPGVGLISPPPHHDIYSIEDLAQLIHDLKNVNPVASISVKLVSEVGVGTVAAGVAKAKADHVVIAGHDGGTGASPLSSVKHAGTPWELGLAETQQTLVLNRLRGRIRVQADGQMKTGRDIVIGALLGADEFGFATAPLVVEGCIMMRKCHLNTCPVGVATQDPVLRAKFSGQPEHVVNYFFFVAEEAREIMAQLGIAKFDDLVGRADLLDMRRGVEHWKAKGLDFSRVFYQPEGCEGIARRHVESQDHGLERALDHTLIEKAKAAIENGEHVSFIQPVRNVNRTVGAMLSGAIAKKHGHDGLADDAVHIQLKGTAGQSFGAFLAKGVTLDLVGDGNDYVGKGLSGGRIIIRPTNDFRGKSEENIICGNTVMYGALEGEAFFRGVAGERFCVRNSGATAVVEGTGDHGCEYMTGGTVVVLGETGRNFAAGMSGGIAYVYDADGTFAAKCNKSMVALDPVLQQAEQERTVDPALWHAGTTDEALLKGLVERHFQFTGSPRAKSLLENWDAARRQFVKVFPHEYKRALGEIGAKKKAGEVLAA

SEQ ID NO: 50372 - protein, 261 aa, Burkholderia mallei
MSDILDKIIAVKREEIAAALESAPLEELKVQASARDSRDFVGALRDKHAAGHAAVIAEVKKASPSKGVLREHFVPADIARSYAQHGAACLSVLTDERFFQGSARYLEQARAACTLPVLRKDFIVDAYQLLEARAMGADAILLIAAALDTPLMIDLEAYAHSLGLAVLVEVHNRGELDEALKLKTPFVGINNRNLRTFETTIDTTLGMLDAIPDDRIVVTESGILSRADVERMEAAGVHTFLVGEAFMRAENPGAELARMFF

SEQ ID NO: 50373 - protein, 347 aa, Burkholderia mallei
MTTASKEGPAASPMTMIQALRSAMDVMLERDGNVVVFGQDVGYFGGVFRCTEGLQNKYGKSRVFDAPINEGGIVGAAVGMGAYGLRPVCEIQFADYFYPASDQIVSEAARLRYRSAAEFIAPLTIRMPCGGGIYGGQTHSQSPEAMFTQVCGLRTVMPSNPYDAKGLLISAIENDDPVIFLEPKRLYNGPFDGHHERPVTPWSKHPASLVPDGYYTVPLDSAAIVRAGGDVTVLTYGTTVHVSLAAAEETGIDAEVIDLRSLWPLDLDTIVESVRRTGRCVVVHEATRTCGFGAELIALVQEHCFHWLEAPVERVTGWDTPYPHAQEWAYFPGPNRVGDALRRAMEN

SEQ ID NO: 50374 - protein, 91 aa, Burkholderia mallei
MARPTGKKFDKRRQQQNPLFKRKKFCRFTAAGVEQIDYKDTETLKDFIGENGKITPARLTGTKAHYQRQLDTAIKRARFLALLPYTDQHKA

SEQ ID NO: 50375 - protein, 272 aa, Burkholderia mallei
MKRRTLLKVVSAVAAGAAALSVSVGAQAQDKVIKVGTVAGPDAQVWQVVQKVAKEKQGLDVKVIEFNDYVQPNAALDSGDLDANSFQHQPYLDSQVKQRGYKIVSAGLTYISPIGVYSKKFKSLKELPAGAKVALPNDPSNENRALLLLQTQGVIKLKAGAGTGGSNATVLDVAENPKKLKLTELDAAQLPRVLSDVDAAVINTNYALAANLQPTKDAIALESLTSPYANLIAVRAKDKDQPWVKKLVKAYQSPEVKEFITKQFKGSMVASF

SEQ ID NO: 50376 - protein, 448 aa, Burkholderia mallei
MSASAVNVTPGRNVVVVGTQWGDEGKGKIVDWLTDHAQGVVRFQGGHNAGHTLIIGGKKTILRLIPSGIMREGVACYIGNGVVLSPEALFKEIGELEEAGLSVRERLFISEATTLILPYHIAIDQAREARRGAGKIGTTGRGIGPAYEDKVGRRALRVQDLFDARTFADRLRENLDFHNFVLTQYLGGAAVDFQATLDTMLGYADRLKPMVTDVSRRLYEENHAGRNLLFEGAQGTLLDIDHGTYPFVTSSNCVAGAAAAGAGVGPQKLDYILGITKAYCTRVGSGPFPSELYDADNPSRQDQIGITLANVGKEFGSVTGRPRRTGWLDAAALRRSIQINGVSGLCMTKLDVLDGLDEVKLCVGYKIDGEDVDLLPRGAAEVARCEPVYETFGGWKESTVGIDSWDALPANARAYLTRVQEVAGVPIDMVSTGPDRDETILLRHPFKV

SEQ ID NO: 50377 - protein, 622 aa, Burkholderia mallei
MCGITGWIDFARDLRNEAPIVDTMTDTLARRGPDARGVWLDTHAALGHRRLSIIDPERGAQPMLTPERGPRGLPRAVISYAGETYNFRELRAELGALGHRFDTHCDTEVVLRAYLEWGAAFVDRLNGMYSIAIWDTARDELLLVRDRLGVKPLFYYPTADGVIFGSEPKAILAHPDVRARTSSEGLCDALLFLRTPGQVPFSGMREVKPGHVLRVRRGGLAEQRYWALEARPHTDDLPTTIATIRALLDDIVSRQMISDVPLCALLSGGVDSSTIAALAQKRRRANGGGALSTFCVDFTGHTRNFRADPIRPTADAPFALEVARHIGSDHHTIELDQAGLLDPQVREAVLRAWDLPFNFADLDVSLHRLFAEVRKHATVALSGEAADEIFGGYLWFSDPAARRAHTFPWLKLGAHRGLDPRALFHRSFIDALRLGEYEAQLYRAALAEVPRLDGENAEDRRTRELHYLTLTRWLPVLLDKKDRMGMASGLEGRVPFCDHRLVEYVFNIPWAMKTFSGQEKALLRAAAADLLPESVLNRKKAAYPSIQAPGYDRGLIERLNRAIAAGRAPLEPFIDAGALRGLTEKTAAGSLSEFERILLESSSRLNDWLDLYRVELDGVPAG

SEQ ID NO: 50378 - protein, 213 aa, Burkholderia mallei
MAIEQEIKLALPAAQVDAAQRFLDARAGAGGREITLVNVYFDTPALALARAKSALRLRRAPQGWLQTFKTAGAAAGGLHRRHEWEMPVAGEALEIDALCAACDVPSAVDALRATAPQLIALFRTDFTRTLWHIEHAGATIEAALDRGEIVAQVSGDVCREPICEIELELVDGDAQALATLADEVAAALPGVTPDNLSKAQRGYRLRGGDLRAD

SEQ ID NO: 50379 - protein, 339 aa, Burkholderia mallei
MTDMTEAQTACATTETPVAAPAAPRWRVADVIALYELPFNDLLFRAQQTHREHFDANAIQLSTLLSIKTGGCEEDCGYCSQSAHHDTGLKAEKLMEVDAVLAAARTAKENGATRFCMGAAWRNPKDRHIEPIKEMIRGVKDMGLETCVTLGMLEEHQAKALAEAGLDYYNHNLDTSPEFYGQIISTRTYQDRLDTLERVRDAGINVCCGGIIGMGESRRERAGLIAQLANMNPYPESVPINNLVAIEGTPLENAQALDPFEFVRTIAVARITMPKAMVRLSAGREQLDDAMQALCFLAGANSMFYGDVLLTTGNPRAEADRKLLARLGMSASEASQLSA

SEQ ID NO: 50380 - protein, 319 aa, Burkholderia mallei
MVNGRFFTTAGESPAFRGRAWGRVVTQYFGGLDACCDGDDAFDAQLSQYEIGPMRVFTIAAPAHRIVRPVAALHDHGSDFFKLILQLSGVSEIEQRGKTFRLHSGDWSLYDPRVPYSIANLTHVEQLAIQIPRKQLGGFAVPDLHTSDVREFELKGLFSLLSSFLVSLSEQLPSLPGTTGTALSETILGLIVSTLTAQRDAQGEHVALPAVLRMRVKQYIHGHLADADLSIDRIARELRCSKRYLHRIFEEEGVTIDRYIWSSRLERCKDALDNARAAKPAISEIAFSWGFSSSAHFCRSFKQRYGMTPREFVRRRAWS

SEQ ID NO: 50381 - protein, 383 aa, Burkholderia mallei
MTKRRVVVGMSGGVDSSVTAWLLKEQGYDVVGLFMKNWEDDDDGEYCSTRQDWIDVVSVADLIGIDVEAVNFAAEYKDRVFAEFLREYSAGRTPNPDVLCNAEIKFKAFLDHAMSLGAQTIATGHYARVRERDGRFELLKAFDHTKDQSYFLHRLNQAQLSKTMFPLGEIPKTRVREIAAQIGLPNAKKKDSTGICFIGERPFRDFLNRYLPTKPGPMKTPDGKTVGEHIGLAFYTFGQRKGIGLGGSKDGSGEPWFVAVKDIASNTLYVVQGHDHPWLRSRELVAGNVSWVAGEPPADGARCGAKTRYRQADAPCAFGRAAQAGDERFSLVFDEPQWAVTPGQSAVLYDGDVCLGGGIIESAATGRAGTAPAGRAPALVEAR

SEQ ID NO: 50382 - protein, 469 aa, Burkholderia mallei
MQTESNGRPGAGGGAARPALQQTLGTWQLWGIAVGLVISGEYFGWSYGWASAGTLGFVVTALFVAAMYTTFIFSFTELTTSIPHAGGPFAYARRAFGPTGGYLAGVATLVEFVFAPPAIALAIGAYLHVQFPGLEPKHAAMGAYLVFMALNIVGVQIAATFELVVTLLAIFELLVFMGVVSPGFAWSNFVKGGWAGADHFSAGAFHGMFAAIPFAIWFFLAIEGVAMAAEEAKHPKRSIPIAYVAGILTLVALAIGVMVFAGGAGDWTKLANINDPLPQAMKYIVGANSGWMHMLVWLGLFGLVASFHGIILGYSRQIFALAREGYLPEWLAKVHPRFKTPYRAILAGGVVGIAAIYSDELIQFGGQTLTANIVTMSVFGAIVMYIVSMAALFKLRRVQPRMERPFRAPLYPFFPAFALVAALVCLGTMVYFNALVASIFVAFVALGYGYFLATRAQREAAPADALLEE

SEQ ID NO: 50383 - protein, 457 aa, Burkholderia mallei
MNADSGLPFPQRYWAIVCVALGITLAVLDGAIANVALPTIARDLRASDAASIWIVNAYQLAVTISLLPLASLGDRIGYRRVYIAGLMLFTAASLGCALSGTLPALATLRVIQGFGAAGIMSVNTALVRMIYPSSQLGRGVAINAMVVALSSAVGPTVASAVLAVAPWPWLFAINVPIGVAAVCGSLRALPANPGRSAPYDFIGAVMNACVFGLLIVSVDGLGHGGNRASVALTALVAAVIGYFFVKRQLTQPAPLLPVDLMRVPIFALSIGTSVASFTSQMLAFVALPFWLQNTLGFSQVQTGLYMTPWPLVIVVAAPLAGVLSDRYSAGALGGIGLALFASGLFALATIGAHPTPVDIMWRMALCGAGFGLFQSPNNRAILSSAPRERAGGASGMLGTARLTGQTLGAALVALIFGIAPQHGPTIALYAASSFAAVAAAVSLLRIRARRDTTAAAG

SEQ ID NO: 50384 - protein, 1061 aa, Burkholderia mallei
MNISKFFIDRPIFAGVLSVIILLAGMIAMFLLPISEYPEVVPPSVIVKAQYPGANPKVIAETVASPLEEQINGVEDMLYMQSQANSDGNMTITVTFKLGTDPDKATQLVQNRVNQALPRLPEDVQRLGITTVKSSPTLTMVVHLISPNDSYDMTYLRNYALINVKDRLSRIQGVGQVQLWGAGDYAMRVWLDPQKVAQRNLTADDVVRAIREQNVQVAAGVIGASPTLPGTPLQLSVNARGRLQNEDEFGDIVVKTAPDGGVTHLRDIARIELDASEYGLRSLLDNKPAVAMAINQSPGANSLAISDEVRKTMAELKQDFPAGVDYRIVYDPTQFVRSSIKAVVHTLLEAIALVVIVVIVFLQTWRASIIPLIAVPVSIVGTFSLLLLFGYSINALSLFGMVLAIGIVVDDAIVVVENVERNIENGLTARAATYKAMQEVSGPIIAIALTLVAVFVPLAFMSGLTGQFYKQFAMTIAISTVISAFNSLTLSPALSAILLKGHGDKEDWLTRVMNRVLGGFFRGFNKVFHRGAENYGRGVRGVLSRKAVMLGLYLVLVGATLMVSKIVPGGFVPAQDKEYLIAFAQLPNGASLDRTEKVIRDMGAIALKQPGVESAVAFPGLSVNGFTNSSSAGIVFVTLKPFDQRHGKALSAGAIAGALNQKYAALKDSFVAVFPPPPVLGLGTLGGFKMQIEDRGAVGYARLADATNDFIKRAQQAPELGPLFTSYQINVPQLNVDLDRVKAKQLGVNVTDVFDTMQIYLGSLYVNDFNRFGRVYQVRVQADAPFRQRADDILQLKTRNAAGEMVPLSSLVTVSPTFGPEMVVRYNAYTAADVNGGPAPGYSSGQAQAAVERIAAQTLPRGVKFEWTDLTYQQILAGDSAFWVFPISVLLVFLVLAALYESLTLPLAVILIVPMSILSALTGVWLTQGDNNIFTQIGLMVLVGLSAKNAILIVEFARELEHDGKTPFEAAVEASRLRLRPILMTSIAFIMGVVPLVLSTGAGAEMRHAMGVAVFFGMLGVTLFGLMLTPVFYVVLRTLAGGKIHVAQKDSAGYGVPAPDA

SEQ ID NO: 50385 - protein, 309 aa, Burkholderia mallei
MSTSRHRRMSHAPDARPTFTYRFRISLAMLSYRHGFHVGNHADVLKHTVVVQLLRYLNKKDKSYWYIDTHAGAGVYSLFDGYAAKTGEFGTGIEKIWDATDLPEALSDYVDEVRALNRDGELRYYPGSPYLAWRLMREQDRMRLFELHSTEIDVLRHNFRDAGRRAMIYAGDGFEGIKALLPPPPRRALVLVDPSYEDKRDYAKTIACVEESLKRFATGCYAIWYPQVSRPESQKFPDHLKQLQPNNWLHLSLTVSRPPSDGFGLFGSGMFILNPPYTLVDTMKEALPYLVEALGQDSGAKFAIEHRAN

SEQ ID NO: 50386 - protein, 320 aa, Burkholderia mallei
MRISTLDRRDMKHIHIIDSHTGGEPTRVVVSGFPALGGGTMAERLAVLAREHDRYRAACILEPRGSDVLVGALLCEPVSAGAAAGVIFFNNAGYLGMCGHGTIGLVRTLHHMGRIGPGVHRIETPVGDVEATLHDDLSVSVRNVLVYRHAKDVVVDVPGHGAVTGDVAWGGNWFFLVSDHGQRVAGENVAALAAYASAVRAALERAGVTGRDGAPIDHIELFADDPEYDSRSFVLCPGHAYDRSPCGTGTSAKLACLAADGKLVAGVTWRQASVIGSVFSASYAAAEGGVVPTIRGSAHLSAEATLVIEDDDPFGWGIAS

SEQ ID NO: 50387 - protein, 125 aa, Burkholderia mallei
MADGEGGRDGPGAVRVSARARRAARSGRPRAGGSETSMALMITDECINCDVCEPECPNGAISMGPEIYVIDPNKCTECVGHFDEPQCQQVCPVECIPQDPGRPETKDQLMAKYRALIAAEQKDDA

SEQ ID NO: 50388 - protein, 271 aa, Burkholderia mallei
MMRIALGIQYDGAAFCGWQSQPHGKTVQDALERSLAEFAQTSLHTTVAGRTDTGVHGLGQVVHFDTDLDRADFSWVRGTNAFLPPTVAVQWAKPMPDTFHARFAAFERTYYYALYVHPVRSPMLAGRAGWVHTPLDVDAMREAAAHLVGEHDFSAFRSSECQAKSPVKHLYQIGIRPDGDFIHFRFRANAFLHHMVRNLMGCLVAVGRGRYPSSWLAEVLESRDRDCAAPTFMPEGLYLAHVGYPAEFAVPPAQLGSVPWSSVWADLDGRT

SEQ ID NO: 50389 - protein, 330 aa, Burkholderia mallei
MRNFLSLGRRLALAAAVLAPVAAFANNVIVLNSAEATLSLIDQQSRQVVGQYPTGKEPHHLMATPDNASLIVANSVSNSLMFLDPKTGKPQRTLEGIDDPYQLGFSPDRKWFVAAGLRLDRVDIYSYDGRDLKLAKRLPLAVMPSHLAFTKDSKTVLVSLQVSGELAAIDLATQTLKWKMKVGKVPAGLWLTPGDKYVLIGMTGADYVAVVDWRNQKVVKTIPTGKGAHNFRSLADGTHVAVTNRVANTISILDENALTNVGDITGLLPGPDDMELSADRKTLWVTFRFAKKVGVIDLPSRKLIQTISVGRSPHGIYFYDRAPWTAPNGA

SEQ ID NO: 50390 - protein, 265 aa, Burkholderia mallei
MGIKAFNGVLYNTAYLPQAVEASERASTVDWAPSFFAEPHYSHKTKQGVRMNRLSKSLVVLQFAVAGLAGFMAEARAADAAKPDLDRGKAIATQVCAACHGVDGNSATGSFPKLAGQHPDYLVKQLHDFKTQPGAKGPVRVNSVMVGFASALNDQDARNVAAYYGSQSAKPGAARNAATVPVGQKIYRGGIAEKGVPACASCHGPTGQGIPVQYPRLSGQWADYTVAQLTAFQQGTRSNDAMHQIALRLTDSEVKAVADYIAGLH

SEQ ID NO: 50391 - protein, 228 aa, Burkholderia mallei
MTGFDRQTISDTTAKMLLEVQAVHFNADKPFIFTSGWASPVYIDCRKLISFPRVRRGLMEMAEATILRDVGFEQIDAVAGGETAGIPFAAWIADRMMLPMQYVRKKPKGFGRNAQIEGYLEEGSRVLLVEDLTTDSRSKINFVNALRTAGAKVNHCFVLFHYDIFKESVSVLKDIDVDLHALATWWDVLRVAKASGYFETKTLDEVEKFLHAPAEWSAAHGGATGAQE

SEQ ID NO: 50392 - protein, 77 aa, Burkholderia mallei; identical to SEQ ID NO: 48042

SEQ ID NO: 50393 - protein, 345 aa, Burkholderia mallei
MPQTKTTNRRIVLHSRPKGAPTPENFRTETAAVPVPAPGEVLLRTIWLSLDPYMRGRMSDAPSYAAPVELGGVMVGGTVSRVVSSSVPAFRDGDLVLSNAGWQDYAVSDGTDLMPLADVAHPSYALGVLGMPGFTAYFGLLHIGEPKAGETVAVAAASGAVGAVVGQIAKLKGCRVVGIAGGADKCRYVAGTLGFDACVDHHDPDFAKQLAAACPDGIDVYFENVGGAVFDAVLPLLNDHARVPVCGLIAHYNDSELPGGPNRLPLLTSSVLRKRIRMQGFIILDHYADVYPAFLKDMSEWVAQGKVKPREDVVDGLDAAPRALIGLLGGKNFGKVVVRVGPDTL

SEQ ID NO: 50394 - protein, 446 aa, Burkholderia mallei
MLAKASPLRSGDQLAGVAASTEEERVAAKMALASAPLTAFLNEAVIPYEDDEVTRLVVDTHSRDAFAEISHLTVGDFRNWLLSPAADAAALERIAPGLTPEMVAAVSKLMRNQDLIAAARKRRVVTRFRNTVGLPGRMSVRLQPNHPTDDVKGIAASMLDGLMYGCGDAMIGINPATDSLAAITKLLAMIDAFRERYRVPTQSCVLTHVTNTIAAIDKGAPVDLVFQSIAGTEKANASFGISLALLAEAREAALALKRGTVGNNLMYFETGQGSALSANAHHGVDQQTCEVRAYAVARAFEPFLVNTVVGFIGPEYLYDGKQIIRAGLEDHFCGKLLGVPMGCDICYTNHAQADQDDMDNLLTLLGAAGINFIMGIPGADDVMLNYQSTSFHDQLYVREVLGLRRAPEFEEWLETMEITDAHGALRAASARVPLLAGANDWMGRCA

SEQ ID NO: 50395 - protein, 422 aa, Burkholderia mallei
MMPVRAAGAGNREPGAPRGRTESDVMYNLPDDRGHFGPYGGVFVAETLIHALDELRAAYEKFKNDPEFVAEYNRELKHFVGRPSPIYHAQRWSETLGGAQIYLKREDLNHTGAHKVNNVIGQALLAKRMGKRRVIAETGAGQHGVATATICARFGMECVVYMGAEDVRRQAANVYRMKLLGATVVPVESGSRTLKDALNEAMRDWVTNIERTFYIIGTVAGPHPYPMMVRDFQRVIGDECKVQMPELAGRQPDAVIACVGGGSNAMGIFYPYIDDAAVQLIGVEAAGDGLDTGHHAASLIAGSPGVLHGNRTYLLQDDDGQIIETHSVSAGLDYPGVGPEHAWLKDSGRAQYVGITDEEALKAFHDCCRIEGIIPALESSHAIAYGAKLAPTLPKDKILLVNLSGRGDKDMHTVAERSGITL

SEQ ID NO: 50396 - protein, 360 aa, Burkholderia mallei
MSEPQPSKSPETNAGEKPATAGGGMASVAAVGARLAELRRTKGWSVDDVSARLKVAAPKLQALEAGDTSQLPGTTFALGLVRSYAKMLGVDPEPFAQALRREKGVPEVDLSMPASAGTDLPRGRVSIPLGGASRGRPWLWAVAAVVVALVAAAMWRTGGDSSNWLARFKSSGAGEAASAAHAQQEGAASDLPASAAVSGTVMQAGALAASATQSVGGASAGDTAAASVPAAGAAPVVASAAAALSASAPVAAAQPAQGAQQPAASAADGASAAVTAAPGQSVVALKVAQDCWFSVRDKNGKELFSALVRAGETRQVAGDAPLKVTIGNKAGLESVAFDGKPVDPAKYSTARGNVARFALP

SEQ ID NO: 50397 - protein, 437 aa, Burkholderia mallei
MTAPQPCARQPARAAAAAFVGTMIEWYDFYIYATAAALVFGELYFPSGDPFVSTMASFGTFAVGFFARPLGGVVFGHLGDRIGRKKALMTTLAMMGAATVCIGLLPSHASIGALAPVLLVLLRIVQGVAVGGEWGGAVLMAGEHAPDGRRTFFASFAQLGSPAGLVLSLVAFRAATSLEKADFLAWGWRLPFLASAVLLIVGLAIRLGVNESPEFEAVKRTRATAKLPIADVLRSASGLVLLCIGANTIGIAGVYFTNTFMIAYTTQQLGIPRATILDCLFAVAIIQFVAQPAAAWLAEKLGGARFLKLAAVAAMASPYPMFMLVTSGRPGAIVAGIALAVVCMAGFYSVIAGFVSGVFAARIRYSAISLSYQVCGALAGGLTPLVGTWLAHRYAGAWLPLALFYTCLAGLSLVSVVALDARRAARGASAREALEAR

SEQ ID NO: 50398 - protein, 314 aa, Burkholderia mallei
HNGAGMQGFFMNLRRPLFQDVRVRHALDLAFDFEWLNRQLFYGAYTRLNSYFADTDLQATGTPSAGELALLAPLRAQLDPAVFGPMTVQPSTDLPASLRANLLKARALLAEAGWTYRDGALRNAKGEPFVFEILDDSGSAFEPVVAAYIRNLAKLGIVVKYRTADFALLQKRLDAFDYDMTTVRYPGVQVPGAEQVARFASRYADEPGSDNLTGLKSPAVDAILKALTQAETRDELLDATHALDRVLMHGYYAVPQWYSAVHRIAFKRTLAYPSVLPLYYSAEGWVASTWWARPEHARPRVSPARAARARRPGR

SEQ ID NO: 50399 - protein, 487 aa, Burkholderia mallei
MTELFIDGAWRDGAGPVFASRNPGTGEPVWEGAGASADDVERAVASARRAFAAWSALDLDARCAIVKRFAALLVERKEALATMIGRETGKPLWEARTEVASMAAKVDVSIAAYHERTGERRSPTADGVAVLRHRPHGVVAVFGPYNFPGHLPNGHIVPALIAGNTVVFKPSELAPGVARATVEIWRDAGLPAGVLNLVQGEKDTGVALANHRQIDGLFFTGSSDTGTLLHRQFGGRPEIVLALEMGGNNPLVVADVEDIDAAVHHAIQSAFLSAGQRCTCARRILVPRGAFGDRFLERFADVASRITADVYDADPQPFMGAVISARAASRLVAAQAKLLELGAAPIIEMRQRDPALGFVNASILDVTPVRELPDEEHFGPLAQIVRYTDLDDAIARANDTAFGLSAGLLADDETVWNTFRRTIRAGIVNWNRPTNGASSAAPFGGAGRSGNHRPSAYYAADYCAYPMASVESAQLQMPANLSPGLHF

SEQ ID NO: 50400 - protein, 218 aa, Burkholderia mallei
MQFDWSAIWAALPDLMDGVRLTVFIAFFGLAGGFLVGMIAGMFRAYGPAVLNVLAQVYIELIRGTPIVVQVMFLYFALPLLAHVRIDGLSAAVVAITLNSGAYLAEVVRGALLSIPKGLTEAGLAMGLSMPRVLVKIVGPLAFRRLIAPLGNQCIVSLKDTSLFIVIGVGELTRKGQEIIAGNFQAVEIWTAVAAIYLVLTGVMTLTLRFVEKRMRIL

SEQ ID NO: 50401 - protein, 370 aa, Burkholderia mallei
MTPFHEPQATDDMAIPVTILTGFLGSGKTTLLKRILNEQHGMKIAVIENEFGEENIDNEILVQDSTEQIIQMSNGCICCTIRGDLARALADLAAKKRDGTFDFDRVVIETTGLANPGPVAQTFFIDSEIADEFLLDAVITLVDAKHANAQLDEHEVVQRQVGFADRLFITKADLVDDEAVSELKHRLLHMNPKAAIKVVNFGDADIKEIFDLRGFNLNAKLEIDPDFLAEDDHAHAHHDDHDHDHAHCDHDHGHCEHDHGHGHHDHHHAHHDDKIKSFVYRNDRPFDPNKLEDFLGGILQIYGERMLRYKGVLYMKGVDRKVVFQGVHQMMGSDLAAKWLPAEKKTNKMVFIGVDLPRDLITDGLDACLA

SEQ ID NO: 50402 - protein, 360 aa, Burkholderia mallei
MLTLSDFDFDLPPELIAQTALPERSASRLLEVDNTNPSAPPRLIDRRFAELPACVAPGDLLVFNDTKVLKARFFGRKASGGKIEVLIERVTGERIALAQIRASKSPPPGTTLTLADAFDVTVGERVEPFFTLHFPDNCLVLIERHGRLPLPPYIEHAPDAADETRYQTVFAANPGAVAAPTAGLHFDDAVLAALEARGVERATLTLHVGAGTFQPVRVENLAEHRMHSESYELTDALVEKIAATRARGGRVIAVGTTSMRALEAAARDAQAAGRPLAATRAETDIFITPGYRFRVVDRLVTNFHLPKSTLLMLVSAFAGIETIRAAYRHAIDARYRFFSYGDAMLLTRRDDAAEATHGGA

SEQ ID NO: 50403 - protein, 432 aa, Burkholderia mallei
MATSLPLDPIERASRDELLALQLDRLKWSLAHAYENSPVYRRKFDEAGVHPADLKTLADLSRFPFTTKNDLRDNYPFGMFAVPQERISRIHASSGTTGKPTVVGYTARDIDTWAGLVARSIRAAGARPGDKVHVSYGYRLFTGGLGAHYGAERAGLTVIPFGGGQTEKQVQLIQDFRPDIIMVTPSYMLSIADEMERQHLDPAQCSLRIGIFGAEPWTNDMRVAIEQRMGIDAVDIYGLSEVIGPGVASECVETKDGPTIWEDHFYPEIIDPDTGEVLPDGAFGELVFTSLTKEALPIVRYRTRDLTRLLPGTARTMRRMEKITGRSDDMMIVRGVNVFPTQLEEQLLKQRALAPHYQVVLTKDGPLDVLTLNVEPCPETAPDAAAIDAARRALAHDIKSLIGVTAIINVLPVNGIERSVGKARRIVDKRRP

SEQ ID NO: 50404 - protein, 216 aa, Burkholderia mallei
MKQDSRFPNLFILDHPLIQHKLTHMRDKDTSTRTFRELLREITLLMGYEITRNLPITTKRVETPLVEIDAPVIAGKKLAIVPVLRAGVGMSDGLLELIPSARVGHIGVYRADDHRPVEYLVRLPDLEDRIFILCDPMVATGYSAAHAIDVLKRRGVPGERLMFLALVAAPEGVQVFQDAHPDVKLYVASLDSHLDDHAYIVPGLGDAGDRLFGTKN

SEQ ID NO: 50405 - protein, 322 aa, Burkholderia mallei
MDTSSINAQSIFDDNAAMLKLSWLTGHEGWERGFSADTVANATSSADLVGHLNLIHPNRIQVLGEAEIDYYQRQTDEDRSRHMAELIALEPPFLVVAGGAAAPPELVLRCTRSSTPLFTTPMSAAAVIDSLRLYMSRILAPRATLHGVFLDILGMGVLLTGDSGLGKSELGLELISRGHGLVADDAVDFVRLGPDFVEGRCPPLLQNLLEVRGLGLLDIKTIFGETAVRRKMKLKLIVQLVRRPDGEFQRLPLESQTVDVLGLPISKVTIQVAAGRNLAVLVEAAVRNTILQLRGIDTLRDFMDRQRLAMQDPDSQFPGKLV

SEQ ID NO: 50406 - protein, 322 aa, Burkholderia mallei
MTDPTQRILDPSEIASLDHSAIPRVRMPERGAVFAARAARLRKLADLNPIAGYLRLMAAVADAQHELLQTFVPNAPEKAAAERAQRHSMPLMPALGGERDPRWRDLLQSLLDRVERAGLVNPPLAKLIDGMRLREAAALDAQADALVAQRFAEIEPASAPFLMAALQVVWTALASRIAPADVPYLEQPGLCPVCGAQPVASIVRVGGPYQGYRFLQCGLCSTEWHMVRTKCSHCDSTKGIAYHGIEGGSEAIKAESCDACHTYRKIGYQEKDYDVEPLADDLASLTLDLLMGEAGYRRASPNPLLWPDLPAEAGAAAGDERT

SEQ ID NO: 50407 - protein, 186 aa, Burkholderia mallei
MSVADIKKSVEQKMQRSIEAFKNDLAKIRTGRAHTGLLDHVQVDYYGSMVPISQVANLTLVDARTIGVQPWEKTMVAKVEKAIREADLGLNPATSGDLIRVPMPPLTEERRRELTKVVKSEGETAKVAVRNLRRDANEQLKKLVKDKEISEDDERRASDDVQKLTDKHVAEIDKLVQAKDAEIMTV

SEQ ID NO: 50408 - protein, 643 aa, Burkholderia mallei
  MISC_FEATURE (366)..(366): X=any amino acid
VGILIAAFVIAAPLVIGAAGGNYWVRVLDFAMLYVMLALGLNVVVGFAGLLDLGYIAFYAVGAYTAALLSSPHLTSHFDWIAQMVPGGLHVPFLLIVPIAMALAAIFGILLGAPTLRLRGDYLAIVTLGFGEIVRIFMNNLDRPVNVTNGPQGITGIDPVQVAGFNLSQTHEIFGFSLPSVYMYYYLFVLCALLVIWVCTRLQHSRIGRAWAAIREDEIAAKAMGINTRNVKLLAFAMGASFGGLSGAMFGAFQGFVSPESFTFWESVVVLACVVLGGMGHIPGVILGAVLLAVFPEFLRSTMSPLQHMLFGHDIVDTEVIRQALYGLAMVVIMLYRSEGLWPAPKHEDRIAKLAKRGGKKPVRAXRTWDRALRARARAPVDPGEKVMSEQIRLSVKGVNKRFGGLQALSDVGLEIREGQIYGLIGPNGAGKTTFFNVITGLYTPDSGEFKLDGTEYTPTAVHQVAKAGIARTFQNIRLFGGMTALENVMVGRHVRTKHGLLGAVFQTPAERREEREIKERAIELLDYVGVLQYADYTARNLSYGHQRRLEIARALATDPKLLALDEPAAGMNATEKVELTRLLDKIRSDGRTILLIEHDVKLVMGLCNRMTVLDYGKVIAEGLPQDVQKNPKVIEAYLGAGV

SEQ ID NO: 50409 - protein, 179 aa, Burkholderia mallei
MRLTTKGRFAVTAMIDLALRQEQGPVTLAGISQRQRISLSYLEQLFGKLRRHEIVESVRGPGGGYNLARRAQDVTVADIIIAVDEPLDATQCGGKGACEGSKQPDGHCMTHELWSTLNQKMVEYLDSVSLQDLVDQQRAREGTPAVLRDKRKPEPVAASVEPVRSVPLGPNSVFNIANS

SEQ ID NO: 50410 - protein, 238 aa, Burkholderia mallei
MWIREKEGLEQTTGVLAGDAPPDTLIANENGVLYHVDVRNGHKTGFYVDQRENRALVAQYARDRDVLNCFCYTGGFSLAALKGGAKRVVSIDSSGDALALAQRNVAANGFDAARAQWLDADAFKTLRRLVDEGERFDLIVLDPPKFAPTRDSVDRAARAYKDVNLSGLKLLRPGGLLFTYSCSGAIDMDLFQKIVAGAAADAKVDARILKRLGAGVDHPLLTAFPEGEYLKGLLLQIA

SEQ ID NO: 50411 - protein, 660 aa, Burkholderia mallei
MSAIESVLHERRQFAPPAAVEKAAAISGMAAYRALAEEAERDYEGFWARLARETLEWRKPFGKVLDETNAPFYKWFEDGELNASYNCLDRHVAAGLGERVAVIFEADDGTVTRVTYADLLARVSRFANALKKRGVGRGDRVVIYIPMSVEGIVAMQACARIGATHSVVFGGFSSKSLHERIVDVGATALVTADEQMRGGKTLPLKSIADEALAMGGCDAVKTVVVYRRTGGNVDWHAGRDVWMHEMVANESDACEPEWVGAEHPLFILYTSGSTGKPKGVQHSTAGYLLWVAQTMKWTFDWKPDDVFWCTADIGWVTGHSYITYGPLAVGATQVVFEGVPTYPNAGRFWKMIGDHKVTVFYTAPTAIRSLIKAAEADDRVHPRSYDLSSLRIIGTVGEPINPEAWIWYHKNVGQARCPIVDTWWQTETGGHMITPLPGATPTVPGSCTLPLPGIMAAVVDETGQDVPNGQGGILVVKRPWPAMARTIWGDPERFKKSYFPEELGGRLYLAGDGTVRDKETGYFTIMGRIDDVLNVSGHRLGTMEIESALVSHELVAEAAVVGRPDDTTGEAVVAFVVLKRSRPEGEEAAALAKTLRDWVGKEIGPIAKPKDIRFGDNLPKTRSGKIMRRLLRSLAKGEAITQDTSTLENPAILEQLAEVR

SEQ ID NO: 50412 - protein, 236 aa, Burkholderia mallei
MTPVLTHPMKSTRPFHPTPVITIDGPTASGKGTVAALVAAHLGFHLLDSGALYRLAALASIRYQVEPDDADALASLVDGLHITFREGCAQLDGVDVSDEIRAEAVGNRASAIAVHASVRAALVARQRAFRKTPGLVADGRDMGTLIFPDAVLKVFLTASVEARAARRHKQLMQKGFSANIDNLLQDLRERDARDSNRAAAPLKPAADAKPLDTSALTIEQSVEQVLAWYRELGQPA

SEQ ID NO: 50413 - protein, 359 aa, Burkholderia mallei
MRTRASMRPPHTIMLVLGIESSCDETGLALYDTERGLLAHALHSQIAMHREYGGVVPELASRDHIRRALPLLEEVLAASGARRDDIDAIAFTQGPGLAGALLVGASIANALAFAWDKPTIGIHHLEGHLLSPLLVAEPPPFPFVALLVSGGHTQLMRVSDVGVYETLGETLDDAAGEAFDKTAKLLGLGYPGGPEVSRLAEAGTPGAVVLPRPMLHSGDLDFSFSGLKTAVLTQMKKLEAAHAGGAVLERAKADLARGFVDAAVDVLVAKSLAALKATRLKRLVVAGGVGANRQLRAALSAAAQKRGFDVHYPDLALCTDNGAMIALAGALRLARWPSQASRDYAFTVKPRWDLASLAR

SEQ ID NO: 50414 - protein, 189 aa, Burkholderia mallei
MKTSAHRLVEIAPHTHGVDVDLVYATERNLTGQPIYRRAHCLLLEPAEAALRRAVAVAARSGLRLRIYDAYRPPRAQRILWDFLPDPNFVADLGRGSNHSRGTALDLTLVDANGDALDMGTGFDEMIAASNHFHDGLPEPVQRNRLLLLGVMHAAGFTHIASEWWHYELPGSRALPLIDEEAGGPWRLM

SEQ ID NO: 50415 - protein, 570 aa, Burkholderia mallei
MSDLQTSNPNTESFAALFEESLTRQDMRAGEVISAEVVRVDHNFVVVNAGLKSEAYIPIEEFLNDQGEVEVQAGDFVSVAIDALENGYGDTILSRDKAKRLASWLSLEKALDNNELVTGTITGKVKGGMTVMVNGIRAFLPGSLVDTRPVKDTTPYEGKTLEFRVIKLDRKRNNVVLSRRAVIEATQGEERAKLLETLKEGAIVNGVVKNITDYGAFVDLGGIDGLLHITDIAWRRVRHPSEVLSVGQEVTAKILKFDQEKNRVSLGIKQLGDDPWEGISRRYPSGTRLFGKVTNITDYGAFVEVESGIEGLVHVSEMDWTNKNVAPSKVVQLGDEVEVMVLEIDEDRRRISLGMKQCKPNPWDDFSRNFKKGDKITGAIKSITDFGVFIGLPGGIDGLVHLSDLSWSEAGEEAVRKYKKGDEVEAIVLGIDVEKERISLGIKQLEGDPFSNYVAMNDKGSIVDGVVKSVDAKGAVITLTPDVEGYLRASEISQDRVEDARNVLKEGEKVNAMVINIDRKSRGINLSIKAKDSAEQQEAMRGLQADSSAAATGTTNLGALLKAKLDGQNQ

SEQ ID NO: 50416 - protein, 446 aa, Burkholderia mallei
MIQIFALIGALLLVALNGFFVAAEFGLVKLRATRVKTLARQHGLRGRILRIVHARLDAYLSACQLGITLASLGLGWIGEPAFAALLSPVLAFAGVESEKLVHLISLVFAFSVISFLHIVVGELAPKSMAIRQAEKTGLWVALPLYAFYWAMYPAIWVLNTSANAVLRLAGLSADHGGDAHYSTDELKLILRSRRNAAGAAKAPKHAYSNDEWNTLAHSLDFSSMTVSDLMRPAHEMVGLRRDLPLADNMEVVARHRFSRYPLFDDQSRETVNGLIHLKDLLLARHAGAALADLSDYVRPVQYVKPDTPALDLFRRFRKGAPHFALVGKKGEKPIGFLTLDNLLSALVGQIHDEFRQGDSDWSRLDDGTLIGKGSLPVVSLEQALGIDIDEGRAESVGGLVIQALNDLPTEGRRVSFDRFDIVVKKMIGPRIVLVRVYPKSPKEADE

SEQ ID NO: 50417 - protein, 139 aa, Burkholderia mallei
MDTLSSRVQSFMEAVMSFSLHRVVLPLVAAGAGVCALAAPLAASADEIVVEQAVPGVVVAPAMREVVVVAPSAPPPVRYEVVPEPRVGYVWDRGHWRWDHDRYVWIAGHWEVERIGMHWAPGHWSQRGPGWVWVRGHWA

SEQ ID NO: 50418 - protein, 323 aa, Burkholderia mallei
MKQYLDLVRTILDTGTWQSNRTGIRTIGIPGAMLRFDLQQGFPAVTTKKLAFKSAIGELVGFLRATRSAADFRALGCKVWDANANENAQWLANPYRRGVDDLGDVYGVQWRRWPGYKVLDAHADAQIADATSRGFRAVARFDEDGAQKVLLHKAIDQLRDCLDTIVRDPSSRRILFHGWNPAVLDEIALPACHLLYQFLPNVERREISLCLYIRSNDVGLGTPFNLAEGAALLTLVGRLTGYTPRWFTYFIGDAHIYENQLGMLKQQLEREPFDSPRLEIAERVPEYAKTGQYEPQWLERIEPSDFTLVGYRHHEPLSAPMAV

SEQ ID NO: 50419 - protein, 465 aa, Burkholderia mallei
MSERRFAPSTRFGPGAVLSTHATDDWVARSLRAVWHPCTQMKHHERLPLIPVARGERAWLFDRAGNRYLDAISSWWVNLFGHANPRINAALKQQLDTLEHAMLAGCTHESAIELAERLAARTQHTLGHAFFASDGASAVEIALKMSFHAWRNRGRGDKREFVCIANGYHGETIGALGVTDVALFKDAYDPLIRAAHVVASPDARGARDGETAADVAARALGDVRRLFAERGEKIAALIVEPLVQCAAGFAMHDPSYVRGLRALCDAHDVHLIADEIAVGCGRTGTFFACEQAHVWPDFLCLSKGISGGYLPLSLVLSRDAIFDAFYDDDVTRGFLHSHSYTGNPLACRAAVATLELFDTDDVLAENARKSALMREALAPLASHPHVRHLRERGTIFAFDVALEGDAARTFPRRFFEHALARETLLRPIGTTVYLMPPYILDEGEIEWLASRTRATLDATLSEAHA

SEQ ID NO: 50420 - protein, 1270 aa, Burkholderia mallei
MSHVAPSGPSASELDVFACPLDGVNQIEASAGTGKTWNICALYVRLLLEKDLGADEILVVTFTKAATAELHERIRARLAQLAHALDTGDDGGDPFIARLFETTLAPERGLDPQTAAKRVRRALRAFDQAAIHTIHAFCQRALQEAPFAAAMPFAFEMEADDGALRFELAADFWRTRVEPVAAAYPAFAEWLVEYGAGPAALDAQLARRLKKPLARLRWDGLHAADDGAESAARAHFDTAAAIWRDERGVLGTLLADAQPSLNQRSHKPEAVSEALDAWARYFEQASAVAALPRAALKLTQSALEKATKKGGATPRHAFFDVAQALEAAVAALEAAQRARWLSLVEQWLDAAPAELAQRKRTRRVVSFDDLLANLYRALDAHPWLRETLRARYPAALIDEFQDTDPLQFAIFDTIFAPAGPLFLVGDPKQAIYSFRAADLHTYLAARARASARYTLAVNQRSTPAIVDACNRVFGANPRAFVLDGLDYEPVRAGSRVRAPLVDATDPLAGAGDFRIWTLPAGDDVLTKRDAQRHAAHACAAEIARLMRGARERAVTLGGEPLAASGIAVLVQTHRQGSLVKRVLAAWGIGSVELAQASVFATIDAEQLERVLAAIDAPGDLRRLRSALASDWFGLDAAALWRLEQGDAEQDGIDAAARGASGNGGGARAASAGAPAPSPADADAMGWVERFSRYRLLWRERGFAVMWRTLAGELRIAERLMAGADGERRVTDVNHLAELTQARASAQPGIAPTLRWLAAQRLEGGGDDAQLRLESDRNLVQIVTVHKSKGLEYAIVFCPFLNDGGLREPAGSGLPDAREYHDESGCAVLHYGCDDEAAERASREAVREQAAERARLVYVALTRAVYRCYLVAGTYQSSRSTKEARRSVLNWLVAGAGRDFDAWLKEPPEDAELAERWQALAGGPVTLGALPVPAHREPLAAGHDAQATRAARRATRGLRDAWRIASFSSLASAIARDESGIARAADDEMRPDHDALAAALGADALEPPDAAAAIAPAPAAAPRELAEDDILAFPRGAAAGECLHRLLELSNFADASTWPPAALRALHERPVEAELALAERLPAMMTRLVADLAATELVPGMRLAALDPARRLTEMEFLFPAPALDFNALRRLLAAHGYPDVALEAGTLAGFVKGFIDMIVEHDGRFWIVDWKSNHLGTTPEAYGERALDAAMAHHAYHLQALLYMVALHRYLRVRMRGYDYDAHIAGYLYVFVRGVRPDWRNGGASAGVHARRPARALIEALDALMREGDA

SEQ ID NO: 50421 - protein, 388 aa, Burkholderia mallei
MAFQLTPLRVALVAGEPSGDLLGASLLGGLHARLPASSRYYGIGGPRMSAVEFDAHWPMEKLAVRGYVEALKHIPEILRIRGELKRQLLAEPPDAFVGIDAPDFNFGLEQALRGAGIPTIHFVCPSIWAWRGGRIKKIVKAVDHMLCLFPFEPELLEKAGVAATFVGHPLADEIPLEPDTHGARIALGLPGGGPVIAVLPGSRRSEIELIGPTFFDAMELMQQREPGVRFVVPAATPALRALLQPLVDAHPSLSVTLTEGRAQVAMTAADAILVKSGTVTLEAALLKKPMVISYKVPWLTGQIMRRQGYLPYVGLPNILAGRFVVPELLQHFATPDALADATLTQLRDDANRRALADIFTDMHLALRQNTAQRAAEAVAHVIDSRKPR

SEQ ID NO: 50422 - protein, 203 aa, Burkholderia mallei
MARRPSAGSGRRGVARRAGLPHAGRGWAARRADGRLPRQAFSIRVRLRGRLPKARFRAPDNQLRLPTSSLPRRLALANNEAHAQALGQLDREMARLNLDGSALADRVRAELTLTESGYPSLARLASKLFLSERTPKRRLQAHGTPYRNMLEAARYRDACRLLTRTDRCVADVSTRLGYVNPSAFTRAFRRWAGIAPSRYRDDR

SEQ ID NO: 50423 - protein, 453 aa, Burkholderia mallei
MEFDYDLFVIGAGSGGVRLSRVAASYGARVGIAEEERIGGTCVLRGCIPKKLLVYASHYSHDVEDAAGYGWTFDIGLFSWPTLIEAKDREIARLSGIYVDLLNKSGVEIHTGRATLVGAHTVDVAGRRVTARHIAVATGSRPVLPPIPGIEHAITSREALELPELPQRIAIVGGGYIAVEFAGIFNGLGVDVDLFYRGEQILRGFDDDVRHALHGEMTKQGVAIHTRATIEAIERGADGGLTLRLAEGAYGPYDAVLYATGRVANGDGLGLEAVGVARDANGAIEVDAYSATTVPSIHAIGDVTARPQLTPVATRDGMLLAANLFGGKRIAADHRYVPSAVFSQPEIATVGLTEAQARAELGALDIYKTSFRALRHTLSGRDEKTFMKLVVARDSQRVVGAHMVGRDAAEIIQGIAIAIRAGATKAQFDETVGIHPTAAEEFVTLRQKEPDDA

SEQ ID NO: 50424 - protein, 928 aa, Burkholderia mallei
MTQRTPSKHKQRGFLHYGARGDGDAGRPMRIEYASAQPLADTLAHLRTSECGLTTPDARQRLLGDGPNEIAHDKPPHWSRQLLAALNNPFVYVLLVLAAISLLTDVYFADPGDRDYVKITILLSMVTISVLLRFVQEFRSLRAAEKLKAMVRTTATVQRRADDASAPIRHDVPMREVVVGDIVHLSAGDMIPADVRLISSRDLFISQAVLTGEALPVEKYDTLGAVAQKSADPASRSSGAAVRLERVEHGGSLLDLANVCFMGTNVVSGTATAVVVATGGDTYFGALAKNVVSHKRIETSFDRGVSSVSWLLIRFMLVMVPVVFMINGLTKGDWLSALTFALAVAVGLTPEMLPMIVSANLARGAIAMARRKVVVKRLNSVQNFGAMDVLCTDKTGTLTQDKIILEHHLDVSGRKNEDVLRLGWLNSFHQSGQKNLIDIAIVERANQLGEWIKPQGYRKIDELPFDFVRRRLSVVVEDPRGTHLLVCKGALEEMLAVSTHVQDDEGVHPLDFVARKRLLAQANAYNEDGFRVLIVATRTIARGDEREQYRTADERDLVVRGFLTFLDPPKESAAPALAGLRENGVAVKVLTGDNPTVTLNVCRQVGLAPGKPLLGTEIEALHDAALEKAVEHTTVFAKLTPLQKARIVKALQANGHTVGFLGDGINDAPALRDADVGISVDSGADIAKETADIILLEKSLMVLEEGVIKGRETFGNILKYLNMTASSNFGNVFSVLVASAFLPWEPMLAVQMLVLNLIYDTSQMLLPWDKMDPEFLKKPRKWEANNIGRFMLWVGPTSSVFDITTYVLMWTVFGAGALYHAQGGAAGQLVMNSGWFVESLVSQTLVVHLLRTQKIPFLQSTASLPVLLSTTIAIAIGCWLPFSPFSEALGFIRLPGSYWLWLAATMIGYIALAQIVKTLYVRRYKRWF

SEQ ID NO: 50425 - protein, 486 aa, Burkholderia mallei
ERAAVMAVDSTFTTLDPYDSNDTLSQAVSKSFYQGLFGFDKDMKLVNVLATGYEASPDAKVYTIRLRQGVKFQDGTDFNAAAVKANFDRVTDPANKLKRYNLFRRIAKTEVVDPYTAKITLTEPFSAFINVLAHPSAVMISPAALKKYGREIGLHPVGTGPFELVEWKQTDDLKVKKFAGYWKAGYPKIDAIDWKPVVDNNTRAALMKTGEADFAFRIPFEQTAELKASPKVDVIERASIIQRYVSLNVMQKPFDNPKVRQALNYAVNKEALAKVAFAGNATPATGIVPQGVDYAVKLGPWPYDPAKARALLKEAGYPSGFETTLWSAYNNSTSQKAIQFVQQQLAQVGVKAQVAGAEAGERVAKVESAQDPAKAPVRMYYIGWSASTGESDWAISPLLASSSIPPKLVNTAYYRNDAVDADLAKALETTDRAKKAELYADAQRRIWADAPWIALVQEKIVYARSKRLQGAYVMPDGSFNFDEIAI

SEQ ID NO: 50426 - protein, 352 aa, Burkholderia mallei
MNASVPASLTLARPDDWHLHVRDGAMLAAVLPHTARQFGRAIIMPNLKPPVTTTAQAQAYRERILAAVPAGMTFEPLMTLYLTDNTPADEIRRARESGCVHGVKLYPAGATTNSDAGVTDLLGKCAKTLEAMQEVGMPLLVHGEVTDPSIDLFDREKVFIDRVMEPLRRALPGLKVVFEHITTKDAADYVRDADAASGRIGATITAHHLLYNRNAMFFGGIRPHYYCLPVLKRETHRIALVEAATSGNPRFFLGTDSAPHAKGAKEAACGCAGCYTALHALELYAEAFDQAGALDKLEGFASFFGADFYGLPRSAETVTLRRETWELPREIDAGAGPVVPLRGGEAIGWRLV

SEQ ID NO: 50427 - protein, 296 aa, Burkholderia mallei
MPRRARHTCLNSLGEFMKLLRYGAKSREKPGLLDAQGRIRDLSGVIDDVAGDALGPDALARLRAIDPASLPLVDGAPRLGACVGRVGKFVCIGLNYSDHAAESGMDVPSEPVVFGKWTSAICGPDDDVELPPGSTKTDWEVELGVVIGTGGRDIDEARALAHVAGYCIVNDVSERAYQLERGGTWDKGKGCDTFGPLGPWLVTADEVPDPHRLKLWLDVDGRRYQHGSTATMIFRVPFLISYLSRFMSLQPGDVISTGTPPGVGLGQKPPVYLRAGQVMTVGIEGLGEQRQRVVQR

SEQ ID NO: 50428 - protein, 65 aa, Burkholderia mallei
MPKMKTKKSAAKRFVVRPGGTVKRGQAFKRHILTKKTTKNKRHLRGATAVHDSDLNSVRAMLPFA

SEQ ID NO: 50429 - protein, 528 aa, Burkholderia mallei
MGGENVAQVESPRQATAGSAEQAAGKLGGLLSLAFLLGLMTVMAAFGWIALREGTHRFLLPFVNGNATRQIADAIASVRAHPSLEGIRQVSEEIWMMSLPTSVTRFSHSRLMEQGIYYTTMPRVNQVLIAIHVLFSAFCVTFGSLQFWPSFRKRFMRAHRLIGAVYVATVPISTVSALAYLALTPPHHLYAHLIGWIALWIFGVLTLIAIAMAVRALKARRIFEHQAWMALSFGCLLVAPLLRIDWVLLAPLFPHIDQETLNLVTMGVMLPQAQLITYALIAVNRQYARPMKQRTPAPLASRAGAWFLRSQPGLLASTAVWGAVNVWAYGLGHGTAGLDAAARMLPADLLTREQEALHAYPGIAWLMALSLTAAFPAAVLSLGARLRAASASVAARLDATAACLGLAAGAASVFLGWHIGIAPDNHLFSGGTMYTVNGLVIAGFSLMLAATARRRQHAIAKESLVFLLCMLPFPALYFATLEAVGRIRLPAAYLAAGQGFVIPVGFSSSLLFLAAFHVIFGQATREHN

SEQ ID NO: 50430 - protein, 319 aa, Burkholderia mallei
MQTIRISPAVLAITAAAALSGCATVQTPTKGDPFEGFNRTMYTFNDKVDQYALKPVARGYQWAVPQPMRDSVTNFFSNIGDVYIAANNLVQLKIADGVGDIMRIVINTVFGVGGLFDVATLAKLPKHANDFGVTLGHYGVPSGPYLVLPLLGPSTVRDTAGLAVDYAGNPLTYVRPDGVSWGLFGLNLVNTRANLLGAGDVLEAAAIDKYSFVSNAYLQRRQALIGGATGAQSNLPDYGNEAPPPNYEMPEEGAAAPASGAASAPAAASAPTAASGAAPGAAEPASAAAPNPSSATNVPAQQVVPPSPGGIRFPSIRLH

SEQ ID NO: 50431 - protein, 204 aa, Burkholderia mallei
MFTGIVAAVGRIEAITPIAASPDAGVRLTLRAGGLDLADVALGDSIAIQGACMTVVAKTADTFDVEVSRESLNRTVGLAEPGDVNLEKALRAHDRLGGHIVSGHVDGLGTVTRFAPVGESHELRVLAPRELGRYLAYKGSITVNGVSLTVNSVDDRDDGCEFSINLIPHTVEVTTLRHLTAGAKVNLEIDMIARYVERMTNAPK

SEQ ID NO: 50432 - protein, 425 aa, Burkholderia mallei
MKIHIKGGTLIDPAAGTQRQADVFVAAGKVAAIGAAPADFNAAKTIDATGLIVAPGFVDLSARLREPGYEHKATLESEMAAAVAGGVTSLVCPPDTDPVLDEPGLVEMLKFRARNRNQAHVYPLGALTVGLKGQVITEMVELTEAGCIGFTQANVPVTDTQVLLRALQYASTYGYTVWLRPLDAFLAKGGVAASGPVASRLGLSGVPVAAETIALHTLFELMRVTGARVHVARLSSAAGVALVRAAKAEGLPVTCDVGANHLHLIDVDIGYFDAQFRLDPPLRAERDREAIRAALADGTIDAICSDHTPVDDDEKLLPFAEATPGATGLELLLSLTVKWAREAGVPLARALAAITSAPADVLKLPAGRIGEGAPADLCVFDPNAHWRVEPRALKSQGHNTPFLGYELPARVCATLVAGQVAFERR

SEQ ID NO: 50433 - protein, 142 aa, Burkholderia mallei
MFQGASALTLDAKGRMSVPSRYREALQGQAEGRVTVTKHPDGCLLLFPRPEWEVFRAKIAALPMDAHWWRRIFLGNAMDVDLDSAGRILVSPELRMAAGLEKEVMLLGMGSHFELWDAQTYTAKEQAAMAQGMPEALKNFTF

SEQ ID NO: 50434 - protein, 282 aa, Burkholderia mallei
MNMAESHLDPSKLATGPAGFGAAAGQRPLAPLNAKIEVKNLNFFYNQFHALKNINLSIPEGKVTAFIGPSGCGKSTLLRTFNKMYALYPEQRAEGEIVMDGENLLQSKLDISLLRARIGMVFQKPTPFPMSIYDNIAFGVKMFERLTRSEMDDRVEWALTKAALWNEVKDKLSQSGYGLSGGQQQRLCIARGIAIRPEVLLLDEPCSALDPISTGRIEELIAELKSDYTVVIVTHNMQQAARCSDYTAYMYLGELIEFGETEKIFIKPARKETEDYITGRFG

SEQ ID NO: 50435 - protein, 646 aa, Burkholderia mallei
PFDQPIVMGAAALMALVALSVVGALTYTKRWKWLWCEWLTSVDHKKIGVMYIVVAVLMLLRGFADAVMMRLQLALAYNGPDHYDQIFTAHGVIMIFFMAMALLVGLFNLIVPLQIGARDVAFPFLNSLSFWMTAVAALLMNVSLVVGEFAQTGWLAYPPLSELQFSPGVGVDYYLWALQISGVGTLITAINFFVTIIRMRAPGMTLMKMPVFTWTALCSNVLIMATFPILTVALALLALDRYLGMHFFTNDAGGNAMVYLNLIWAWGHPEVYILVLPAFGIYSEVIATFSKKPLFGYKTMVYASCVIMVLAFLVWLHHFFTMGSGANVNAFFGIMTMVIAIPTGVKIFNWLFTMYRGRIEFTAPVLWTIGFMVTFTLGGMTGVMMAIPGADFVLHNSLFLIAHFHNAIIGGVVFGYLAGFHYWFPKAFGFKLDEKLGKRAFWCWFIGFYVSFVPLYVLGFMGMTRRLNHYDNPAWHPWLIVAACGVALIALGVLHQVAQVWVAVRNRNAPGYRDTTGDPWNGRTLEWATASPPPVYNFAVIPTVHALDELAYRKEHGIGVGKNAVYQDIHMPSNTSAGLFVGMFSLVLGFALVWHIWWLAIASFVGIVAMVVLYSAGENDGYYIAADTVREIEERRAGARAPARPA

SEQ ID NO: 50436 - protein, 459 aa, Burkholderia mallei
MKSSGKPLAAPKVGMVSLGCPKALVDSEQIITQLRAEGYEISGTYDGADLVVVNTCGFIDEAVQESLDAIGEALAENGKVIVTGCLGAKKSASGSGLIAEVHPKVLAVTGPHAVGEVMQAVHSHLPKPHDPFVDLVPAAGIKLTPRHYAYLKISEGCNHRCSFCIIPSMRGELVSRPVAEVMLEAENLFKSGVKELLVISQDTSAYGVDVKYRTGFWNGRPLKTRMTELVGALGELAAQYGAWVRLHYVYPYPHVDEIIPMMAQGPLKGHVLPYLDVPFQHAHPEVLKRMKRLANAERVLERVQKWREICPDLTIRSTFIAGFPGETDAQFETLLDFIREAELDRVGCFAYSPVEGASANALDGALPDDVREARRARFMEVAEEVSAARIARKIGKTLKVLIDEVNAEGGIGRTAADAPEIDGVVYVEPAAKASKRYKVGEFVSVKITGADGHDLWGEV

SEQ ID NO: 50437 - protein, 996 aa, Burkholderia mallei
MRAVRRRQDRDGARARRDAVRRRAQRDHDQHERVSGGAHRIDAQGRAARLRRLRTGRGADRGGAAAAVQCRAARRNREGAPRRARDLLSGVRQGLDGRRRGALYRLSQHGDPPHVERRFRARDAAVPRSAAPARCADLDRCAARGVSRRVVGTPDGRSVLPAHRRDARADRRIAARAHRAAHRSAPRHRVALRGFGDRADRRALPDDRIRRPHGRRDSHAHGAAAHQPGDPARDDRGARAAGDRRERRRRPVRLPIRRGGRDVTRVFTLDSLHGDDLKFHRLYGEEALGRMFDFRIEALADNHSLSLKELLGKPVTVRIRQQDESERHLNGIVARAALVGRRAERHYGYQLIVRPWLWLATRRSDCRIFQNKTVPEIVQDVLGTYGFPIENHLTDTYAPRDYCVQYNETDAAFVSRLMEFEGIYYYFKHAAQTHTLMLCDAMASHVALPGYEHIPFIARDRTAIADEEHIDSWLPAQEVSIGKHETSDYDYTKPRADLSAQKIDPRGHDHDGFASFEWPGGYRDDEPGAHYSRVRLEEQQAEHERALARTDVRGIAPGYLFTLEHCPRADQNREYLIVRCQYRFQENAYATDSGNEAVVHESQTLVQPSSLPYRSPRATPRPRTNGPQTATVVGPKGEEIWTDQYGRVKLQFRWDRYGQSDQNSSCWVRVSSPWAGGGFGGVQIPRIGDEVVVDFLNGDPDQPIVTGRVYNGEKMPPWGLPGSATQSGLLSRSSPGGTAEHSNAFRFEDKKGAEQLWMHAERNFDAETEQDHTLSVGHDHSHSVGNNEMMSVANDRQRSVGQNETVNIGKHRVAQIGGNETHGVAGNRTRQVGQNEAVTIGANREATIGGNHVETVAKDKTETIGQGKTLNVTQHYQTTSKSMKTAVAEHHAEEIGSRTSTIEKAHELNVGGSQSVNVGASHTMSVKNNVHVGAGDQISLVCGDASITLKKDGTIAINGVTVESSASGSHSVRGKTVTSSATGEHTVEGTILKLNP

SEQ ID NO: 50438 - protein, 457 aa, Burkholderia mallei
MTHGLHGPKRWYALVVLCLGVLMIVLDSTIVNVALPSIGADLHFTETALVWIVNAYMLTFGGCLLLGGRLGDLYGQRRMFLAGLTLFTLASLACGLAPTQFVLIAARAVQGFGGAVVSAVALSLIMNLFTEPGERAKAMGVYSFVCAGGGSLGVLLGGVLTSVLSWHWIFLVNLPIGVAAYALSAALLPKVRPQAADARLDVAGAIAVTASLMLAVYGIVNGNEAGWLSTQTVATLAGAAALLAAFIAIETRAAHPLMPLALATQRNVAVANVIGVLWAAAMFAWFFLSALYMQRVLGYGPLQVGLAFLPANLIMAAFSLGLSAKIVMRFGIRRAIGAGLVIAAAGLALFARAPADGGFVAHVLPGMILVGVGAGVAFNPVLLAAMSDVAPSDSGLASGIVNTSFMMGGALGLAVLASVASARTDALAAARAALPVALNGGYHAAFACGAAFAALAA

SEQ ID NO: 50439 - protein, 387 aa, Burkholderia mallei
MPRAPDAPCGRTTERRQIMASVLLRNIGKRYDDNEVLRNVNLDIADGEFVVFVGPSGCGKSTLMRMIAGLEEISGGELLIDGAKVNDVPSAKRGIAMVFQSYALYPHMTLYDNMAFGLKLAGAKKQEIDDAVKQAARILHIDHLLDRKPRQLSGGQRQRVAIGRAITRKPKVFLFDEPLSNLDAALRVKMRLEFARLHDELKTTMIYVTHDQVEAMTLADKIVVLSAGSVQQVGAPNALYHAPANQFVAGFIGSPKMNFLAGVVESASADGALVRFESGETQRAAVDASTLRAGERVTVGIRPEHLHVGVTGGDGIVARTMAVESLGDAAYLYAESAVAPDGLIARIPPLDTYRAGEMLRVGAQPEHCHLFDADGRAFKRKPRHALA

SEQ ID NO: 50440 - protein, 461 aa, Burkholderia mallei
MNYISTRGAGIGERHTFSDILLGGLAKDGGLYLPSEYPRVSADELARWRALPYADLAFEILAKFCDDIPADDLRAITRRTYTADVYRHTRHGGNAADITPLTTLGAENGAPVSLLELSNGPTLAFKDMAMQLLGNLFEYTLAAHGETLNILGATSGDTGSAAEYAMRGKRGVRVFMLSPHRKMSAFQTAQMYSLQDPNIFNLAVKGVFDDCQDIVKAVSNDHAFKAQQKIGTVNSINWARVVAQVVYYFKGYFAATRTNDERVSFTVPSGNFGNVCAGHIARMMGLPIEKLVVATNENDVLDEFFRTGAYRVRSAEHTYHTSSPSMDISKASNFERFVFDLLGRDPARVVQLFRDVEQKGGFDLAASGDFARVAEFGFVSGRSTHADRLATIRDVFERYRTTIDTHTADGLKVAREHLQPGVPMIVLETAQPIKFGETIREALGREPSRPAAFDGLEALPQ

SEQ ID NO: 50441 - protein, 333 aa, Burkholderia mallei
MARAVHACAADTAGGDAGRAPAPPADRLVDALAASPAWLDSRASIDLFCDAMWLEHGLSRNTLDAYRRDLQLFAQWLAARHAASVDHASEPTLTEYIAARSDGKATSSNRRLSVFRRYYGWAVREHRAAVDPTLRIASAKQAPRFPSTLSEAQVEALLAAPDVDTPLGLRDRTMLELMYASGLRVSELVTLKTVEVGLNEGVVRVTGKGSKERLVPFGEVAHGWIERYLRDARPALLGARAADALFVTARGDGMTRQQFWNIIKRHAQQADVRVHLSPHTLRHAFATHLLNHGADLRVVQLLLGHSDISTTQIYTHVARERLKTLHAAHHPRG

SEQ ID NO: 50442 - protein, 323 aa, Burkholderia mallei
MHQRKTGAARSAPRAVSTGRERSVAVRALPVSGIKAIRYGIQAMLDPILPIELVTSSEGPFVAAVELTQRTERTTARHSHARGQLVGTSSGLVSIGLDDEDWVVPAVHAVWIPPHRVHSLRSFGPFAGWSVFVAEDRCAALPGAPRAIVMSTLLREAVRRAASWRGAALDAARARIANVILDEIAAAQTGPRGLPRPRDPRLRRIADALAGDLADNRRADEWAAWAGMAPRTLSRRFVSETGFTFTQWRQQARVLRALERLADGVTVTAVALDLGYDNVSAFIDMFRRTLGTTPGQYVNARAGDARDGAPAPCGPRAVRARRQ

SEQ ID NO: 50443 - protein, 84 aa, Burkholderia mallei
MVIIRLARGGSKKRPFYNIVATDSRNRRDGRFIERVGFYNPVATKGEALRIAQDRLTYWQGVGAQLSPTVERLVKQAQKAQPAA

SEQ ID NO: 50444 - protein, 660 aa, Burkholderia mallei
MGKIIGIDLGTTNSCVAIMEGNQVKVIENSEGARTTPSIIAYMDDNEVLVGAPAKRQSVTNPKNTLFAVKRLIGRRFEEKEVQKDIGLMPYAIIKADNGDAWVEAHGEKLAPPQVSAEVLRKMKKTAEDYLGEPVTEAVITVPAYFNDSQRQATKDAGRIAGLEVKRIINEPTAAALAFGLDKAEKGDRKIAVYDLGGGTFDVSIIEIADVDGEMQFEVLSTNGDTFLGGEDFDQRIIDYIIGEFKKEQGVDLSKDVLALQRLKEAAEKAKIELSSSQQTEINLPYITADASGPKHLNLKVTRAKLEALVEDLVERTIEPCRTAIKDAGVKVSDIDDVILVGGQTRMPKVQEKVKEFFGKEPRRDVNPDEAVAVGAAIQGQVLSGDRKDVLLLDVTPLSLGIETLGGVMTKMINKNTTIPTKHAQVYSTADDNQGAVTIKVFQGEREMAAGNKLLGEFNLEGIPPAPRGVPQIEVTFDIDANGILHVGAKDKATGKENKITIKANSGLSEAEIEKMVKDAEANAAEDHKLRELAESRNQGDALVHSTKKALHRVRRQAGGGREGEDRSGAQGARGRAEERVERKAAIDAKVEAVATASQKLGEKMYADMQAQQAGAAGAAGAAAEGASAQGGAQPADDRRRRRLQGSEEGLKPGGGLPRR

SEQ ID NO: 50445 - protein, 388 aa, Burkholderia mallei
MSPKEPPVLPSFSPALLALADGTVFRGYSIGAAGHTIGEVVFNTAITGYQEILTDPSYARQIVTLTYPHIGNVGVNAEDVEATKVHAAGLIVRDLPALASNFRMARTLGDYLRDEGVVAIAGIDTRKLTRILRDKGAQNGCILTGSDDETKALALARSFPGLAGMDLAKVVSTAKPFEWKQTEWRLGSGYGMQETPRYRVVAFDFGVKYNILRMLAERGCHVSVLPAQSSAADALALNPDGIFLSNGPGDPQPCDYAIAATREFIERGVPTFGICLGHQIMGLALGAKTLKMKTGHHGANHPVKDLANGRVVITSQNHGFAVDADSLPANARATHVSLFDGTLQGFELTDKPAFCFQGHPEASPGPHDIGYLFDRFTALMDAAKARSA

SEQ ID NO: 50446 - protein, 950 aa, Burkholderia mallei
MKQFQLNSYLFGGNASYVEELYEAYLDNPASVPDNWREYFDALQNVPATDGSNASDVAHNPIVESFAQRAKANAFIPRESGGNLATARKQVHVQSLISAYRFLGSQWANLDPLKRRERPAIPELEPAFYDFSEADLDQTFSASNLYFGFEQASLRDIVKGLRDTYCGTIGAEFMYISDPEQKRWWQERLESTRATPNFSADKKKHILNRLTAGEGLERYLHTKYVGQKRFSLEGGESFIAAMDEVVQRAGSKGVQEIVIGMAHRGRLNVLVNTLGKMPADLFAEFEGKHVDDLPAGDVKYHKGFSSDIATEGGPVHLSLAFNPSHLEIVNPVVEGSAKARMDRRGDADGLQVLPVQIHGDAAFAGQGVVMETLNLAQTRGYGTHGTLHIVINNQIGFTTSDPRDARSTLYCTDVVKMIEAPVLHVNGDDPEAVVLATQIAIDYRMQFHKDVVIDIVCFRKLGHNEQDTPAVTQPLMYKKIAQHPGTRALYAEKLVQQGVISADDADGFVKAYRKAMDDGHHTVDPVLSNYKSKYAVDWMPFLNRKWTDAADTAVPLAELKRLGERITTVPENFKVHPLVERVINDRRNMARGDQPLDWGMGEHLAYASLVASGYAVRLTGQDSGRGTFTHRHAVLHDQNRERWNDGTYVPLQNVSEGQAKFNVIDSVLSEEAVLGFEYGYSTAEPNTLVLWEAQFGDFANGAQVVIDQFISSGEVKWGRVSGLTMLLPHGYEGQGPEHSSARIERYLQLCAEHNMQVVQPTTPAQIFHLLRRQMIRLFRKPLIVATPKSLLRHKEAVSDLSELAKGSFQPVLGEVDGGIDAKKVKRVIACSGRVYYDLVAHRREAKANDVAIVRIEQLYPFAHKQFEAEMKKYENATEVVWVQDEPQNQGPWFYVEHHLKEGMKEGQKLAYSGRPASASPAVGYYAKHYEQQKALVEGAFGRLKSASIAK

SEQ ID NO: 50447 - protein, 242 aa, Burkholderia mallei
MKKTIRIAALALAAATATLGCTAQADQSTDKLKAALQSRLGADAPIKSVTKSPIAGLYEVNLGSQIVYSDASGDYVLLGELVNTKTHKNLTAERLAEINKIDFASLPLSNAIKVVKGNGARKIAVFSDPNCPYCKKLETTLQSVDNVTVYTFLYPVLSPDSTVKSKSIWCASDRVKSWQSWMLEHRAPTSAANCDTTALDKNLALGRGMNVTGTPTVFLADGTRLPGAVSADELNQALAGVK

SEQ ID NO: 50448 - protein, 166 aa, Burkholderia mallei
MSDAPPTLLLTVRDAAERLGVTPRTLKYYEERGLVTPSRSEGRYRLYDAADLERFERILRLRALGFSLHGITEMLKRPLEPAGDGRRRYSDASLRDIHADLSQQIATLDARIAAAQRELKEVRALKQELQHDIDYVERRLAGENPDELIAQRRAAARARKTGGTSA

SEQ ID NO: 50449 - protein, 300 aa, Burkholderia mallei
KVAVLLGGDSAEREVSLNSGRLVLQGLRDAGIDAHPFDPAQRPLAALKDEGFVRAFNALHGGYGENGQIQGALDFYGIRYTGSGVLGSALGLDKFRTKLVWQQTGIPTPPFETVMRGDDYAARAQDIVAKLGVPLFVKPASEGSSVAVEKVKSADALPAALEEAAKHDKIVIVEKSIEGGGEYTACIAADLDLPLIRIVPAGEFYDYHAKYIANDTQYRIPCGLDAAKEAEFKRIARRAFDVLGCTDWGRADFMLDAAGNPYFLEVNTAPGMTDHSLPPKAARAVGIGYSELVVKVLSLT

SEQ ID NO: 50450 - protein, 229 aa, Burkholderia mallei
MFLQGYGPLILSGTWQTVKLAVLSLALSFLLGLVGAAAKLSRSRVSNGIGTLYTTLIRGVPDLVLMLLLFYSLQIWLNQLTDLMNWDQIDIDPFAAGVLVLGFIYGAYFTETFRGAFLSVPRGQLEAGSAYGMTNWQVFARVMFPQMMRFALPGIGNNWQVLVKSTALVSIIGLADVVKASQDAGKGTLRFFFFTLLAGAIYLAITTISNFVLMWLEKRYSTGVRKADL

SEQ ID NO: 50451 - protein, 380 aa, Burkholderia mallei
MFSESDFTHMQRALALAARGMYTTAPNPRVGCVIVKDDVVIGEGFTQPAGQDHAEVQALKDARARGNDLRDATVYVTLEPCSHFGRTPPCAHTLIDARVGKVVAAMEDPNPQVSGRGLAMLRDAGIDVRCGLLAHEAHEMNIGFVSRMTRGRPWVRMKTAASLDGRTALASGESKWITGDAARDDGHKWRARACAILTGIGTVREDDPQLNVRGVDTPRQPRRVLIDSRLDIPLAARLLEGGSLLVFCGALDAQSEPRADALRARGAEIVPLANARGKVDLPAMLAALGERGINELHVEAGHKLNGSLLRERCVDELLVYLAPSLLGADAAAMFDLAAPASLVDRTRLAFHSVERVGDDLRILARFANAHASASASPTRS

SEQ ID NO: 50452 - protein, 393 aa, Burkholderia mallei
MPAMTAYHQTFDVAVVGGGLVGKTAALALTQAGHKTALLAQPAVPRPADLAFDSRIYALSASSQALLERLRVWQALDHGRLAPVYDMRVYGDAHAELHFSAFQSAVSQLAWIGESSLIECALDAALRFQPNLTWFDARAQGLDVTPGAATLALANGDVIECDLVVGADGAHSWVRSQIGSKVERRDYRQTGVVANFKAAQPHRETAYQWFRDGEIVALLPLPDGHVSLVWSAHTAHADELLALDPARLAAEVERVTLNRLGALECVTPAQGFPLALQTVDRLVAPRVALVGDAAHLIHPLAGQGMNLGLRDVAALADVLANREAFRDLGDTVLLRRYERARREDIRALMVATDGLQRLFSLPGALARIVRNAGMALVGAQPLVKRWLVASALG

SEQ ID NO: 50453 - protein, 857 aa, Burkholderia mallei
MDQFAKETLPTSLEEEMRKSYLDYAMSVIVGRALPDVRDGLKPVHRRVLFAMHELNNDWNRPYKKSARIVGDVIGKYHPHGDTAVYDTIVRMAQDFSLRYMLVDGQGNFGSVDGDNAAAMRYTEIRMAKIGHELLADIDKETVDFGPNYDGSEMQPLILPSRIPNLLINGSSGIAVGMATNIPPHNLNEVVDACLYLLNNPQASVDELIEIIPAPDFPTAGIIYGVAGVRDGYRTGRGRVVMRAATHFEEIDRGQRMAIIVDELPYQVNKRSLLERIAELVNEKKLEGISDIRDESDKSGMRVVIELKRGEVPEVVLNNLYKATQLQDTFGMNMVALVDNQPKLLNLREILQCFLSHRREVLTRRTVYELRKARERGHVLEGLAVALANIDEFIAIIKAAPTPPIAKQELMAKSWDSSLVRDMLTRAETENAAAGGRDAYRPEGLSPAFGMQGDGLYRLSDTQAQEILQMRLQRLTGLEQDKIIGEYRDVMAQIADLLDILARPERITTLIGDELTQVKAEFGDARRSKIELNATELNTEDLITPQDMVVTMSHAGYVKSQPLSEYRAQKRGGRGKQATQMKEDDWIETLFIANTHDYILCFSNRGRVYWVKVTRCRRARATRRPSDRQHVPAAGRREDQCRAAVREFSADKYVFMTTALGTVKKTPLEAFSRPMKKGIIAVGLDDGDYLIGAAITDGAHDVMLFSDAGKAVRFDENDVRPMGREARGVRGMQLDDAQQVIAMLVAGSEEQSVLTATENGYGKRTPITEYTRHGRGTKGMIAIQTSERNGRVVAATLVDPEDQIMLITTAGVLIRTRVSEIREMGRATQGVTLISLDEGTKLSGLQQIAEADADADD

SEQ ID NO: 50454 - protein, 251 aa, Burkholderia mallei
MILYEYPFNERIRTLLRLEDLFERFTFFVAQEDAREHHVALTTLFEISEVAGRADLKSDLMKELERQRQTLAPFRGNPGIEQNALEAVLGEIEQTLANLAQMQGKTGQHLIDNEWLASIRSRAVIPGGTCKFDLPSYYAWQQWPAEQRRHDIAKWAMPLLPLRDAAMIVLRLARESGQASKVMAMQGSYQQMLSGRTYQLMQVRVPPELRVIPEASANKYMLWVRFTAQDGDVRPRAVDIDVPFQLTLCNL

SEQ ID NO: 50455 - protein, 374 aa, Burkholderia mallei
MRRLAIIYRLGVKELWSLVRDPILLVLIAYTFTASIYSAATARPDTLHMAPIAIIDEDASPLSARIASAFFPPQFALPRMVTLAEADRGMDAGDFTFALDIPPNFQRDVLAGRPAQIQLNVDATRMSQAFTGNGYVQQIVSGEIDDFARRYRANTAPPVDIAMHMRFNPNLDQTWFGSLMEVINNVTLLSMVLTGAALIREREHGTIEHLLVMPVTPGEIMLAKVWSMGLVVACAAAFSLAFVVRGALHVPIEGSVALFVIGMAIHLFATTSMGIFLATLVRSMPQFGMLLVLVLLPLQLLSGSLTPRESMPFAVQNIMLAAPTTHFVEIGQAILYRGAGIETVWRQFLILAVIGTALFLLSLKRFRKTIGQMA

SEQ ID NO: 50456 - protein, 248 aa, Burkholderia mallei
MKPSTEDRWSDLRPDPDNDTPLYLQLARKLGDAIHDNRWAAGEALPSERLLAESLGVSRITARKAIALLVEQGLIRRTQGAGNFIQPRYEDPLSRLSSFSEMLKRRGFTPSSTWLSRDIQPANRDEVIQLGLSPAASVTRLKRLRLADGIVMAVENSTFPATIVPDPQAIGDSLYSYLEQRGTPIVRALQHFRAVNATDEIARQMGIAPHDALLLITRIGFTHDQRAIELTDTYCRNDYYDFVVELRK

SEQ ID NO: 50457 - protein, 567 aa, Burkholderia mallei
MNNRRATSVQQWRSPPRRARAEPRAGAPMHRGAACWHGFGVTNGVAHVARRITDTDMRGATMNHADMQHLNIEFPYRKQYGNFIGGEWVAPVGGEYFDNVSPVTGRPFTAIPRSREADIELALDAAHAAKAGWAAKGAAERANVLLRIADRMEANLTRLAVAETIDNGKPLRETTAADVPLAIDHFRYFAGCIRAQEGSIADIGGDMVAYHFHEPLGVVGQIIPWNFPLLMAAWKLAPALAAGNCVVLKPAEQTPASILVFAELIQDLLPPGVLNIVNGFGLEAGKPLASSKRIAKIAFTGETSTGRLIMQYASENLIPVTLELGGKSPNIFFADVMDRDDSYFDKALEGFAMFALNQGEVCTCPSRALVEESIYDRFIERALKRVEAIKQGHPLDSQTMIGAQASAEQLEKILSYIDIGRGEGAQCLTGGERNVLGGELAEGYYVKPTVFRGHNKMRIFQEEIFGPVLAVTTFKTEEEALEIANDTLYGLGAGVWTRDGNRAYRFGRGIQAGRVWTNCYHAYPAHAAFGGYKQSGIGRETHKMMLDHYQQTKNLLVSYSEKPLGFF

SEQ ID NO: 50458 - protein, 206 aa, Burkholderia mallei
PVKIAAFVAALYPLARIVFFGVTDRLGANPIEFVTRSTGLWTLVFLCITLAVTPLRRLTGINALLRLRRMLGLYAFFYAVLHFTTYIWFDKWFDVVEIAKDVVKRPFITVGFAAFVLLIPLAATSPRAIARRLGRHWQTLHKAIYAIAAFGILHFWWMRAGKHDLALPKLYGAIVLVLLGWRVLVWARQRWAQRRRADARRSARGG

SEQ ID NO: 50459 - protein, 640 aa, Burkholderia mallei
MEPDGQALLFDPTPGSDCPGAQKNVGFNRGRPTRLTAKRRWGDARNAAMRMTGSETGNYNNKIKRVASESRIGRMPAPARARGPAGSRQRLVSGASRAGAPMPVRAFCSNVSVAAARGPYNKRPMNLFRALLTVSGFTLLSRVTGLARETLIARAFGASQFTDAFYVAFRIPNLLRRLSAEGAFSQAFVPILAEFKNQKGHDATKALVDAMSTVLAWALALLSLAGIAGASWVVFAVASGLRTDGQAFPLAVAMTRIMFPYIVFISLTTLASGVLNTYKRFSLPAFAPVLLNVAFIVAAVFVAPHLKVPVYALAWAVIAGGALQFAVQLPGLKKIDMMPAIGVNPLRALAHPGVKRVLAKMVPATFAVSVAQLSLIINTNIASRLGQGAVSWINYADRLMEFPTALLGVALGTILLPSLSKAHVDADSTEYSALLDWGLRVTFLLAAPSALALFFFAEPLTATLFNYGKFDAHTVTMVARALATYGIGLVGIILIKILAPGFYAKQDIKTPVKIAIGVLVVTQLSNYVFVPIIGHAGLTLSIGVGACLNSLLLFIGLRRRGIYQPSSGWLRFFAQLAGASLVLAGVMHWLAINFDWTAMRAAPLERIALMAACLVLFAALYFGMLWLMGFKYAYFRRRAK

SEQ ID NO: 50460 - protein, 143 aa, Burkholderia mallei
MAKKIVGFIKLQIPAGKANPSPPVGPALGQRGLNIMEFCKAFNAQTQGMEPGLPVPVVITAYADKSFTFVMKTPPATVLIKKAAKVDKGSSKPHTDKVGKITRAQAEEIAKTKMPDLTAADLDAAVRTIAGSARSMGITVEGV

SEQ ID NO: 50461 - protein, 130 aa, Burkholderia mallei
DRQTISDTTAKMLLEVQAVHFNADKPFIFTSGWASPVYIDCRKLISFPRVRRGLMEMAEATILRDVGFEQIDAVAGGETAGIPFAAWIADRMMLPMQYVRKKPKGFGRNAQIEGYSEEGSRVLLVEDLTT

SEQ ID NO: 50462 - protein, 522 aa, Burkholderia mallei
  MISC_FEATURE (97)..(97): X=any amino acid
  MISC_FEATURE (106)..(106): X=any amino acid
LLLSPADNCLIAATRLCAGQAVTIDGERVVLAQTVELGHKIARAPLAANDKVLRYGAPIGHVTREVARGEHLHTHNLVSDYLPTYTRDAGRAFVAHXCARNRLFRXTLHVMTVSTPASPELSADGVRRVLLAGYARSDGRKGIRNVVAVAYLVECAHHVAREIVAQFRAPPRLGDAAPAAEAPPVHLIGFPGCYPNGYAEKMIERLATHPNVGAVLFVSLGCESMNKHYLVDAVRASGRPAEVLTIQEAGGTLNTIGAGVDWVRDARATLARQAKVPMGVGELIVGTICGGSDGTSGITANPAVGRAFDLLVEQGAACLFEETGELVGCEYHMQSRAARPELGREIVACVKKAERYYSILGHGSFAVGNADGGLTTQEEKSLGAYAKSGASPIVGIVKPGDVPPTPGLYLLDVVPDGEPRFGFPNISDNAEIAELIACGAHVILFTTGRGSVVGSALAPVVKVCANPATYRKLEGDMDVDAGRILEGRATLDEVGREIFAKTLAVASGAASKSEALGHQEFI

SEQ ID NO: 50463 - protein, 299 aa, Burkholderia mallei
MNAPAPTGFRCGMIAIVGRPNVGKSTLMNALVGQKISITSRKAQTTRHRITGIHTLDDAQYIFVDTPGFQTRHSTALNRSLNRAVTSTLTSVDAILFVIEAGRFGPDDQKVLDLIPPGTPTLLVANKLDRVSDKDTLYPFFQKMGGLREFAEIVPLSAKHPEDIQRLMNTIKPYLPEGDAIYGEDDLTDRSSRFLAAEILREKVFRWTGDELPYTSTVVIDKFEEEGRLTRVFATILVERDSHKAMVIGKKGAKLKQISTEARQDMEKLFDGPVYLETFVKVRSGWADNEAGLRAYGYE

SEQ ID NO: 50464 - protein, 511 aa, Burkholderia mallei
MTVIKQEDLIQSIADSLQYISYYHPLDYIQALGRAYELEQSPAAKDAIAQILTNSRMCAEGKRPICQDTGIVTIFVKVGMDVRWASENGAATMSVTDMINEGVRRGYTHPDNVLRASIVNPPEGARKNTKDNTPAVIHYEIVPGDKVDVQVAAKGGGSENKSKFVMLNPSDSIVDWVLKTVPTMGAGWCPPGMLGIGIGGTAEKAMLMAKESLMEPIDIQEIIARGPKDWVEELRVELHEKVNALGIGAQGLGGLATVLDVKILAAPTHAASKPVAMIPNCAATRHAHFVLDGSGAAKLEAPSLDAWPKVQWEPNTETSKRVDLNTLTPEEVASWKPGQTLLLSGKMLTGRDAAHKRIADMLAKGEPLPVDFKNRVIYYVGPVDPVRDEVVGPAGPTTATRMDKFTETMLAQTGLISMVGKAERGPVAIDAIKKHKAAYLMAVGGAAYLVSKAIRGAKVLAFEDLGMEAIYEFDVQDMPVTVAVDSQGTSVHQTGPKEWQAKIGKIPVASA

SEQ ID NO: 50465 - protein, 435 aa, Burkholderia mallei
GRARRGASRRKTYYKIRPSISSSRRSLSVTSRLFALIPCAGTGSRSGSALPKQYRTLAGRALLHYTLAAFDACSEFAQTLVVISPDDAHFDARRFAGLRFAVRRCGGASRQASVMNGLIQLAEFGATDADWVLVHDAARPGITPALIRTLIGALKDDPVGGIVALPVADTLKRVPAGGDAIERTESRNGLWQAQTPQMFRIGMLRDAIRRAQLDGHDLTDEASAIEWAGHTPRVVQGSLRNFKVTYPEDFDLAEAILAQRRALPEPHLHHRITLGSNHMDFRIGQGYDVHQLVPGRPLIIGGVTIPYERGLLGHSDADVLLHAITDALFGAAALGDIGRHFSDTDPRFKGADSRALLRECASRVAQAGFAIRNVDSTIIAQAPKLAPHIDAMRANIAADLDLPLDRVNVKAKTNEKLGYLGRGEGIEAQAAALVV

SEQ ID NO: 50466 - protein, 758 aa, Burkholderia mallei
MRYSVEIRKFFYSQYFFGGLRIALGVSLPAVLSLAVLHDRELGFTIATGALGACVVDMPGPLKYKHNEMLACSVIGFFSALATGLATPNIFALWLTIVPLTFVLSLIVVYGNRWPQISFATLFMMVMTLEEKFTPLQALVNASWILAGGLWYTYWATIVSRWQARRIEQQALAESLFACASYLLARADFYDLDADLDECYRNLVARQITAVETQETARDIVLRNLPKLRRGKLDPGRTMMFNLFINSVDLHEMFVGAHTDYPLVRSTFGGSDLMIFYRDLIRKASADLEEIGFAVLENRLPHSRISVKAELRAIEYEIELMRKKQFAATHPEAYAAVLATFRRIWSATRLIDKMRRNLSGSADAQRTELKIDKALTRFLQKRRMSPLLIFSNLNMGSPSLRHALRVTIAVAVGFWLGRLLPLTNAYWIVMTSIIILKPGYSLTKQRNAQRIVGTLIGCAASLALIYTVHEPHVLIAIMFGSMVISYSLLLFNYAASVVFTSSYVLLLFHLLAPGNMRIIGERAIDTVVGCMIAIAASRLFPYWEYRAIGKLVADALATTRKYFEATWRAGRGKAAPAVPAADGAAAVPAVAAVVDAVAPGLDGDYQYRLARKNVHIAFANLGQAFQRMMLEPKAHQKFVPELNDLLVQTHVLGAQITAAAPLLRHACEQGNPPALERGMAAVREHLEQAEAGVPPPANQAETSKQLTRELDSMVVDAERSDAGADLAHDLKVLAHQCKQMLASSLLIRKDASVIRLPE

SEQ ID NO: 50467 - protein, 690 aa, Burkholderia mallei
MPPVPRFLDSFSGLDMTTSSPASTTLMANAIRALAMDAVQQANSGHPGMPMGMAEIGVALWSRHLKHNPTTPHWADRDRFVLSNGHGSMLLYSLLHLTGYDLPIEELKNFRQLHSKTPGHPEYGITPGVETTTGPLGQGLANAVGMALGEALLAAEFNRDDAKIVDHHTYVFVGDGCLMEGISHEACSLAGTLKLNKLIAFYDDNGISIDGDVVNWFHDDTPKRFEAYGWNVIPNVNGHDVDAVDAAIAKAKSADKPTLICCKTVIGKGAATKAGGHDVHGAALGAEEIAKTRDALGWKWAPFVIPQEVYAAWDAKEAGKRREGDWNAAFAQYRAKYPAEAAEFERRMAGKLPADWAEKAAAIVAGANERGETVATRKASQQTIEGLAAVLPELLGGSADLTGSNLTNWKASKAVRANAHGAGIQWGNHINYGVREFGMSAAINGLVLHGGYKPFGGTFLTFSDYSRNALRVAALMKVPSIFVFTHDSIGLGEDGPTHQSVEHVASLRLIPNLDVWRPADTVETAVAWTHAVSHQHPSCLVFSRQNLAFNARTDAQLANIEKGGYVLRDWDEEIVARKIILIATGSEVELAMKAVEPLAQQGIAARVVSMPSTDVFDRQDAEYRERVLPHGVRRVAIEAGVTDFWRKYVGLEGGVVGIDTFGESAPAGVLFKHFGFTIEHVVETAKAVLA

SEQ ID NO: 50468 - protein, 467 aa, Burkholderia mallei
MLATDSDPIVAIATASGRGGIGVVRLSLGRAGEAAARALSDALCGARLMPRHASYVPFLDGAGEPLDRGIALYFPAPHSYTGEHVIELQGHGGPIVLQLLLQRCLDAGRAHGLRLAEPGEFTRRAFLNDKLDLAQAEAVADLIEASTEAAARSAGRSLDGAFSRDIHALVDDVIALRMLVEATLDFPEEEIDFLEAADARGKLAHIRERLAHVLGDARQGALLREGLSVVLAGQPNVGKSSLLNALAGAELAIVTPIAGTTRDKVAQTIQIEGIPLHIIDTAGLRETEDEVEKIGIARTWGEIERADVVLHLLDARSGLGPGDEAIAARFPDGVPVVRVLNKTDLTGAPASVTRTGGGAARADVCEVRLSAKRGDGIDLLRGELLRIAGWQAGAESVYLARERHLIALRAAQAHLARAAEHAEQNAQALDLFAEELRLAQERLNSITGEFTSDDLLGVIFSRFCIGK

SEQ ID NO: 50469 - protein, 630 aa, Burkholderia mallei
MTDTNHSSMRQHSLQSLAIAAIGVVFGDIGTSPLYSLKEAFSPAHGIPLTPSAILGVISLLFWAIILVVGIKYVLFVMRADNNGEGGVLALMALSLRPLNPKSRITGLMMALGIFGACMFYGDAVITPAISVMSAVEGLEVATPQLSHLVLPITIVILIALFWIQRHGTATVGKLFGPIMLLWFVTIAALGIYHIARAPMIVSAINPYYAFSFMSEHVLLAYVVLGSVVLVLTGAEALYADMGHFGAKPIRLAAYVLVMPSLVLNYFGQGALLLLDPKAIENPFFLLAPQWAALPLVVLSTVATVIASQAVISGAYSLTSQAIQLGYVPRMKILHTSELAIGQIYVPVVNWLLLFVILCIVIGFKSSDNLAAAYGIAVTATMVITTILAAVVMVKVWNWNKLLVAMIIGVFLVIDLGFFGANLLKVEQGGWLPLGIGALLFFLLMTWYKGRHIVKERTAADGIPLAPFLQGLLAHPPHRVSGTAIYLTGNDTLVPVSLLHNLKHNKVLHERTIFMTFVTRDIPYVKDHERVTVHDAGEGLYIVKAEYGFNETPDVKAVLEEVARQRGMTFELMDTSFFLARETVVPTHLPGMSIWRERVFAWMHQNAAKPTDFFAIPANRVVELGTKIEI

SEQ ID NO: 50470 - protein, 637 aa, Burkholderia mallei
MTRAFCPKASWLSLGAFLFDLMAVVCAWLIAYVVRFNGAMPPEFLKGAFVALAWVVPLYGLLFHVFGLYRGLWVFASLPDLLRISKAVVGGGLIVMIGAVMLQPVPIIPRSVLVLSPMLLFLAMGGARALYRATKEFYLYGGLIGQGKPVLILGAGSAGASLARELSRSGEWRLAGLLDDDPAKHGREVYGYKVLGSIGEVADWAEAAKAEYAIIAIPSASVEAQRRFATLCVRAGVRAMVLPSLTALMPGQGILSQIRQIDLEDLLGREAVTIDTPHVEALLRGRVVMVTGAGGSIGSELCRQILKFQPAQLIAFDLSEYAMYRLTEELRERFPDLPVVPIIGDAKDSLLLDQVMSRYAPHIVFHAAAYKHVPLMEELNAWQALRNNVLGTYRVARAAIRHDVRHFVLISTDKAVNPTNVMGASKRLAEMACQALQQTSARTQFETVRFGNVLGSAGSVIPKFQQQIAKGGPVTVTHPEITRFFMTIPEASQLVLQASSMGQGGEIFILDMGEPVKIVDLARDLIRLYGFTEEQIRIEFSGLRPGEKLYEELLADDETTTRTPHPKLRTAKAREVPDHLLDELLPWLMQHRVLSDDEVRRDLRRWVPEYQPAVGPTLQSVPTGNGLVAGIGREAGR

SEQ ID NO: 50471 - protein, 161 aa, Burkholderia mallei
MPASFERKLITRDALAAMRASLPAPVVFTNGVFDILHRGHVSYLADAKALGACLIVGVNSDASVRMLGKGDDRPINVQEDRMALLAALECVDWVVGFDEKTPVSLIEAVHPDILVKGGDYDMDALPESALVRGWGGRALAIPFEHDRSTTALLKKVRAQSR

SEQ ID NO: 50472 - protein, 160 aa, Burkholderia mallei
MQRAGRVHVDAGRLERIADPLRERERMRAVAVQADRLRVERHPFARDRAHALAADHLERAREHLVFVVDERARLAARHERAVRAIAAVGEHFLDGDEPRLLRGVDEPAFREPEHRERRIEIVDRRHHRIGDLGLARGLVVQRAVRLHVRDAPAFRLSDRR

SEQ ID NO: 50473 - protein, 161 aa, Burkholderia mallei
MISAEGLKEIDRAIAKYPADQKQSAVMSALAVAQEEHGWLSPELMQFVADYLGMPAIAVQEVATFYTMYELAPVGKHKITLCTNLPCQLGPHGGAEATADYLKQKLGIDFGETTPDGKFTLKEGECFGACGDAPVLLLNNHKMCSFMSREKIDQLLEELSK

SEQ ID NO: 50474 - protein, 728 aa, Burkholderia mallei
LYRYALDHVAGARAAFAAIADASRTQGMRAFARKLDAEAALADARAALAREDRAAAHAALERARRAAPDDPDMLAAVGAQWIDIGEIERGLAPLRDWIVAHPREADADVRLRYGDLLGGARRDDALAAWLDTLRRGGAPLDAAQSARLEDQALRLVLRETDDALDRDDYEAAARALDRASPAGRADRRYALEAAELARAQGRYDTARAALAPLLARAPDDADAQLALARILDDDGAPADALALVRDVLARTPPDDVDTQLSALRRLTALRRARDAAALADTLRAAYPARADVTVAAGRVAQALGRYDDAASLYWLSLAQERATGIAPRRDGATPAQAAWADLQQRRDPQIEAGWLPAYKSGDEGVSAYRAHQMPVYLQMPYRYDGHAFVHLDAVRLDAGTLDTSDPRAYAFDTFATHPALADAAAPGGALRQRAAGIGGGIGYRDDAWRVDVGTTPLGFPVHYVVGGVRYRFGAGPASVTVSAARRPETGSMLSYAGLRDPWTGATWGGVRRDSVGVRASVDIGRVNLFADLAAARLTGRNVAENAAVTLRTGFMAPVYRRADMRVSAGLVGNAWHYAQNLRYYTYGQGGYYSPQRYLSIGMPLEWAGRRGAFTWDVTATVGVSNSYERDSPYFPNGLPGSTLVKSAPALGNPVFSRGSTRGVSFWYGFADVAEYRVNGRLAVGARFDIDHAHDYAPSAGLLYVRYAFDARKDSGGFSPSPVRLYSSY

SEQ ID NO: 50475 - protein, 298 aa, Burkholderia mallei
MSMLRAMQNNRSKVPLSLAQRAICMAAFALLGACATRLDQAPVVDRSGSLGTTAATQPPAPLPPAPPGYYRVKPGDTLYRIALENGQNYRDIAAWNNLTNPNQIEVDQLLRVSPTAGGATAAAPAAGAVVTPPLSSGPSNGAAAVPPIYGSGSTASAAPSAPAASASSEPSAPAANGNVSFAWPVRGALLNTFDDSKNKGINIGGPAGEAVKAAADGRVVYAGNGLRGYGNLIIIKHDATYLTAYAHNRALMVKEGDAVTKGQKIAEMGNSDSDRVMLHFEVRRQGKPVDPLKYLPPQ

SEQ ID NO: 50476 - protein, 299 aa, Burkholderia mallei
MQVDQDLTRGERRAAQIGVEQKAHQRLALRNGLRPMVIVLFHVEQRLAGDHGPVRRRVAARVAHAALRIEHIELVGLDRAPRDGALERHRIARLAQQHALERAQHLHGRLAVRQARERDEVVLKERRMRIFARTELDEQLVRVEAAQQRVARERQHAAHPFGARQRAQLRFARPRQRQRLERLQHAAQRRMRALRALRDERDAAVVAREHVDDEARLPVRIAVQHERRLLGDPEFGRARRGAARLARRLVGSRRAGCGRRGEGLQVGVGLVGHPDIGRPVIRTHRRAAPLRCPPSRSSP

SEQ ID NO: 50477 - protein, 657 aa, Burkholderia mallei
MLYPTEFDVIVVGGGHAGTEAALASARMGAKTLLLTHNIETLGQMSCNPSIGGIGKGHLVKEVDALGGAMAAATDEGGIQFRILNSSKGPAVRATRAQADRVLYKQAIRRRLENQPNLWLFQQAVDDLMVEGDRVVGAVTQVGVRFRARAVVLTAGTFLDGKIHVGLNHYTGGRAGDPAAVSLSSRLKELNLPQGRLKTGTPPRIDGRTIDFSKLDEQPGDLDPIPVFSFLGRAEQHPQQLPCWVTHTNERTHDIIRSGLDRSPMYTGVIEGVGPRYCPSIEDKIHRFASKDSHQIFLEPEGLTTNEFYPNGISTSLPFDVQLALVHSMRGLEQAHILRPGYAIEYDYFDPRALKSSLETKAIGGLFFAGQINGTTGYEEAAAQGLLAGINAGRYAQEKDAWCPRRDQAYLGVLVDDLVTRGVSEPYRMFTSRAEYRLSLREDNADMRLTEIGRELGVVDDVRWDAFNRKRDAVSRETERLRTTWVTPKTLPADEATALLGKPIDHEYSLAELLRRPGVSYDGVCGLRGGECGPSEPLAEDELLLAQIKEQIEIGIKYQGYIERQAGEIERNGANENTRLPDGIDYTEVRGLSFEVSQKLNQFRPETIGQASRISGMTPAAISLLMVHLKKRGLGRRKGADSVPGADVQADNTAAQQ

SEQ ID NO: 50478 - protein, 368 aa, Burkholderia mallei
MNQHAAAAPLRDLAGEVLGLIDLKQMFTDIHIEQDRPVTIKTPRGWVETSDEPVLLDDMRPLLDAIDEHWESALRQGTLDRPFVLTRCRLRCHVYRAGGGRKIVISMRRLPLKPLPLEELGLPVYVRSMLDNTKGIILVTGPTGSGKTTTIASLLEHVNATRNTHIVTIEEPIEYYLERRQSIISQREVPTDTPNFPHGLREALRQKPDVVMVGEVRDAQTADTLLQAGESGHLVLATMHTGSAVSALNKLLSFFPVEQRDRHAVALAESLIGIVCQSLVPSADGESLVLASELLFNNNNQVAKLIADPTKLHLVNEFLRRREDNMSRSLNDDLAALAARNRITTKDALRATYNRLELHEMMQSIVNR

SEQ ID NO: 50479 - protein, 402 aa, Burkholderia mallei
MRPARFFPNPTARQSRISDMMNTAAPAASPARALAPDELRDAFLHLKETRKLRNRDVAQLLGVSEGEALAAFAGERVVRLESSFVELFEEMPRLGGVMALTRNAAAVHEKDGAFEQMSHDGPVGLALGAIDLRIFYRNWAAGFAVYEPTAHGVMKSLQFFDAQGDAVHKVYLRKHSDHAAFDAFVSRWRMPVQSPAFAVEPAPPAHVERPDGEIDAAGLRAAWDAMTDTHQFHGVVRRHGVSRTQALRLAGASRAHRVATDAARRVLERAAQTRLPIMVFVGNRGMIQIHTGAVTNIRRMGTWINVLDEDFNLHLREDLVASAWVVRKPTSDGAVTSVELFDAAGDNIAMLFGARKPGQPELAGWRELAGALPRLDTADAADAATVAHAADVPVATDAGAAR

SEQ ID NO: 50480 - protein, 866 aa, Burkholderia mallei
MNHEREIGPRRALADHVERLGAVDRERRAVRAGLELERQHAHADQVRAVNPLEAFRDDRLDAREPHALGRPVARRALAVIGAGDHDERLLAGHVGLDRLPHAHHLAVRLDARERALLHLAVDDRHLVDERRVRERRALRGQVIAAVRRVRVEVLFGQAHLREVFARRARRQDRVRRRQVIGRDVVAEHGERAHALERALARERAFPVRRAANVRAPRPPVVQRRRALAGVGRAREHRLVDGAELLGLHARRDDRVDLLVGRPDVLQRDGLAVLVVAKRVLLDVEADRARDRVRDDERRRREERLLRIRMDAPVEVAVAGQHGRRVQVAIDDLPLDLRVERAGHPVAGRARERDDAEAELLQLGQQVRRLQVQLDRLRAGRERALHPRLAREAARVRVAREQRRGDHVARVARVRAARDRGDDHRAVGHLARFLLPFAGDPARGEIGRRQPLVRIRRAGHVAHDARQVERQRALVLRVREAVGPQARRLRVGFDELHLLVAAARQAQVIDRLLVDEEHRGGRAVLGRHVRDRRAIAEREALRALAAEFQIRADHFLAAQEFGQREHDVGRGDAGLALAGQLDADDVGQPHPRCAAEHHVLRLQPAHADRDHAERVDVRRVAVGADAGVRVRDAVLRLDHGRHLLQIDLVHDAVAGRNHVDVLERLLRPFDEVEAILVAAILDRAVLRERVGIEAAAFDGERMIDDQLHRHDRIHLRRIAAAFGDRVAQAREIDERGLAEDVVADDARREPREIALALALDELRQRIGEDRRIAAAHEVLGEHARRVRQRVVRARADRVDGGARVEVVERRAGQGFAVGSVHCVGTDWVTIVAKRPGATPGRRVPPISASRSARTSGLPARCSSRSGG

SEQ ID NO: 50481 - protein, 249 aa, Burkholderia mallei
MDKTLDKQVAIVTGASRGIGRAIALELARRGAMVIGTATTEAGAEGIGAAFKQAGLEGRGAVLNVNDATAVDALVESTLKEFGALNVLVNNAGITQDQLAMRMKDDEWDAVIDTNLKAVFRLSRAVLRPMMKARGGRIVNITSVVGSAGNPGQVNYAAAKAGVAGMTRALAREIGSRGITVNCVAPGFIDTDMTKGLPQEQQTALKTQIPLGRLGSPEDIAHAVAFLASPQAGYITGTTLHVNGGMFMS

SEQ ID NO: 50482 - protein, 167 aa, Burkholderia mallei
MTTLTLIVARARNGVIGRDNRLPWKLPEDLAFFKRTTMGAPIVMGRKTHESIGRPLPGRRNIVVTRDAARRFDGCDTVTSLDDALALAARDGAAEAFLIGGAQLYEEGLRHADKLIVTEIDQDFEGDASFPAPDPAQWEAVSRDAHRAAQPNDFTYAFVVYRRRRAG

SEQ ID NO: 50483 - protein, 150 aa, Burkholderia mallei
MQPTTNAPERPLDCPCGGAAPGANANARAPRYADCCARLIDGHATAATALELMRSRYSAYVLGATDYLRATWDPSTCPAELDADTGRAHAPRWLGLVIKRHAQLDATHAEVEFVARYKIGGRAHRMHETSRFTRDAQGAWRYVDGDVSER

SEQ ID NO: 50484 - protein, 396 aa, Burkholderia mallei
MAKEKFERTKPHVNVGTIGHVDHGKTTLTAAIATVLSAKFGGEAKKYDEIDAAPEEKARGITINTAHIEYETANRHYAHVDCPGHADYVKNMITGAAQMDGAILVCSAADGPMPQTREHILLARQVGVPYIIVFLNKCDMVDDAELLELVEMEVRELLSKYDFPGDDTPIIKGSAKLALEGDKGELGEVAIMNLADALDTYIPTPERAVDGAFLMPVEDVFSISGRGTVVTGRVERGVIKVGEEIEIVGIKATAKTTCTGVEMFRKLLDQGQAGDNVGILLRGTKREDVERGQVLAKPGSITPHTHFTAEVYVLSKDEGGRHTPFFNNYRPQFYFRTTDVTGSIELPKDKEMVMPGDNVSITVKLIAPIAMEEGLRFAIREGGRTVGAGVVAKIIE

SEQ ID NO: 50485 - protein, 181 aa, Burkholderia mallei
MTKYDERFKLEVVQRYLSGDKGCKALAREFGVSSTQVEQWVASYKRHGADGLRRKGHVKYSAQFKLEALERMQRENLSRTHMQALLDIRDAGAIARWERQYHEGGFAALLPRPKGRRPKMSTSPLSEPAPPESEPDTRTREQLLKEVEYLRAEVAYLKKLDALIRAEQRHDLPPSIGPMGF

SEQ ID NO: 50486 - protein, 364 aa, Burkholderia mallei
MSLKCGIVGLPNVGKSTLFNALTKAGIAAENYPFCTIEPNVGVVEVPDARLKALAEIIKPERVVPAVVEFVDIAGLVAGASKGEGLGNQFLANIRETDAITHVVRCFEDENVIHVAGKVSPLDDIEVINTELALADLGTVEKALARYSKAAKSGNDKEAAKLVAVLDKARAHLDQGKAVRGLDLSDDERALLKPFCLITAKPAMYVANVKEDGFENNPHLDAVRRYAESEKSPVVAVCAAIEAEIADLDDADKEAFLADMGMDEPGLDRVIRAGFKLLGLQTYFTAGVKEVRAWTIHIGDTAPQAAGVIHTDFERGFIRAQTIAYDDFIAYKGEQGAKEAGKMRAEGKEYVVHDGDVMNFLFNV

SEQ ID NO: 50487 - protein, 281 aa, Burkholderia mallei
MLSKLNQWLDARRRDRALRSHPIPDVLWRETLERLPFLSYLSNEDRARLRETTSLFLAQKSFSTAHGLELTDAIVVGIAAQACVPVLNLGLDLYRGWVGIVVYPGEFVIRKTVEDEDGVVHEVEHDASGEAWDGGPVILSWEDVQMADGSDAYNVVIHEFAHKIDMMSGAADGHPPLFRRWHAPALDAERWADVFDHAYDQFCDRVDAVPERAWARFERDSLIYPYAADHPSEFFAVCSEALFVKPRSFEAEFPELYRLLARYYRQDPARTGCLAGSAAHV

SEQ ID NO: 50488 - protein, 338 aa, Burkholderia mallei
MFRFVLRRVGMVIPTFIGITVLAFALIHLIPGDPIEVMMGERGVDPTMHAQALHRLGLDEPLPMQYLHYVGRALHGDLGTSIITNTSVMGEFLARFPATVELSLCALAFAFALALGLPAGVFAALRRGTIADHGVMGTALTGYSMPIFWWGLILIMVFSATLGWTPVSGRIAVEYEIPHTTGFMLIDTLLSGEEGAFASAVSHLILPAIVLGTIPLAVIARMTRSSMLEVLREDYIRTARAKGLSPARIVVVHALRNALIPVVTVIGLQVGTLLAGAVLTETLFSWPGVGKWLIDAIGRRDYPVVQGGILMIATLVIVVNLVVDLLYGVLNPRIRHTR

SEQ ID NO: 50489 - protein, 211 aa, Burkholderia mallei
MRVEPAGQARSRAPQHAAAPRAPRLSRLSRGIQMEQFHGTTILSVRRGDKVALGGDGQVTLGNIVMKGGARKVRRIYNNQVLVGFAGGTADAFSLLDRFEAKLEKHQGNLTRAAVELAKDWRTDRLLRRLEAMLIAADATTTLVITGNGDVLDPEGGICAIGSGGSYAQAAARALAENTDLSPREIVEKALGIAGDMCIYTNHNRIIETIE

SEQ ID NO: 50490 - protein, 741 aa, Burkholderia mallei
VRHRRSQRRIRRSDYTPPAFLIDTVSLEFDLEPARTIVTNTMRVRRNPDAAPAPHFELMGEALVLIGARVDGKPHDAVRVHEHGLSVENVPDAFELTIENACAPESNTTLSGLYVSSGNFFTQCEAEGFRRITYFVDRPDVMASYTVTLRADQAAYPVLLSNGNLVDAGDLPNGRHFAKWEDPFKKPSYLFALVAGKLVKLEETIKSASGKDKLLQVWVEPQDLGKTRHAMDSLIHSIRWDERRFGLELDLDRFMIVAVGDFNMGAMENKGLNIFNTKYVLANPETATDVDFANVESVVGHEYFHNWTGNRVTCRDWFQLSLKEGLTVFRDQEFSADMSAGAEDDAAARAVKRIEDVRVLRQLQFAEDAGPMAHPVRPERYVEINNFYTMTVYEKGAEVVRMYQTLFGRDGFRKGMDLYFRRHDGQAVTCDDFRHAMADANGRDLALFERWYSQAGTPRVTVRTAYDAAAKRYAVTLRQGYGDAAPAARDTQKGPLLIPFAIGLIGADGRDLPLRLEGEAAASGTTRVLELTKAEATFTFVDIDAAPLPSLLRNFSAPVIVEYDYRDDELAFLLAHDSDPFNRWEAGQRLATRALLTLASRAAAQQPLTLDDAFAAAFKRVLTDDTLSPAFRELALTLPSEAYLADQMTQADPAAVHRARQFVRRQLATALRAEWLSVYERHQTPGAYAPTPGDAGRRALKNLALAYLAELDEPADAIRLATAQYDAANNMTDRACALVAL

SEQ ID NO: 50491 - protein, 294 aa, Burkholderia mallei
MTFDQWMRSVLERVETALGHYLPAGTVAPAQLHEAMRYAVLGGGKRVRPLLCHAAGELTGASEAARDAASAALEMIHVYSLVHDDMPCMDDDALRRGKPTVHVKYDEPTALLVGDALQSQAFVALTDAAALPADRQAALVRELALASGSIGMAGGQAIDLASVGVALTRDALEKMHRMKTGALLRASVRMGALAGETPSGDAMRALDAYAAAVGLAFQVVDDILDVTTDSATLGKTAGKDAANDKPTYVSIIGLDASRALAAQLRADAHAALEPFGARAQRLAELADLVVNRVS

SEQ ID NO: 50492 - protein, 138 aa, Burkholderia mallei
MTKKLLTEAEILKMSDKDYMNEDQLAFFKNRLEQLQAEILRNAGQTTENLRETVIVPDPADRATIEEEHALELRTRDRERKLLKKVQQSLARIESGDYGWCEETGEPIGIPRLLARPTATLSLEAQERRELRQKLFGD

SEQ ID NO: 50493 - protein, 213 aa, Burkholderia mallei
MFDMFVQSFWETLIMVGISGAVGALVGLPLGVLLYLTDRQGVLQNLAVNRVLGGVVNAVRSTPFIILLVAVIPFTRLAVGSSIGTAAAVVPLTIAAAPFVARLVETALREVDRGLIEAAQAMGATTGQIVFKVLLPESLPGIVAGLTITFVSLVGYSAMAGAIGGGGLGDLGIRYGYQRYLPEVMWTVVAILIVFVQIVQSFGDWLVRRLSHK

SEQ ID NO: 50494 - protein, 92 aa, Burkholderia mallei
MANSAQARKRARQAAKANSHNSALRSKFRTAIKAVRKAIDAGDQAKAAELFKAATKTIDTIADKKIVHKNKAARHKSRLSAAVKGLQAQAAQ

SEQ ID NO: 50495 - protein, 175 aa, Burkholderia mallei
MSEVQTNHPAAPNAASRRDAEQGDAAGQEFLVFTLGDEEYGIDILKVQEIRGYDSVTRIANAPDFIKGVINLRGIIVPIVDMRIKFHLGRVEYDHQTVVIILNVAHRVVGMVVDGVSDVLTLSTEQIMPAPEFGGVLTTEYLTGLGTVDGRMLILMDIEKLMTSKEMALIETLGA

SEQ ID NO: 50496 - protein, 1397 aa, Burkholderia mallei
MSDRQDSAATTEAGPPQHHHPVLRRVFKGVLAIAIAAYFIAAAAFLGLRYLLLPRIDEYRPRIEAFVSQKLHAELRIGRLAPHWSGMQPGVDISRLTIRGRDGRVALSVPHATAALSWRSLARFAPTLSSLVVDDPDLLTERRADGSLFVAGVAVPTTKTGADDTFSAWLLKQEAIVLRGGTLRWRDAQHDAPELALTGIRIAVLNDGLVHRIALQAPANGTLFHGPLDFRARFVHQALAPIGKPSNWTGDAYLSTGPVDLPTLARYANIRVTAYAGRIDNAIWAHFGDGHLYRAGGELRGYDVALRVRPTQPRLDIPVARFGWDVAIDPKRDYTLHLSRLHAELGQPPLADGTPLSRALALHTLTARYRVPNVDEGQLLSVSGDRVDLGILAEFIRGLPLPARLRNELVRFDPRGLVANYAIEVERAKPASPEFVDEERRSGTAPIIRYRFQGDLQGISFEAQEPPPGLSPHGHPRAGIPGVENLWGHVDADEKGGAARFDTVDAAVTVPGVFDEPRLAFDKLRGRASWTITPAPGERHARVDVAVPEFRVENADAAIAVAGSYANPGHGRGSLDLKADFERAAVARITRYLPTSLSDHLRLYLGHALQAGQVTKGATIVAKGPLETFPYEHDPKAGVFHIVAPFAGGRFEPTPQPPRTLANGTPNVWPALDGIDGVFELEQNRLRFDIDRARYKDVALAKVTGRIDDLGNPTHSPLVIEGRAHGPLADLLDYANHSAIAGMTGHIGNLVRAQGPATLALKLTIPQHVAHPHVGVDDALGFAGNAIEADGVPPVTRLRGNVRFTQHTASVDRLTARFLGGDVRARGALAENGRYAFDIDGRLSLDAARGLNLRGAAAAALERVVGDAPYRLAVRGAKGGLPDITASSDLTGVALEFPAPFAKPAGTPMPFSFVLAPEPQASGKPLERADLALGPLAATYLLDVERGRPVRAVRGALGMNRMPDLPQEGVSAAIDVHELDADAWQAFAQGFGKSPAAREQPAASPVDLASFAPKRFALHFGTLKLLKRNWENVIVGASHIDDIWQANIASNQVSGYLSWAPGGGPTGAGVLSARLAKLVIPESAEHDLVGRAIDLPTPTHHAMPAIDLVVDQVVARGHDIGRLEVDARNVDENGIPVWQLDKLELANPAAKLTATANWRTSRRALAHGADEEDAPRRTVFDFTLAIDDAGALLERVGLPRTVENGRGTLSGKVAWRGGPTAIDYPTLNGRLSLDLAHGQILKVDPGAAKLLGVLSLQGLARFLTLDFRDVIGKGLPFETITGTGRIDNGIARTQDFEMKTSPAKVTVTGSVDLAHETQDLNAHVAPKVSASAAAVGAAIINPFLGLGVLAANLALSQTLAHAFAMDYTITGSWAHPHIERVGGDRGKMGFAPAAVEH

SEQ ID NO: 50497 - protein, 446 aa, Burkholderia mallei
MTEQKRKLEKLTGVKGMNDILPQDAGLWEFFEATVKSLLRAYGYQNIRTPIVEHTQLFTRGIGEVTDIVEKEMYSFVDALNGENLTLRPENTAAVVRAAIEHNMLYDGPKRLWYLGPMFRHERPQRGRYRQFHQVGVEALGFAGPDADAEIIMMCQRLWDDLGLTGIKLEINSLGLAEERAAHRVELIKYLEQHVDKLDDDAQRRLYTNPLRVLDTKNPALQEIVRNAPQLIDFLGDVSRAHFDGLQQLLKANNLPFTINPRLVRGLDYYNLTVFEWVTDKLGAQGTVAAGGRYDPLIEQLGGKPTAACGWAMGVERILELLKEEHLVPEQEGVDVYVVHQGDAAREQAFIVAERLRDTGLDVILHCSADGAGASFKSQMKRADASGAAFAVIFGEDEVANGTVSVKPLRGTGAEGEKNVQQSVPVESLTEFLINAMVATAEDGDD

SEQ ID NO: 50498 - protein, 331 aa, Burkholderia mallei
MNAEGLNKSALLLMSIGEEEAAQVFKFLAPREVQKIGAAMAALKNVTREQVEDVLNDFVQEAEKHTALSLDSSEYIRTVLTKALGEDKAGVLIDRILQGSDTSGIEGLKWMDSAAVAELIKNEHPQIIATILVHLDRDQASEIASCFTERLRNDVLLRIATLDGIQPTALRELDDVLTGLLSGSDNLKRAPMGGIRTAAEILNFMTSVHEEAVIENVKQYDPDLAQKIIDQMFVFENLLDLEDRAIQLLLKEVESEALIIALKGAPPALRQKFLSNMSQRAAELLAEDLDARGPVRVSEVETQQRKILQVVRNLAESGQIVIGGKAEDAYV

SEQ ID NO: 50499 - protein, 606 aa, Burkholderia mallei
MPRAAPPASRRRPHIRKLMTQSMQASAPAPDDPTQPQPSVSTWSLIKPYWVSEEWKVAWGLLVTIVAINLTLVWINVRINSWSASFYNALQSKDVRDFPSLLITFAVLAFAFIILAVYGLYLRQMLGFRWRQWLTTRFLNEWLGDRNFYRIERDRLADNPDQRIADDLQSLASTTLSLSLDLLSTVVTLISFATILWSIAGAATISLGGHAITIPGYMVWVAMIYAIAGSYVMHRFGHPLVSINYQQQRVEADFRFSLIRIRENAEQIAFYNGEPVETAHEQGLFQRIRENWWRVMRYTKRLTFVLNFYAQLASLFPIAVAAPRYFAGAFTFGVLMQISRAFGTVSDSFSWFINSYGTLAEWRATVNRLREFKRVMGASHLKETMSPATEHGGINLHYVDARQITTSGLKLALPNGAALASIGDVAIEPGSRWLVRGPSGSGKSTLMRALAGLWPFGDGAIDAPVDARMMFVPQQSYLPIGTLKAALAYPSATDTFSDDACSEALRACGLADYVERLGETGHWTRILSPGEQQRLAGARVLLHKPDYLFLDEATSALDADNEARLYRLFDERLPKAAIVSIAHRESVASFHQQTLDVRRDEARVAA

SEQ ID NO: 50500 - protein, 282 aa, Burkholderia mallei
MGKLSLAAKITHVPSMYLSELPGRHHGCRAEAIRGHQAIGERCRALGVDTIVVADTHWLVNAGYHVNCNGHFAGVYTSNELPHFIRDMRYEYPGNPALGHLIAASANERGIGTRAHEIDSLELEYGTLVPMRYMNADQRFKVVSIAGWCMWHALDESRRFGEALRHAIDASDANVAFLASGSLSHRFNDNGSPEEAIHMISREFYRQVDLRVVELWKQGDFATFCKMLPEYNAHCHGEGGMHDTAMLLGLLGWDRYDKPVEIVTDYFASSGTGQINAIFPLP

SEQ ID NO: 50501 - protein, 339 aa, Burkholderia mallei
MTRTAVHDAARRAAPLDHDMTNEELTQLAKCYYVDGLTQEELAQKFAISRPKVGRLLKRAIEEGIVEIRVRHHPRAVQDLEQELVTRFGIQRAIISVDHKDQDSQRELLAGLVASYLDRVLADGAIVAVGMGRNVSAVSRHAVSTTQRNCSFVSAIGGSYRGGETMNADHICRRLAARFGGESETLYAPALVNDPQLFTALLENDVVRQSLDKARRASIALVGIGDILEDSNMVRMGWFTPEEMAEAKRAGAVGDIMGYDFIDIHGRPATTMLHGRVIGLTLEDLKRIPNVIATASEPTKATGILGALRAGVINTLATTQSIAQTVLSLAQATETASAA

SEQ ID NO: 50502 - protein, 64 aa, Burkholderia mallei
MKASELLQKDQAALNKELSDLLKAQFGLRMQLATQQLTNTSQLKKVRRDIARVRTVLTQKANQK

SEQ ID NO: 50503 - protein, 1319 aa, Burkholderia mallei
VAVRGQYLHFVNAHEPLTADDEARIGALMHYGAPLEPAAEKGATETFVVLPRFGTVSPWASKATDIARHCGLARVRRIERGIEFTVTLKAGVLGVGAKKALAADARAAVAAALHDRMTESVVASREDARHLFDELPAKPLATVDVLAEGRAALERANAELGLALADDEIDYLVDAFIKLERNPTDVELMMFAQANSEHCRHKIFNAQWTIDGQAQDMSLFAMIRNTEKMSPQGTIVAYSDNSSIMSGAYAERWFRAARASRASGMAGIPSSRHTLMKVETHNHPSAISPFPSAATGAGGEIRDEGATGRGARPKAGLTGFTVSNLDLPGARESWENARDAAQPAAARNAQQPCAPYGRPDRIASPLSIMIDGPLGGAAFNNEFGRPNLGGYFRVYEQNVGGQVRGYHKPIMIAGGIGNISDAHTHKHDVPAGSLLIQIGGPGMRIGMGGGAASSMATGANTAELDFDSVQRGNPEIERRAQEVINGCWQLGEHNPILSIHDVGAGGLSNAFPEIVDGAGKGARFELRKIALEESGLSPREIWSNEAQERYVLAISPADLPRFEAICARERCPFSVVGVATDERRLQLVDGEATGAAAYPVDMPMEVLLGKPPRMHRDVKRVHIERAGVDVTGVALADAARDVLRHPTVASKSFLITIGDRTVGGTSVRDQMVGPWQVPVADCAVTALDYAGFAGEAMTMAERTPLAVIDAPASGRMAVGEAITNIAAAPIASLDKLKLSANWMAACGTEGEDAKLFDTVKAIGMELCPALGIGIPVGKDSLSMKTKWNDNGVAKEVVAPVSLIISAFAPVEDVRRHLTPQLRRVADVGASVLIAIDLGRGKNRLGGSILAQVTQQVGDATPDVDDPEDLKRFFAAVQSLNARDLLLAYHDRSDGGLWATVCEMALAGHAGVSLNVDMLTLDQQHESDYGDAKDWAKQTSGRREDRTIRALFSEELGAVVQVRAADRDAVLGALREHGLSACSHVIGAVNETDAIEVYRDAKKIYEAPRVELQRAWSEVSWRIARLRDNPACADAEYDAILDAGDPGLSPVLTFDPAEDVAAPFIATGARPRVAILREQGVNSHLETAYAFDRAGFDAHDVHMSDLLAGRATLADFAGAVACGGFSYGDVLGAGEGWAKTIRFNDKLADMFAAFFARPDTFALGICNGCQMMSSLASMIPGAQAWPKFTRNKSEQFEARFSFVEVQSSPSIFFAGMEGSRIPVAVAHGEGYADFSQQGDQSRVAVAMRYVDHRGDATERYPFNPNGSPAGITSVTTADGRFTVLMPHMERVHRTVTMSWHPQGWGEASPWLRVFRNARRW

SEQ ID NO: 50504 - protein, 150 aa, Burkholderia mallei
MLITRKLEFDAGHRIPDHRSQCRNLHGHRYVLEITLRGDLVETEGAPDRGMVMDFADVKALAMEHLVSKWDHAFLVYARDEIVRSFLEKMADHKTVVLDRIPTVENLAAIAFDILANVYDAHYGVNLRLERVRLYETPNCWADVERDPRV

SEQ ID NO: 50505 - protein, 308 aa, Burkholderia mallei
MCPSPHAPHCGVMQHPHSSATPSVITSRILRLQLSSTSLFPAMSAPVRSARRLFLRLAMLSALVAGFAAPAAHAADELVVSAAASLTNAFKAVGDAYEKQHPGTKILFNFGASDVLMQQIAKGAPADVFASADQKAMDRAAAERVIADGTRRDFAANSLVLIVPADSRATFGSLRDLTAPAVKRVAFGDPASVPVGRYTEGALKAAGVWNDVGVKGVLAANVRQSLDYVARGEVDAGFVFGTDAAVMPERVKVALTVPTQTPITYPIAVVKDSRHAAAAQGFVAFVLSPAGQAVLAKYGFKPAAGGAN

SEQ ID NO: 50506 - protein, 400 aa, Burkholderia mallei
MPHVARRRPDGRLILLLGALAACGPIATDMYLPSLPAIAGGFGVTAAAAQRTLTSFMAGFSIGMLLYGPLSDTYGRRPVLLGGIALFTLASVGCFVAGSIDMLIAVRFLQAFGAGAASVLARAIARDAHEPADAAKVLSMVAIVTAIGPLLAPLIGGQVLRFSGWRGVFVVLALFGAVCATAAYLRVPETWPREKRASSAVLNSFAAYGRILVDPVAWGHMLCGGMAFASMFAYITATPFVYIDYFHVSPQHYGLLFGLNVIGIMLGNFLNARLVGRVGSLKIIAGASLLSGAASFAVAFFALTGLGGLWSIVASLFFVVGILSANCTTDLMLRYPHNAGAAAAVFGAMQLALGALANGAPFAMGVTIGATGLLCLGGRMLVLRWHGRPVKGALGRVDAA

SEQ ID NO: 50507 - protein, 290 aa, Burkholderia mallei
MTTPYAPDSRAPSARAPIGVFDSGLGGLSVLRAVRERLLDEALVYVADSRHAPYGPRDDVFIVERTLAIGEWLVAQGAKALVVACNTATAQSIAIVRERLPIPLVGVEPGIKPAALHSKTRVAGVLATQATLRSARFEALLARHAADCRFLCQPGHGLVEAIERGDTGSPALRALLASYLEPMLEAGADTLVLGCTHYPFLGAAIRDVTRNRLHLIDTGDAIARQLARVLDERGLRAPASPRPAPLPRFCSTSDGRQLQALAATLLGLDAPVESVTISSPSTAASAADPA

SEQ ID NO: 50508 - protein, 763 aa, Burkholderia mallei
  MISC_FEATURE (741)..(741): X=any amino acid
  MISC_FEATURE (755)..(755): X=any amino acid
  MISC_FEATURE (757)..(757): X=any amino acid
GQQKVRLETGEIARQASGAVIVDIEDTVVLATVVGAKSAKPGQDFFPLTVDYIEKTYSAGKIPGGFFRREGRPSEHETLTSRLIDRPLRPLFPEGFYNEVQVVIHVLSVNPEIPADIPALIGASAALAVSGLPFNGPVGAARVAYVNNEYVLNPTREQIKASRLDLVVAGTERAVLMVESEADQLPEDVMLGAVVFGHEQMQTAIDAIHELVREGGKPEWDWQPAPKDEALNARVTELAQPELLAAYQIRDKQARLTKLKEVYAATSAKLEEEAVAAGTVAADKATVGNILFDLEAKIVRGQILNGEPRIDGRDTRTVRPIEIRTGVLPRTHGSALFTRGETQALVVATLGTKGDEQIIDALEGEYRERFMLHYNMPPFATGETGRVGSPKRREIGHGRLAKRALVACLPSADEFGYSIRVVSEITESNGSSSMASVCGGCLALMDAGVPMKAHVAGIAMGLILEGNKFAVLTDILGDEDHLGDMDFKVAGTADGVTALQMDIKIQGITKEIMQVALAQAKEGRMHILGKMKDAVAGANTQLSEFAPRMITIKINPEKIRDVIGKGGSVIRALTEETGTTIDISDDGVVTIASTNSEGMAEAKKRIENITAEIEVGHVYEGTVLKLLDFGAIVNLLPGKDGLLHISEIVNERVKDINDYLKEGQQVKVKVIQTDEKGRVRLSAKALLNEAAAPGGYAAAAVSGKATAGSANARRPFFTGWAGLRGARRARKPVTILERRAXKRSKSPNSARPTCXSXRSGRSP

SEQ ID NO: 50509 - protein, 562 aa, Burkholderia mallei
MADIVAPPRAGTDLRAISALLARRFLYNVRLAPRARPLLTSPSVLPHSSMNHHACRIAASPSPPPPAAVRARRTLARGAMLVAACAALAFAAPADARRKPKPPRYPAAVSAARNVLPASVLVALQRARVPASSLSVVVERIGDRTPAVAWNASRPMQPASTMKLVTTYAGLSLLGADYRWRTSAYADGDVDENGTLHGTLYIKGTGDPKLVPEELIDLVNKIRRAGIVNVDGALVLDKTFFAPQTRDLPPLDDDASAPYNVGPDPLLYAFKALSFTVTPTDSGAIAVDVVPALANLNVDNRLVEGQGSCDAARPTLVTDANGELTASFAGDYPPSCGPTTTNLAVLNHSTFFARGFLALWRQTGGSFSGTIAEGKVPGRARPVASHHGPVLSSVVHDINKFSNNVMARNLFLTIGAVEHRPPATPAQSADTIRAFLAHSGLPTDGLALENGSGLSRDERVSALGLADMLQAANASPVAQAFVDSLPIAGVDGTMRNRLTNAPVGGNAHIKTGTLRDVRAIAGYVASADGSSYVVVSFINDDRASAARAAHDALLEWVYEGPR

SEQ ID NO: 50510 - protein, 219 aa, Burkholderia mallei
MSLGLVGRKVGMTRIFTAEGDSIPVTVLDVSDNRVTQIKTVETDGYTAVQVAFGSRRASRVTKPLAGHLAKAGVEAGEILKEFRIEADKAAELSNGAVIGPDLFEVGQKVDVQGVSIGKGYAGTIKRYNFGSGRASHGNSRSHNVPGSIGMAQDPGRVFPGKRMTGHMGDETVTVQNLEIARIDADRKLLLVKGAVPGAKGGKVFVTPAVKTRAVKGAK

SEQ ID NO: 50511 - protein, 422 aa, Burkholderia mallei
MSDEWMLPIRDERRAASRFVVLVVLVVLVGAGRSGLTSRSARGAAPRARRHRVGGRAPRWAEANATRRSRGACTRAVARTCAPGAARPKGPLRHGARTRLPNRLPKPARADVMGQSDVPCRTEHCIEETMSDFQPGILAPIPAASRYLSFRISHPEHAASVLAALRDALDGVDTVIGLGPSLVQALDRKIDGLKEFPELSVPGAPVPSTPAALWVWLRADDLGAATVRSRDIERLVAPAFELDAAANAFRYADDRDLSGYEDGTENPEGDEALEVAFVSGKGAGLDGASFVAVQQWVHDFGKMREIPGDEMDRVIGRRKDDNEELEDAPAYAHVKRTEQESFKPEAKVLRRSSPWADERRAGLYFVAFGHSFRAFEVQMRRMIGATDGVHDGLFRFTQPITGSFFWCPPVKGGKLDLSALGL

SEQ ID NO: 50512 - protein, 624 aa, Burkholderia mallei
MIPHSFLQDLLNRVDIVDVVGRYVQLKKGGANFMGLCPFHNEKSPSFTVSPTKQFYHCFGCGAHGTAIGFLMEHAGLTFPEAVQELAQSVGLTVPHEPSPMRGGGGSSDGHAPPAASKSVTTALSDVMQTACDYYRKQLRGAPNAIQYLKRRGLTGEIALRFGLGYAPDGWQNLEAAFDDYRHDSLVDAGLVIVSEKTDANGVARRYDRFRERIMFPIRNVKGQVIGFGGRVLDGGEPKYLNSPETPLFNKGSELYGLFEARLAIREHKYALVVEGYMDVVALAQLGFPNAVATLGTACTPIHVQKLLRQTDTVVFSFDGDAAGRRAARRALEACLPHAADNRTIRFLFLPPEHDPDSYVREFGTDAFSEQVKRAMPLSQFLLNEATAGKELDQPEGRAKALFDAKPLLQALPANALRAQIMHMFADRLQIPFDEVAALAEVDARIAAPARQAPARNERRRVTESEKRALRNLVMHPRIAAAIDDESVATLRALPRIGELFDEVIGHARALGDGAEFRLLSDVLRNSANAPTYDEIFREILVYDENVRDLMQQNPESDAAQEGLRERERIAGEELQAAVLKMRYDACCDRLNSLSKRSAPSSEELAEIKDLHQNLADMKRRLGL

SEQ ID NO: 50513 - protein, 466 aa, Burkholderia mallei
MKITIIGTGYVGLVTGACLAEIGHDVFCLDVDPRKIDILNNGGMPIHEPGLQEIIARTRAAGRIAFSTDIEASVAHGEIQFIAVGTPPDEDGSADLQYVLEAARNIGRHMTGYKVIVDKSTVPVRTAQRVRAVIDEALAARGLAGSAEHRFSVVSNPEFLKEGAAVDDFMRPDRIIIGVDDDAAGAIAREKMKKLYAPFNRNHERTIYMDVRSAEFSKYAANAMLATRISFMNEMSNLADRVGADIEAVRRGIGSDPRIGYHFLYAGVGYGGSCFPKDVQALIRTGSENGQPLRILEAVEDVNHAQKNVLLDKIEKRYGADLAGRTFAVWGLAFKPNTDDMREAPSRRLIASLLARGATVRAYDPVALDEARRVFALDLHDGADALARLAFVDSADDALAGADALVIVTEWKEFKSPDFAHLKSVLKAPVIFDGRNLYEPDAMAELGIDYHAIGRPYVEPFSSERG

SEQ ID NO: 50514 - protein, 337 aa, Burkholderia mallei
MFGLWIERSADVRVTGNVIVGKRDLLSPRRGNGIQLYNTTGARIAGNTISYTRDGIYVDVSHHARFEHNTIHDVRYGTHYMNSYYNVWDGNDVYHNRGGLAIMEARDQIVRGNRVWGNTDHGIMLRTIQDSLIENNVVAGNQRGLFIYDAEYNTIRGNLVVDNKIGVHLWGGSIHNDVTGNDFADNREQIRYVAASDVAWPGNYWSNYLGWDRRGRGVGDVPYKANDLVDRLTWRVPSVKVLMNSPGVQALRVVARQFSLLAVPSVVDDTAGMPAGHRGLPQWVGQAMIKLDGVFKNFGAGGPRATGFNSPKPPRANLFGLNGAKRGRGKKKPLFPN

SEQ ID NO: 50515 - protein, 621 aa, Burkholderia mallei
MQGLPPPRPPLMMTRFFAHAGRHLGVVCYKAVVKGPASGSPGLSIHTVMSKALIIAEKPSVANDIARALGGFTKHDEYYESDEYVLSSAVGHLLEIAAPEEYEVKRGKWSFAHLPVIPPHFDLNPIAKSESRLKVLTKLIKRKDVDRLINACDAGREGELIFRLIAQHAKAKQPVQRLWLQSMTPAAIRDGFAHLRTDMDMQPLADAARCRSEADWLVGINGTRAMTAFNSKGGGFFLTTVGRVQTPTLSIVVEREEKIRRFVPRDYWEVRAEFVCAGGFYEGRWFDPKFKKDEFDPEKRDSRLWSLPAAETIVAACRDHLGTVTEESKPSTQLSPLLYDLTSLQREANSRFGFSAKNTLGLAQALYEKHKVLTYPRTDARALPEDYLGTVKSTLEMLKESNNYLPHAKQVLDKNWVKPNKRIFDNSKISDHFAIIPTLQAPKSLSEPEQKLYDLVVKRFLAVFFPAAEFKVTTRITEVAGHHFKTEGKVLVEPGWLQVYGRDAEGADANLVPVQKGEKVKTDKIAAHGLTTKPPARYSEATLLSAMEGAGKLVEDDELREAMAAKGLGTPATRAAIIEGLLGEKYLVREGRELIPTAKAFQLMTLLRGLGVKELTAPELT

SEQ ID NO: 50516 - protein, 234 aa, Burkholderia mallei
MTDYVFAPPAVPSVEIAGCAARFAVRRVFCVGRNYADHAREMGADPNREPPFFFTKPADAIVPASGTVPYPTLTSELHHEIELVIAIGRGGRAIAADAALDHVWGYGVGVDLTRRDLQAEAKKAGRPWDWAKGFDASGPVTALHPAASIGHPQRGRIWLAVNGALRQQGDLADMIWPIPDVIAYASRAVELRAGDLIFTGTPAGVAALQPGERVTGGVDGVASFEFVVGEKPAA

SEQ ID NO: 50517 - protein, 503 aa, Burkholderia mallei
MDRRCASYAVRRTARSARRQAVRCDACRRRGRRIGQQASAEFAERRTDIGAPREADMGPASAALARVARAPFPPDSRAEREHREHERAARDLLPVEIPADQQQAVRDEAHEQHAEQGAGDVRPARLGQRRADERRADRVQQIRVARLRRVRPDRRRQHEPRDAVDERARDEHARGQRADAQPRVARDARLRAERACLPAERQALERDVQRAGERGDDPQRGGDAEPDAVRERVERGRRCGAQQIDRLPAVRRELLDCLADEQRAERRQKRRDAQPRDEQRIGRAERERRAEARERRARAARAMRERADEREARDVDRRAERQIDCADRQRERHPERGDREQREVVDEHALDVRERREAGRRDGEERENGRERAERGEARQTVGCVTHRMLPASGAGAAARRPRRRTGSARPRRRSPNSSTRCSTGSRSRAGRRTARRRACRESSARAGARTRRRAAPPRRRAADSRPRPARCRSAARTTRARRPRRPSRKSRRARARRRGRRA

SEQ ID NO: 50518 - protein, 577 aa, Burkholderia mallei
MPHDVSLIALLAAGFGLAMIFGYLASLLKMPPLVGYLLAGIVMGPGTPGFVGDLALAQQLAEIGVMLLMFGVGLHFSLGDLLSVRKIALPGAIVQIAVATALGAGLALWWGWSVGGALVFGLSLSVASTVVLLRALEGRGLIESVNGRIAVGWLVVEDLVMVLVLVLLPPLAALLGGGGAPAHGDAAVHAGEAGGSLWAALGVTLLKVAAFVALMLVVGKRVFPRILWLVARTGSRELFTLCMIAAAVGVAFGAAKLFDVSFALGAFFAGMMMRESEFSRRAADETLPLRDAFSVLFFISVGMLFDPRVLIDEPLHVLEVAAIVVLGKTLAAVALVLAFRYPLNTALTVGVSLAQIGEFSFILASLGRGLGLLSAEGQSLILAVALLSIALNTLLFAAVDPVLAWIRKRSAFARRLESRDDPLAALPMSTPQAHLTGQVVIVGYGRVGTRIAHALDARGIAYVVVEQNRETVEKLRADGVAVEPIVLVQAHIARAGMLVVTLPDVFDVRQIVDISRTLNPAIEIALCTNSDEEAALLANEGMGEVFVSETELAHGMTEHVLARMGAGEAHARRSAAH

SEQ ID NO: 50519 - protein, 356 aa, Burkholderia mallei
MEESKKGSGLTAEKSKALAAALAQIEKQFGKGSIMRLGDGEAVEDIQVVSTGSLGLDIALGVGGLPRGRVVEIYGPESSGKTTLTLQVIAEMQKLGGTAAFIDAEHALDVQYASKLGVNVPELLISQPDTGEQALEIVDALVRSGSIDMIVIDSVAALVPKAEIEGEMGDALPGLQARLMSQALRKLTGTIKRTNCLVIFINQIRMKIGVMFGNPETTTGGNALKFYSSVRLDIRRIGSIKKNDEVIGNETRVKVVKNKVSPPFREAIFDILYGEGISRQGEIIDLGVQAKIVDKAGAWYSYSGEKIGQGKDNAREFLRENPEIAREIENRIRESLGVAAMPQGAGSEAEIMDEEE

SEQ ID NO: 50520 - protein, 275 aa, Burkholderia mallei
MDLASVQTFIVTRGLDFGLQVIASIALWIFGRWAIRIVTNLMGKLIRRSGKVDSTLSHYLESVVSVLLTVLLILAILQVFGVQTTSFAALLAGLGLAVGTAWGGLLAHFAAGVFMQVLRPFKVGDVISAGGVTGTVKELGLFGTTIVTADNVVTLVGNNKIFSDNIANYSATPTRRVDLTAKIANGVDAADAIKRLKAALELIPNVVKHPAPDVGVLSFTPEGPLLFVRPSTQPANYWQVYCDTNRAILDTFREAGYPTPETPVAHRTTADVAKS

SEQ ID NO: 50521 - protein, 1066 aa, Burkholderia mallei
MAKFFIDRPIFAWVIAIILMLAGVAAIFTLPIAQYPTIAPPSIQITANYPGASAKTVEDTVTQVIEQQMSGLDNFLYMSSTSDDSGNATITITFAPGTNPDIAQVQVQNKLSLATPILPQVVQQLGLSVTKSSSSFLLVLAFNSEDGSMNKYDLANYVASHVKDPISRINGVGTVTLFGSQYAMRIWLDPTKLTNYGLTPVDVTSAISAQNVQIAGGQLGGTPAVPGTVLQATITEATLLQTPEQFGNILLKVNQDGSQVRLKDVAQIGLGGETYNFDTKYNGQPTAALGIQLATNANALATAKAVRAKIDEMSAYFPHGLVVKYPYDTTPFVRLSIEEVVKTLLEGIVLVFLVMYLFLQNLRATIIPTIAVPVVLLGTFAIMSMVGFSINVLSMFGLVLAIGLLVDDAIVVVENVERVMAEEGLPPKEATRKAMGQITGALVGVALVLSAVFVPVAFSGGSVGAIYRQFSLTIVSAMVLSVLVALILTPALCATILKPIPQGHHEEKKGFFGWFNRTFNSSRDKYHVGVHHVIKRSGRWLIIYLAVIVAVGLLFVRLPKSFLPDEDQGLMFVIVQTPSGSTQETTARTLANISDYLLTQEKDIVESAFTVNGFSFAGRGQNSGLVFVKLKDYSQRQSSDQKVQALIGRMFGRYAGYKDALVIPFNPPSIPELGTAAGFDFELTDNAGLGHDALMAARNQLLGMAAKDPTLRGVRPNGLNDTPQYKVDIDREKANALGVTADAIDQTFSIAWASKYVNNFLDTDGRIKKVYVQSDAPFRMTPEDMNIWYVRNGSGGMVPFSAFATGHWTYGSPKLERYNGISAMEIQGQAAPGKSTGQAMTAMETLAKKLPTGIGYSWTGLSFQEIQSGSQAPILYAISILVVFLCLAALYESWSIPFSVIMVVPLGVIGALLAATLRGLENDVFFQVGLLTTVGLSAKNAILIVEFARELQQTEKMGPIEAALEAARLRLRPILMTSLAFILGVMLLAISNGAGSASQHAIGTGVIGGMITATFLAIFMIPMFFVKVRAVFSGEKEDADEALRLAHEHMHRDDKPEHGDDAGKKD

SEQ ID NO: 50522 - protein, 980 aa, Burkholderia mallei
MRARARALRRVLDDQLHARRAVPRIAREPEREGRARGQRLRVIEPDRVEALAAARQLQLQVLVLDERLRGDVEFAREERRREALAPDGRIEQLDHLRREVGILEIAVRLDHPRERVVGQPFARDRLERGREARHVRGLERDARGHRVAAERDDQIGFALRDQVDRIAQMEAGNRAAGALHARAAVVRVRERERRPVKALLEPPRDDPDHALVPFGVEERDGGRLGGVDRREIGECLLLHAGLDLAPLAVHRVELLREFPRAAHVVGRQAFDAERHVRQAARRVQARAEAEAEIEARCAARVARGRAKERGDAGLHPSVADALQALRDEHAVVAVEPHDVGHRAERDEIEQPVEPRLGAGVAERAARAQLGAQREQHVEHHADARDMLARERAAGLVRIDDRARGGQRVAGQMVIGDEHVDAARVRGRDAVDARDSVVDGDQQVGLSRGRELDDLGREPVAVFEAVRHEVIDLRAEHPQAAHGNRAGGRAVAVVIGDDEHLAAGLERVGEERGGLRAALELRGRHEARQRGFDVGGRGDSARRVEAGEHGMQPVAGERVERGGNGGAGDDAGHAKRLSLFEQGGKRAAAPEFAQIAARRGERRGARVAAQRERELADAALRERGERRCEPVAFERGERVVPARPVLLDERRGQRVEFDERRAVRRRRGACRERVERGGRPARGRARGEREPAGAGRARQHARERARHGLHRALRMEPDRVDGRLAARVARLVDGMPEPRHLHFVLQFHPRARALTRARLVRQPDLDVAPARAQRRGAREPRELRARQIPARRVRRLHLHAELFDQRAGGVQERGGFFAGDLERRGIDQHEVIGRDPHVHGLDARPCVVAGRTAVGDEHVRRERRVVGVVGDRAEPAREPAFVRQRALEILAERVLDEPRAGDELRERGTIERMKGGRGVGGRRQREGHEEMKTLGAHDGAHCRPNGAGGRRDRAGRVGECGCVERAACVGKMIDRRALRAR

SEQ ID NO: 50523 - protein, 842 aa, Burkholderia mallei
MTAAMPRRGDPTGGAFRPGSPPKTSTSTDATGALAMHDAHVHHDHSGDTNERRDPHRPHETKTPGETAVDPVCGMKVPIDTPRRYDYQGRTYRFCSDKCATAFRASPQRFVGTPKQRAGASAAKPGTVYTCPMHPQIRANAPGACPICGMALEPLTPDATEDGNPELRSMTRRFQLGLVLAVPLVLMTMGAMVLPFDIGAGIDALLARWPRPFGMPASWSQWVQAALATPVVLWGGWPFLVRGWKSFVTRRLNMFSLIGLGVCVAYLFSVFALLFPDTLPQAFRSGHEIPLYFEASAVIVTLVLLGQVLELRARSRTSSAIRDLLQLAPHTAVRVNPDGSEQTVPLDAVVVGDTLRVKPGSKVPVDGIVVAGHSSVDESMITGEPVPAEKTEGSPVTGATVNQTGTFVMRAQKIGTDTLLARIVQMVAEAGRSRAPIQKLADQVSGGFVLAVIVLAALAFAAWAAFGPAPALANALVVAISVLIIACPCALGFATPVSIIVGVGRGAREGVLIKDAEALELMEKVDTVVVDKTGTLTEGRPRVQTIVALGGQSERALLGDAASLEGASEHPLAQAIVEHAARMGAERKPVASFDSVPGKGVKGTLDARTVALGNAHLMADLAIDCTAADADSNRLREAGQTVMYVAIDGRLAGYIGVADPIKETTPDAVQLLKASGTRIVMLTGDNPVTANAVARTLSLDGVKAGVLPEDKYRHVQALQQQGHVVAMAGDGVNDAPALAQANVGIAMGTGTDVAMNSARIVLVKGDLRGIARARALSVATMKNIRQNLFFAFVYNAVGIPVAAGVLYPWFGITLSPIFASAAMAASSVSVIGNALRLRGAKT

SEQ ID NO: 50524 - protein, 301 aa, Burkholderia mallei
MKTSNEPVWRSLLYVPAHVPRFVAKAAGCDADALILDLEDSVPPEWKAPARDGLADTVAGLAAVGHEVLVRANGPLEPLVADLRAALAAGVHGIVLPKVRGASHIEAIDELLDALEAEHGIAAGRTRIVAIIETPGAFQAMERIARASPRIAAMMLGGGDFALHCGAEARADVLRVPKQLLVIAARAARVQPLGLVGGLDEIRDLDTFERLARESADLGYAGATCIHPAQVEALNRAFRPSDAAVRAAREIVAAYDDARANGRGALRVGDRMVDAPGVAHARNVLARADAIARRPRRCAAA

SEQ ID NO: 50525 - protein, 470 aa, Burkholderia mallei
MLRVSLFPPAACAAHRAPKIPPPPPFACATDSEKYPGFPAFLDRSPVDRRGNNRCHWKAASRRAHMEARVAEDSDLDRTEAATPKRREKAREEGQVARSRELASFALLSAGFYGAWMLSGPIGEHLRTMLHTAFSFDRAAAFDTNRMLSHAGTLSLEGLYALAPVLALTGVAALAAPMAMGGWLVSTKTFELKFERLNPITGLGRIFSIQGPIQLGMSIAKTLVVGGIGGIAIWRSKDELLGLATQPLHAALADALHLVAVCCGMTVAGMLVVAGLDVPYQLWQYNKKLRMTKEEVKREHRENEGDPHVKGRIRQQQRAMARRRMMANVPTADVVVTNPTHFAVALKYTDGEMRAPKVVAKGVNLVAARIRELAAEHHVPLLEAPPLARALYHNVELEREIPGTLYSAVAEVLAWVYQLKRFRAEGGIAPETPVDLDVPAELDKGAHVAPQDEREEAEDALGGRAAGGAA

SEQ ID NO: 50526 - protein, 484 aa, Burkholderia mallei
MNLNDQIDTLDSRFDQLIRTVCEVASAARHTAVTAAADKTAAQAAFEAAAEKHTQAASMSVEQATLEALAAQAAADKEAADALARQAAAVQAAAEAAAAQAVTDKTAAEALAMQAAAERAAAERAAAQAAEDKAAAEALAAQAAADRTAAEHAATQAAADKAAAESLVAQAAAERATAEHAVTQAAAERAASEQAAARAAAEKTAAETLAAQAAAERAAAEHAAEQAAADKAQAQALAQQAAADRAAAEQAAAQAEADRAAAQHAAAQAATDRAAAEARATEQAADAKAAAESLAAQAAADRAAAEQAAAQATADKDAAESLFKQAAAERSAAEAAAARAASYKATAEALAAQAERNRAMIEAEPAAPVATAQTANGTLSLHVARPSQDEISLALGEHSVSLPPHQLSQLIEELAHARASMTIEQPSGLPNGWRFVTTRNPLMAVQKQANGDRLLVARHSGYGWVPFTFSPDVVIQLYMLLTQK

SEQ ID NO: 50527 - protein, 564 aa, Burkholderia mallei
MTRIVTRSAVPAALDALARHGLHPVLARLYAARGIASPADVETALSRLVPPAQLKGCAQAAALLADALEAGRKMLVVADYDCDGATACAVAVRGLRMFGAKIDYLVPNRFEYGYGLTPEIVELAAARKPDLLITVDNGIASVDGVAAANARGIDVLVTDHHLPGDTLPAARAIVNPNQPGCAFPSKHIAGVGVMFYVLLALRAELRARGAFGDARPEPRLDGLLDLVALGTVADVVRLDGNNRVLVAQGLQRIRNGRMQPGIAALFRAAARDARSASGFDLGFGLGPRLNAAGRLSDMSLGIECLTTDDVGRAWELAQQLDAMNRERREIEAGMQQQALADLASVDPAEAATITLFNPEWHQGVIGIVAGRLKERFHRPAFTFAHADDGGARVKGSGRSIPGFHLRDAIDLISKREPDLIVTFGGHAMAAGVTLETANVPRFAAAFETVAREWLSDDALARVIETDGDLEDAYFTPQVVELLDAAVWGQGFPAPLFSGEFDVASQALVKDKHLKLQLTRGRQRFNAIWFNHAEPLPARATLAFRLASDTWNGTTRVQLIVEHAA

SEQ ID NO: 50528 - protein, 635 aa, Burkholderia mallei
MVSIRLPDGSVRQYEHPVTVAEVAASIGPGLAKAALGGKLDGELVDTSALIDRDASLAIVTDKDADGLDIIRHSTAHLLAYAVKELHPDAQVTIGPVIDNGFYYDFSYHRPFTPEDLEAIEKRMQELAKRDEPVTRRVVSRDEAVSYFRSIGEKYKAEIIESIPASDEIKLYSHGSFTDLCRGPHVPSTGKLKVFKLMKVAGAYWRGDSKNEQLQRIYGTAWTRKEDQDAYLHMLEEAEKRDHRKLGKQLDLFHIQEEAPGMVFWHPKGWTLWQQVEQYMRRRLDAAGYLEIKTPMIMDRSLWEASGHWQNYRENMFTTESEKRDYAIKPMNCPGHVQVFKHGLRSYRDLPLRYAEFGSCHRNEASGALHGLMRVRGFVQDDAHIFCTEDQINSEAIAFNKLAMSVYEDFGFDRIDIKLSLRPEQRMGSDETWDHAEEGLRNALKACGLEWEELPGEGAFYGPKIEYHIKDALGRSWQCGTLQLDMMLPERLGAEYVAEDNSRRRPVMLHRAIVGSMERFLGILIEHHAGAMPVWLAPAHAVVLNIAESQAEYARTVAQSLQKQGLRVSADLRNEKISYKIREHTLEKVPYLLVVGDKEREAQTVAVRARGGVDLGVMPVEAFVERLREDIQAFK

SEQ ID NO: 50529 - protein, 101 aa, Burkholderia mallei
MAKLALIEREKKRARLAQKYAPKRAELKAIIDDASKSDEERYAARLELQQLPRNANPTRKRNRCAITGRPRGTFRKFGLARNKIREIAFRGEIPGLTKASW

SEQ ID NO: 50530 - protein, 415 aa, Burkholderia mallei
  MISC_FEATURE (179)..(179): X=any amino acid
MTVRHTVSARSLRALDWLNFFVANVQTGFGPFIASYLASHKWTQGEIGMVLSIGTISAMVSQVPGGAAVDALKNKKGAAAWAIAAIILSAVLLAASPTVVPVIAAEVFHGFASCMLVPAMAAISFALVGRESLGDRLGRNARWASLGSAVAAGLMGLTGEYFSARAVFWLTAALALPAXVALAMIEPTHHHHHAAPRADEDEDEERETLRELLRDKRMLIFAACVVLFHLSNAAMLNLAAGEVTAGMGENVQLVIAACIIVPQAIVAMLSPWVGRSAQRWGRRPILLLGFAALPLRALLFAGVSSPYLLVPVQMLDGISAAVFGVMLPLIAADVAGGKGRYNLCIGLFGLAAGVGATLSTALAGFAADHFGNAMSFFGLAAAGALATLLVWFAMPETRDAALAEDARHSSAEPAQ

SEQ ID NO: 50531 - protein, 135 aa, Burkholderia mallei
NTIRGNLVVDNKIGVHLWGGSIHNDVTGNDFADNREQIRYVAASDVAWPGNYWSNYLGWDRRGRGVGDVPYKANDLVDRLTWRVPSVKVLMNSPAVQALRVVARQFPLLAVPSVVDDAPRMRAAHAGWPQWVGKR

SEQ ID NO: 50532 - protein, 336 aa, Burkholderia mallei
MSFNLHNRNLLSLIHHNARELRYLLDLARDLKRAKYSGTEQPRLLRKNIALIFEKTSTRTRCAFEVAAYDQGANVTYIDPASSQIGHKESMRDTARVLGRMYDAIEYRGFSQEIVEELAHHAGVPVFNGLTDEYHPTQMLADVMTMREHSDKPLHDIRYAYLGDARNNMGNSLLLIGAKLGMDVRIGAPKSLWPAADFIAQCEAFAAESGARLTLTEDPYEAVKGVDFIHTDVWVSMGEPVEAWDERINALLPYQVNRKLIESTGNPRTRFMHCLPSFHNCETKVGKQIAERYPHLQDGIEVTDEVFESPRCIAFEQAENRMHTIKAVLVSTLGGI

SEQ ID NO: 50533 - protein, 633 aa, Burkholderia mallei
MLARRGLQVQIRAARGLPHALAHRVLELRRQHERAQLAARGEAVRDVARERRAHVLDEQDRILLLRPPLRERFENQLHVANRDLLGEQALEHLRDALHRNVPIALLDELRVLLVHVVEQALGFLHAEEFRYVGEHHREKLPVQIVDRRAREHVDLRERVGLRARHPPRVAARAVRQRHDVDGQPFERERRADHAVPVEADRERRRADLVDQHDRLARMHLRRIHDADVGQAQPHVDERAPPERADHAFLLEHRLRRLGHHQHQRHRLRNQLVDVDIAGAAVGRFRRAAARERARDLADEPALARRLARLAPFAAHVQRAERERDQQEDDQRKAGQQADREREHGRDDEHERVREQLADDVRAEVVARAAHAGDDEARADRDQERRDLRDEAVADRQDRVGRERVGHRHAVLHHADRDAADQVHEDDDDAGDRIALDELHRAVERAVQLAFTLERRAARLHAFVVDDAGAQVRVDAHLLAGHRVEREARRDFGDALRALRDHDELHDRHDHEHDEADHEVIADHELPERRDDLAALGGEQDHPARADRQREPEQRRDQQDRRKRRELEDVDDVERAHEHEQRRHDVQADQEIEHVRRQRHDQHRDHEHHQAQDDQFGARLGLDQEILQHDYRPD

SEQ ID NO: 50534 - protein, 203 aa, Burkholderia mallei
MMVLYSGTTCPFSQRCRLVLFEKGMDFEIRDVDLFNKPEDIAVMNPYGQVPILVERDLILYESNIINEYIDERFPHPQLMPADPVQRARARLFLLNFEKELFVHVSTLENEKGKAAEKSHEKARLAIRDRLTQLAPIFLKNKYMLGEEFSMLDVAIAPLLWRLDHYGIELSKNAAPLMKYAERIFSRPAYIEALTPSEKVMRR

SEQ ID NO: 50535 - protein, 874 aa, Burkholderia mallei
MKAAEIREKFLKFFESKGHTIVRSSSLVPGNDPTLLFTNSGMVQFKDVFLGAETRPYSRATTAQRSVRAGGKHNDLENVGYTARHHTFFEMLGNFSFGDYFKRDAIHYAWELLTSVYKLPADKLWVTVYHDDDEAYDIWAKEVGVPAERIIRIGDNKGARYASDNFWQMGDTGPCGPCSEIFYDHGPDVWGGPPGSPEEDGDRYIEIWNLVFMQFNRDAQGNMTRLPKPCVDTGMGLERIAAVLQHVHSNYEIDLFQQLIKASARETGVADLANNSLKVIADHIRACSFLIVDGVIPGNEGRGYVLRRIVRRAIRHGYKLGRKAPFFHKLVADLVAEMGAAYPELKEAEPRVTDVLRQEEERFFETIEHGMSILEAALAELDAAGGKTLDGELAFKLHDTYGFPLDLTADVCRERGVTVDEPAFDDAMARQREQARAAGKFKATQGLEYTGAKTTFHGYEEIAFDDAKVVALYVEGASVGEVKAGESAVVVLDHTPFYAESGGQVGDQGVLANAATRFAVGDTLKVQADVIGHHGELEQGTLKVGDVVRAEIDAARRARTARNHSATHLMHKALRDVLGSHVQQKGSLVDADKTRFDFAHNAPLTDDEIRRVEAIVNEQVLANAPGIVRVMPYDDAVKGGAMALFGEKYGDEVRVLDLGFSRELCGGTHVHRTGDIGLFKIVAEGGVAAGIRRVEAITGDNAVRYVQALDARVNAAAAALKAQPSELLQRIGQVQDQVKSLEKELGALKSKLASSQGDELAQQAVEVGGVHVLAATLDGADAKTLRETVDKLKDKLKSAAIVLAAVDGGKVSLIAGVTADASKKVKAGELVNFVAQQVGGKGGGRSDMAQAGGTEPAKLPAALAGVKGWVEARL

SEQ ID NO: 50536 - protein, 310 aa, Burkholderia mallei
MNLKNALLLIVLAALWGASFLFIRVGVAAFGVAPLMALRVDIGALFLVALMLTRYAPRELIALLRQHAWPLFVVGLLNSAAPFCLFAFAELTLSAGVTSVINATTPLWGALVAYLWLKDSLSLPRALGLVIGFAGVLTLVWDQVFSPHGANPASPATAALAAAAALGATLLYGIAANFTKRKLTGVDPLVSATGSMVGATILLLPFALATWPAAPVSAHAWGSVLALGIACTGVAYFIFFHLIAHIGPARAITVTFVIPVFGILWGALFLGERVSFAMLEGCVIVLLGTALATGAIRRIPGVRPQRNETA

SEQ ID NO: 50537 - protein, 224 aa, Burkholderia mallei
MKRTVHWKAGATLAVVATFAGPASAATNAAPAPNADGGKPVIVVLGDSLSAEYGLPRDTGWVALMRARLAAERIDYSVANASISGDTTSGGRARLPAVLARLKPAVVVVELGANDALRGVPLAATEGNLREIVAQARQARAQVLLVGMYVPSNYGPDYTQKFHGVYTGLSKEMRVPLVPFLLAGIENKPDMFQADQIHPTQAAQRQLLDNVWPALKPLLRTSSR

SEQ ID NO: 50538 - protein, 591 aa, Burkholderia mallei
MAAIKTSLPRRKFDVVIVGAGGSGMRASLQLSRAGLSVCVLSKVFPTRSHTVAAQGGIGASLGNMSEDNWHYHFYDTIKGSDWLGDQDAIEFMCREAPNVVYELEHFGMPFDRNADGTIYQRPFGGHTANYGEKPVQRACAAADRTGHALLHTLYQQNVAAKTQFFVEWMALDLIRDADGDVLGVTALEMETGDVYILEGKTTLFATGGAGRIFAASTNAFINTGDGLGMAARSGIALQDMEFWQFHPTGVAGAGVLITEGVRGEGGILRNANGERFMERYAPTLKDLAPRDFVSRSMDQEIKEGRGVGPNKDHVLLDLSHIGAETIMKRLPSIREIALKFANVDCIKEPIPVVPTIHYQMGGIPTNIHGQVVGTSRDHKEPINGFYAVGECSCVSVHGANRLGTNSLLDLVVFGRAAGNHIVEHVKNQRDHKPLPADAADFSLSRLAKLEKSTSGEYTQDIANDIRATMQKHAGVFRTSALLKEGVEQMAGLKERAAAVHLKDKSKVFNTARVEALELANLIEVARATMVSAEARKESRGAHAHSDYEHRDDENWLRHTLWYSEGDRLDYKPVQMKPLTVESVPPKARTF

SEQ ID NO: 50539 - protein, 252 aa, Burkholderia mallei
MNDEQLLRYSRHILVDEIGIEAQQRFLDAHAIVVGAGGLGSPAAMYLAAAGVGTITLVDADTVDLTNLQRQILHATDSVGRKKVESGRDALARLNPDVKVNAVAERVDDAWLNAHVPHASVVLDCTDNFATRHAINRACVAHRVPLVSGAALRFDGQISTFDFREPGSPCYACVFPEDQPFEEVACSTMGVFAPTVGIIGAMQAAEALRVIGGIGATLVGRLMMLDSLRMEWNTMKIARQPDCPVCGAGGAH

SEQ ID NO: 50540 - protein, 296 aa, Burkholderia mallei
MSHGGSPLGRPPRSPRPTRAPPAARPPSAPPRPRNREPAAEPVKIGRFCPAVAHRRDGALRGSMLLKTTRRLVVASLAALLAACGSAPVGPGFYRVERGDTLSKIARSNRQSVANIARWNQITNPDAIEVGQVLRVAPPPGTASTSGTTGASRGPSRQAPSSSATSPASSVKPASSISLVWPAAGSVIRSFDGSKSKGIDIANTAGTPVIAAAAGTVVYAGNGLRGYGNLLIVKHDADFLTTYAHNRALLVKEGQTVAQGQKIAEMGDTDNDRVALHFELRYGGRSIDPARYLPSR

SEQ ID NO: 50541 - protein, 434 aa, Burkholderia mallei
MRKTHPAPLPKLERVTCYETKGIVMKSPNVSRQTFDEVMVPVFSPAPFIPDRGEGSRVWDTEGRDYVDFAGGIAVTALGHGHPELLKVLDEQSRKLWHIGNGYTNEPVLRLAKRLESLTFADRAFFANSGAEANEAALKLARRVAFERHGADKYEIVSFLQSFHGRTFFTVSVGGQSKYSEGFGPVPEGIKHLPFNDIAAAQAAIGPKTCAVIVEPIQGEGGVIPADPAFLKALREACDAHGALLIFDEVQTGVGRTGHFYAYMDTGVTPDILTTAKALGNGLPIGAMLTTEALAAHFKVGVHGTTYGGNPLASAIAEKVVELVGDPALLEGVKQRSARLTATLEKINARFKLFKEIRGKGLLIGAELVGALDGRAKDFVSAAAEHGVIMLIAGPNVLRFAPSLVIPLDVLDEGLARFEKAVEQVLAQAEAAPR

SEQ ID NO: 50542 - protein, 802 aa, Burkholderia mallei
MRAAGACRACPAPLPPERRPRAGFFARRCRARHARRARRNEPNARAEHAGRHGSGLDCRCIARICKSHQQALCFKSRKSNGAGRTGRAVFVQSHQEVHVPRKTPIERYRNIGISAHIDAGKTTTTERILFYTGVSHKIGEVHDGAATMDWMEQEQERGITITSAATTAFWKGMAGNYPEHRINIIDTPGHVDFTIEVERSMRVLDGACMVYDSVGGVQPQSETVWRQANKYKVPRIAFVNKMDRVGADFFRVQRQIGERLKGVAVPIQIPVGAEEHFQGVVDLVKMKAIVWDDESQGVKFTYEDIPANLVELAHEWREKMVEAAAEASEELLEKYLTDHNSLTEDEIKAALRKRTIANEIVPMLCGSAFKNKGVQAMLDAVIDYLPSPADVPAILGHDLDDKEAERHPSDDEPFSALAFKIMTDPFVGQLIFFRVYSGVVESGDTLLNATKDKKERLGRILQMHANERKEIKEVRAGDIAAAVGLKEATTGDTLCDPGKPIILEKMEFPEPVISQAVEPKTKADQEKMGLALNRLAQEDPSFRVQTDEESGQTIISGMGELHLEIIVDRMKREFGVEATVGKPQVAYRETVRTVAEDVEGKFVKQSGGRGQYGHAVIKLEPNPGKGYEFLDEIKGGVIPREFIPAVNKGIEETLKSGVLAGYPVVDVKVHLTFGSYHDVDSNENAFRMAGSMAFKEAMRRAKPVLLEPMMAVEVETPEDFMGNVMGDLSSRRGIVQGMEDIAGGGGKLVRAEVPLAEMFGYSTSLRSATQGRATYTMEFKHYAETPSNVSEAVINAKQVGRG

SEQ ID NO: 50543 - protein, 483 aa, Burkholderia mallei
MVKFAVLPFTFEPRPRASSPIMSDTRPDTLFALTALSPLDGRYASKTEALRNWLSEAAFMRHRVTVEVHWLIALSRAGFAEVPRFSEAAEQFLLQLVERFTAHDAARIKEIERVTNHDVKAVEYWLKESVKGQVELEQASEFIHFACTSEDINNTSHGMMLAGARQHVILPALRTVHGRLVALAHAHAEQPMLSRTHGQPASPTTLGKEIANVAARLARAIERIEKVEILGKMNGAVGNFNAHLSAYPEFDWEAFSRDVIEHRLKLTFNPYTIQIEPHDYMAELFDAVSRANTILLDLDRDVWGYISLGYFKQKTKAGEIGSSTMPHKVNPIDFENSEGNLGLANATLRHLADKLPVSRWQRDLTDSTVLRNIGVAFGYSLLAYDALIRGLDKLEVNPQRLNDDLDNCWEVLAEPVQTVMRRYGIENPYEQLKELTRGKGITRDALQQFIGTLAIAEDAKARLLAMTPASYIGKAVELAKRIA

SEQ ID NO: 50544 - protein, 481 aa, Burkholderia mallei
ACARPGGRPSAGRKTAGGRPRPANGPRHAPTMDLSSKRYNMGLNDSLLDMQLLTIGINHHTAPVALRERVAFPLEQIKPALSTFKSVFLGHPAPNAPEAAILSTCNRTELYCATNDRAARDAAIRWMSDYHRIPADELAPHVYALPQSEAVRHAFRVASGLDSMVLGETQILGQMKNAVRTASEAGSLGTYLNQLFQRTFAVAKEVRGTTEIGAQSVSMAAAAVRLAQRIFEQVAQQRVLFIGAGEMIELCATHFAAQGPRELVVANRTAERGAKLAERFGGRAMPLADLPARMHEFDIIVSCTASTLPIIGLGAVERAVKARRHRPIFMVDLAVPRDIEPEVGKLKDVFLYTVDDLGAIVREGNASRQAAVAQAEAIIETRVQNFMQWLDARSIVPVIRHMHTQADALRRAEVERARKMLARGDDPDAVLDALSQALTNKLIHGPTSALNRANGADRDSLIDLMRGFYQHAPRSSDTSDR

SEQ ID NO: 50545 - protein, 262 aa, Burkholderia mallei
MKAITSRDNPLYKRLKALAGSTHQQRRGEQALLEGFHLASAYLDAAGQPQLCVVTDGALAHEEARGIVARIEPARVVTLPDVLFGQLSNVVNGVGLLLLVARPAPALPARVAGTSVVLDGVQDAGNVGSILRSAAAAGVERVFCAPGTAYAWSSKVLRSAMGAHFLLDIHEDVDAGTLIERLAIPVALTDSHGARAIYDCDLAGPLAWVFGNEGAGVSARWREAATHRVTIPQPGGMESLNVAAAAAVCLFEQCRQQRALRA

SEQ ID NO: 50546 - protein, 852 aa, Burkholderia mallei
RTTDPRVCRQRGAAFPCKQTLALIRCASSRPATRGSIRRSPVSNFNIRKVAVLGAGVMGAQIAAHLVNARVPVLLFDLPAKEGPKNGIALKAIENLKKLSPAPFGVKDDAKYLEAANYEDDIAKLAECDLVIEAIAERMDWKHDLYKKVAPHIASHAIFATNTSGLSITTLSDGFADELKARFCGVHFFNPPRYMHLVELIPTAHTRPQILDQLETFLTSVVGKGVVRAKDTPNFIANRVGIFSILAVITEAEKFGLRFDEVDDLTGSRLGRAKSATFRTADVVGLDTMAHVIKTMQDNLADDPFFPVYKTPAVLAKLVEQGALGQKTGGGFYKKEGKAIKVLDAKTGAYVDSGAKADETVGRILKRPPAERLKLLRETQHPHAQFLWSIFRDVFHYIAFHLESIADNARDVDLAIRWGFGWNEGPFEGWQAAGWKQVAEWVQEDIAAGRALANVPLPAWVLDGVVAEKGGVHTAEGSWAPAAQRFAPRPDLAVYDKQVFRAPVFGEAGRDPKTFGKTLFETDSVRAWVDDRAGEDDVVIVSFKSKMNTIGPGVIDGLAQAIELAEKDYKAVVIWQPSSLKLGNPGGPFSAGANLEEAMPAFMMGGAKGIEPFVKKFQQGMLRVKYANVPVVAAVSGLALGGGCELMLHSAKRVVHVESYIGLVEVGVGLVPAGGGLKEAALRAADAATAAGMTSELLKFLTKPFENAAMAKVSMSAHEARAMGYVKPSDTIVFNVFELLDVAKKEARGLAAAGYRAPLKAKEIPVAGRSAIATIKAQLVNMRDGRFISDHDFLIASRIAEAVCGGDVEAGSTVDEEWLLALERRAFVELLGTQKTQERIMGMLQTGKPVRN

SEQ ID NO: 50547 - protein, 825 aa, Burkholderia mallei
MTYQVLARKWRPKDFASLVGQEHVVRALTHALDGGRLHHAYLFTGTRGVGKTTLSRIFAKALNCETGVTSQPCGVCRACREIDEGRFVDYVEMDAASNRGVDEMAALLERAVYAPVDARFKVYMIDEVHMLTNHAFNAMLKTLEEPPPHVKFILATTDPQKIPVTVLSRCLQFNLKQMPAGHIVSHLERILGEERIAFEPQALRLLARAAQGSMRDALSLTDQAIAYSANEVTETAVSGMLGTLDQTYMVRLLDALAAADGPQILAVADEMALRSLSFSAALQDLASLLHRIAWAQFAPASVLDEWPEAADLRRFAELLSPEQVQLYYQIATVGRGELGLAPDEYAGFTMTLLRMLAFEPATTGGGAPAGGVPARVAGAAPKSGARAAAAVGASAVPAVTGATGATGAALAPKAAAARAATRAEAPPAAPARPATAERGDDASDGDAPVPAKANARASADSRCDERDAQPPADSGSASGAASSAPPDTAFESAPRAAAPSAATPAAVPDARAPAAASAEDAVEAAAPAAPESRPPTPAAGAPVSRATGAAAALDVLRNAGMRVSSGRGAGAARPAAGPAASPTKPAPRAQVSVPTPRARAATGDAPPNGAARAEARAESRGAPPPWEDIPPDDYVPLSMDDGFIPPDDGFVPVFDSGPDDVRVAPKPAPAPPVDTRPLPEPIPLDAIGYDGEWPTLAASLPLKGVAYQLAFNSELTAADGGTLKLAVPVPQYADAAQVAKLKAALADALGKPVDVAVEVGPARRTAAALAAAERAKRQREAEQEMSADPFVQQLLREFGASIVEGSIRPVGAEAGAADGASPTLH

SEQ ID NO: 50548 - protein, 371 aa, Burkholderia mallei
MALETFVNSEPFTFGVELEIQIVNTHNYDLTKAASDLMRLIKDAKFPGNITPEITESMIELSTGICRTHDQALGELHAIRDTLVSAADQLNVGLCGGGTHAFQQWSERQIFDAPRFQYISELYGYLAKQFTVFGQHVHIGCPDADSALFLLHSMSRFIPHFIALSASSPYVQNVDTGFHSARLNSVFAFPLSGRAPFVLTWHGFEEYFTKMVNTGVVNSMKDFYWDIRPKPGYGTIEVRVMDTPLSVDRAAAIACYIQTLARYLLIDRPLKLSEDDYLVYTFNRFEACRFGLEGTCVNPQTGERRTIAEDILDTLDRIAPHAAALGSRAALDEIGALAKARVNDASWLRTIFKQEKSLNETVRQQCLRWRE

SEQ ID NO: 50549 - protein, 364 aa, Burkholderia mallei
MSLKCGIVGLPNVGKSTLFNALTKAGIAAENYPFCTIEPNVGVVEVPDARLKALAEIIKPERVVPAVVEFVDIAGLVAGASKGEGLGNQFLANIRETDAITHVVRCFEDENVIHVAGKVSPLDDIEVINTELALADLGTVEKALARYSKAAKSGNDKEAAKLVAVLDKARAHLDQGKAVRGLDLSDDERALLKPFCLITAKPAMYVANVKEDGFENHPHLDAVRRYAESEKSPVVAVCAAIEAEIADLDDADKEAFLADMGMDEPGLDRVIRAGFKLLGLQTYFTAGVKEVRAWTIHIGDTAPQAAGVIHTDFERGFIRAQTIAYDDFIAYKGEQGAKEAGKMRAEGKEYVVHDGDVMNFLFNV

SEQ ID NO: 50550 - protein, 668 aa, Burkholderia mallei
MFGKLTLSAIPFDQPIIMGAGAFMALVVLGILGALTYTKRWKWLWCEWLTTVDHKKLGVMYIIVALIMLLRGFADAVMMRLQLALAYNGPGYLPPHHYDQIFTAHGVIMIFFMAMAFMIGLMNIIVPLQIGARDVAFPFINSLSFWMTAVSAILINISLVVGEFAQTGWLAYPPLSELQFSPGVGVDYYLWALQISGVGTLLTGVNFFVTILRMRAPGMTLMKMPVFTWTALCTNVLIMASFPILTVTLALLGLDRYLGMHFFTNDAGGNAMLYLNLIWAWGHPEVYILILPAFGIFSEVVATYAKKPLFGYKTMVYASCAIMVLSFLVWLHHFFTMGSGANVNAFFGMMTMVIAIPTGVKVFNWLFTIYRGRLEFSTPILWTIGFMVTFTLGGMTGVMMAIPGADFVLHNSLFLIAHFHNVIIGGVLFGYLAGFNYWFPKVFGFKLNETLGKAAFWFWQVGFYVAFVPLYVLGFMGMTRRLNHYDNPAWHPWLIVAACGAALIAIGIACQLLQLAVSLRDRRLPENRDPTGDPWGGRTLEWATASPPPAYNFATIPTVHALDEFAYRKERGLGIGKPAEYRDIHMPSNTSAGLFVGVFSLVLGFAAVWHIWWLAIAALAGILVTVIAYSAGENDGYYIPADAVRRIEEKRGGARFVARPAQVELEAN

SEQ ID NO: 50551 - protein, 179 aa, Burkholderia mallei
MPTEKEQGEPASRHEAPAKSRQAGKNVWAQAINFGSIMKTFSAKAHEVTREWYVIDATDKVLGRVASEVARRLRGKHKPEFTPHVDTGDFIIVINASKLKVTGNKTLDKKYYRHSGYPGGIYETTFGKMQERFPGRALEKAVKGMLPKCPLGYAMIKKLKVYAEATHPHSAQQPKALEI

SEQ ID NO: 50552 - protein, 309 aa, Burkholderia mallei
MEQVNRVIRQSLASDVLLINQIAEYIIGAGGKRLRPALLLLVAGALGENTSQKHVLAAVVEFIHTATLLHDDVVDESELRRGRKTANALFGNAASVLVGDYLYSRSFEMMVGVGKMRVMEILSEATTIISEGEVLQLLNMHDADVDEARYMQVIRYKTAKLFEAAARLGAVLAGADAPTEAAAAEYGRRIGTAFQIMDDWLDYAGTAESMGKNAGDDLREGKPTLPLIYLIERGTPEQSTLAREAIEHGGTDRFDTIFDAITRSGALDHTLECARQEAQAAAAAISSFPSSNFKESLLELCSYSMSRQS

SEQ ID NO: 50553 - protein, 214 aa, Burkholderia mallei
MATTRKPRGGAGGATQPALDFDAPGEIVCGVDEAGRGPLAGPVVAAAVVLDPARPIVGLDDSKALSAKKRERLFDEIVAYALAYSVASASVEEIDSLNILHATMLAMKRAVEGLSVLPTLAKIDGNRCPMLAIRSEAIVGGDALVPSISAASILAKVTRDRMLVELHQQFPMYGFDAHAGYGTPQHLAALREHGPCEHHRRSFAPVREAFDLIR

SEQ ID NO: 50554 - protein, 596 aa, Burkholderia mallei
MIKEVRVSFTLHGIPVSRGIAIGRAYLIAPAALDVAHYLIEAERIEAEIERFRTALGAVRRELDVLRADLTDDTPTEVAAFIDVHAMILGDAMLVQETIDLIRTRRYNVEWALTEQLDVLAGHFDDIEDEYLRERKADIEQVVERVLKALAGAPSAAQALDRAAGNGRDEMIVVAHDIAPADMMQFKTQSFQAFVTDLGGRTSHTAIVARSLGIPAAVGVQHASALIRQDDLIIVDGDQGIVIVDPAPIVLEEYSYRQSEKALEQRKLQRLKFSPAQTLCGTKIDLLANIELPDDAKAAVDAGAVGVGLFRTEFLFMSKVRMPEEEEQFAAYKRAVELMHGMPVTIRTIDVGADKPLDVYDEGYETAPNPALGLRAIRWSLSEPQMFLTQLRAILRASAFGQVKILVPMLAHAQEIDQTLDLINEAKRQLDAAGLAYDPNVRVGAMIEIPAAAIALPLFLKRVDFLSIGTNDLIQYTLAIDRADNAVAHLYDPLHPAVLHLIAFTLREAKRAGVPVSVCGEMAGDPALTRLLLGMGLTEFSMHPSQLLVVKQEILRAHLKALEKPTADVLASFEPEEVQAALARLASAEPRADVAA

SEQ ID NO: 50555 - protein, 299 aa, Burkholderia mallei
MTTVNLAAYRFVSLDSIEQWRPLVAARCNTLGLRGTILLAPEGINLFIAGPREATDAFVDYIRHDPLFEGKFADLPFKESLSDSQPFRRMLVRLKREIITMKKPAIKPELGRAPSVDARTLKAWLDQGHDDAGRPVVMLDTRNAFEVDVGTFDRALDYRIDKFSEFPAVIEANRADLEGKTIVSFCTGGIRCEKAAIHMKDVGIENVYQLEGGILKYFEEVGGAHYHGDCFVFDYRTALNPQLAPTADVTCFACRAVVPADAQQSPLYVPGKCCPACHPGDSGTPGRRAEPGAEPARAV

SEQ ID NO: 50556 - protein, 55 aa, Burkholderia mallei
MAKGARDKIKLESTAGTGHFYTTTKNKRNMPEKMEIMKFDPVARKHVAYKETKIK

SEQ ID NO: 50557 - protein, 490 aa, Burkholderia mallei
MTQWEVVIGLETHAQLSTVSKIFSGASTQFGAQPNTQACPVDLALPGVLPVLNRGAVERAIRFGLAIGATVAPRSVFARKNYFYPDLPKGYQISQYEIPVVQGGQITIQVPANEKAGKQAYSKTVNLTRAHLEEDAGKSLHEDFAGMTGIDLNRAGTPLLEIVTEPEMRSAAEAVAYAKALHGLVMWLGICDGNMQEGSFRCDANVSVRPVGQEKFGTRAEIKNLNSFRFLEDAINYEVRRQIELIEDGGEVVQETRLYDPDKRETRSMRSKEDAHDYRYFPDPDLMPLVIGADWIARVKGEMPELPAVMQQRFIEQYGVSAYDAGVLTSTKAMAEYFEALVAKAGAANAKLAANWLMGDVSSQLNRDGIDIDACPVSAAQLALVLQRIADGTISNKIAKEIFVTIWDEKAADEGAADRIIEAKGLKQISDTGALEAIIDEVLAANAKSVEEFRAGKDKAFNALVGQAMKATKGKANPQQVNELLKKKLG

SEQ ID NO: 50558 - protein, 156 aa, Burkholderia mallei
MKLHIVAVGHKMPGWIASGFDEYAKRMPPELRIELREVKPELRSGSRTADSVMAAEQQRIEAALPKNARVVALDERGRDWTTMQLAQALPAWQQDGRDVAFVIGGADGLAPALKSRAELLLRVSSLTLPHGMVRVLLAEQLYRAWSITQNHPYHRA

SEQ ID NO: 50559 - protein, 449 aa, Burkholderia mallei
MGEAANERAAGRSAPIGRTGDKPEANRPRRRAPFHYNRHLDVAARRRQRRAGAARRTPHAARGALGARLRDGCGIAFARVHAHASFDTVQSRLHSFFSARSMANSGNPRPMRRVRGLAGLVLFNCIVGLSSWASRRDDAVLPYLVLANGIGLSALLLSLCADKLTRGKLAVLPKVLIVAPVSVLAGFEIAASTVGHVPHLIGRASVREWLGYGSSFVVTGIACAFVSLFMQAARMRASLETQRREAAEARQAETAARLALLQAQIEPHFLFNTLANVQSLIERDPARASTMLDSLNRYLRASLGRTRKAASTLGEELELIEALLQIASIRLGERLRYAIDVPAPLRELAFSPLLLQPLVENALLHGIEPSLDGGEIRVCGRRNGKLLELSVIDTGVGLGNGETRLHGGVGLANVVARLTSLYGARGRVSVGATAGATRGVTAALQIPID

SEQ ID NO: 50560 - protein, 323 aa, Burkholderia mallei
MIDRFFARRATGPHARAALGIGDDCALLAPEPGKLLAVSTDMLVEGRHFLADVDPRALGHKTLAVNLSDLAAMGAAPRAFTLACALPRADADWLEAFSDGLFALAERHGCELIGGDTTSGPLNLCVTVFGDVACGAALRRDAARDGDDVWVSGTLGDARAGLGVIRGEWRAGEREAAAFRRALEWPQPRVALGVALAGIAHAALDVSDGLAGDLPHILERSNVRADVDVDAVPRSAALATLPADVQRRCMLEGGDDYELCFTAAPSARTAIDAAGARAGVAVTRIGTIRGLSAPTDARAVTWRDASGAPLSLTLHGFDHFHAN

SEQ ID NO: 50561 - protein, 508 aa, Burkholderia mallei
  MISC_FEATURE (190)..(190): X=any amino acid
MKNDPNRRSRTRTPGSPCVEAFDDPIAAVARLSEIYETNTAFLRDAFARYRGNEAFDEHVRACYPFVRIRTDVNTHIDSRRSYGFVAGPGVFETTVTRPDLFANYYREQLRLLAKNHHVRIEVGVSAQPIPVHFAFSEGIHLEGDLDRDRLVAMRDVFDTPDLAYLDDRIVNGTYEPAPGEPHPLALFTXARVDFSLHRLRHYTATLPTHFQNYVLYTNYQFYIDEFVKLGRTMMSASDDPEVRAYRSEYTAFVEPGDVITYNANLGEDASEGTPPPRLPQMPAYHLKRADGSGITMVNIGVGPSNAKTITDHIAVLRPHAWVMLGHCAGLRNTQRLGDYVLAHGYVREDHVLDADLPLWVPIPALAEVQVALERAVAQVTQLEGAELKRVMRTGTVASVDNRNWELRDHREPVQRLSQSRAIALDMESATIAANGFRFRVPYGTLLCVSDKPLHGELKLPGMADQFYRGQVDQHLQIGVKAMEILRTNGLDRLHSRKLRSFAEVAFQ

SEQ ID NO: 50562 - protein, 512 aa, Burkholderia mallei
MIANANANANANANANANAARPRGTLMIQGTTSDAGKSTLVAGLCRLARRTGARVAPFKPQNMALNSAVTANGGEIGRAQALQALAAGIEAHTDLNPVLLKPTGDRGAQVIIHGTARANLDARAYHDYKPTAMRAVLESYGRLRGAYDAVIVEGAGSPAEINLREGDIANMGFAEAVDCPVVLVADIDRGGVFAHLVGTLACLSDSERARVRGFVINRFRGDPALLEPGLRWLEARTGKPVLGVLPYLHGLTLDAEDMLPASARTSAARRDAGVLRIVVPALPRISNHTDFDALRAHPRVDFTYWKRGPVPDADLLILPGSKNVLADLAWLRDAGWDALIKRHLRYGGKVIGICGGMQMLGRTLADPHGVEGAAGATSAGLGLLDYATTLTPEKTLVNAAGRLAFGGDARVAGYEIHMGRTEGPALASPALMLAGRGGERPDGAVSADGQILATYLHGLFDTPHACAALLEWAGLDGAEALDYPALREASLERLADTFAEHLDLDRVFAAFA

SEQ ID NO: 50563 - protein, 1260 aa, Burkholderia mallei
LALTAGQYGIWLDQMLNPDLPCYILGAILRIDGTFDEALLTSVVNEVVNANDSLRAVLVSEGGSVRQRVLSDVELEIAHIDFSGSAHPHDSAWRYMRTAFDTAFALDGLLCDFRIVRESPSRTYWMYRCHHLVADGQSVSMICRMIVDLYNRRASADMARIEPTPSYFDSLDDDRKYAESSRYERDAQFWQDKFSSLPPPLLSSRSSEAAARPASFPDGQVNLTIERAKYDRLGRIAEASGCTIVHVMFGVLALYFSRAFQVDEVVIGMPVHNRSTAQQKRAIGMFASVVPIRIPVDGNERFVSLLNGVSAELRHCYRHQRFPIAELNRRLGLVRTGRRQLFDLTLSFEKFPLDFYIGDVKLGLTSMRHRFEQTPITVNVQDYHEDQDLVMQFNYDVNAFSHAEVDNIGTRIGGLLDALIEHHDDMPVGMLPLLDEAERKQVVYEWNATERDYPIEQCIHQLFEAQVDRKPEAIALTFDGRRLSYAELNARANRLAHYLQGRGVGPDRLVALCAERGIEMVVGLLAILKAGGAYVPLDPSHPPERLRRMLDDTNPVAVLVDDIGADALASFESHVAARSPRVHLSRDIAQWRACSPANPPTPRERAARRLAYVIYTSGSSGEPKGVMNEHRGVVNRLWWMQQTYALDERDAVLQKTPFSFDVSVWEFFWPLMSGARLVIAKPEGHKDPAYLSELIDRERVTTLHFVPSMLQAFLEDEGAARGCGSVKRVMCSGEALPPSLVKRFYRCLPDARLHNLYGPTEAAVDVTAWACDAEEGGASVPIGRPIANTRIYVLDEYGQPVPRGVAGELYIGGVQVARGYLNRPELTRERFVDDPFVAGGRLYKTGDLARWRTDGSLEYLGRNDFQVKIRGFRIELGEIEAQLAKVAGVRETVVLARDSGSPVGEKRLVAYYTGNADVAALREQATRHLPAYMVPSAYVRLDAWPLTPNGKLDRRALPAPADDAYARAEYEAPQGAKEEALAAIWKDLLPVERISRHDNFFELGGHSLLVIGLSEKLRAAGLHADVRVVYRASTLADLAAHLGTDNQDIRIPPNLIADGDEHITPAQLTLVALSQESIDALVAKVEGGAANVQDIYPLAPLQEGILFHHLMSGESDPYVLSGVLAFRSREVMERFVSALQQVIDRHDILRTGFFWEGLEQPVQVVQRRATLPVSVVELDAREGDIVRQLETRFDSRGYRMDVSRAPLMHVHAACDGEHERWVARVLFHHLSIDHTTLERVIEEARAIGQGRAEDLPQPVP

SEQ ID NO: 50564 - protein, 380 aa, Burkholderia mallei
MAKEKFERTKPHVNVGTIGHVDHGKTTLTAAIATVLSAKFGGEAKKYDEIDAAPEEKARGITINTAHIEYETANRHYAHVDCPGHADYVKNMITGAAQMDGAILVCSAADGPMPQTREHILLARQVGVPYIIVFLNKCDMVDDAELLELVEMEVRELLSKYDFPGDDTPIIKGSAKLALEGDKGELGEVAIMNLADALDTYIPTPERAVDGAFLMPVEDVFSISGRGTVVTGRVERGVIKVGEEIEIVGIKATAKTTCTGVEMFRKLLDQGQAGDNVGILLRGTKREDVERGQVLAKPGSITPHTHFTAEVYVLSKDEGGRHTPFFNNYRPQFYFRTTDVTGSIELPKDKEMVMPGDNVSITVKLIAPIAEEEGLRFAIR

SEQ ID NO: 50565 - protein, 400 aa, Burkholderia mallei
MLTGFPWLASGYAQVDGPLAGYASIVGVYGIGWVLALVAALVVQAIVRAREGGGGHGRLRDNGGGNGRAAAGAGAAPRASRVAAPALAALAALALGPLLALVPWTVPANAPLTVRLLQGNVKQDIKFEEAGIKAAIEMYQKMITEKPADLVVTPETAIAVLIQELPEPFARAVRNFSDATDTAVLFGAVGGTVTADGRIVDYTNSLYGVTPHSRDIYRYDKHHLVPFGEFIPWGFHWFVDLMKMPLGDFARGAPVQQPFIVRNQPVMADVCYENIFGEEIAATIRDNPVSPGVLVNVTNLAWFGDTIALDQHLQIARMRSLETGRPMLRATNTGMTAAIDAQGRVIGRLKPFTIGSLDVRIEGTAGRTPYVTSGNATVLALSLLLLAFGFAFGPGLRRRG

SEQ ID NO: 50566 - protein, 63 aa, Burkholderia mallei
MVTMSEKTVKVQLVKSLIGTRESHRATVRGLGLRRLNSVSELQDTPAVRGMINKVSYLVKVIG

SEQ ID NO: 50567 - protein, 462 aa, Burkholderia mallei
MAVSVFDLFKIGIGPSSSHTVGPMRAALMFAQGLERDALLAATASVKVELYGSLGATGKGHGTDRGVMLGLMGDAPDTVDPSTIAARLDAVRTSKTLALLGTHPVPFVPKEHIAFYRQALPEHPNAMKLRAADTAGAVLREATYLSVGGGFVVTSGAPNTKVLAAAEQMPHPFRTGAELLALTASTGKSIAQLMWENERAWHTEEETRTGLLKIWDVMQSCVARGCEIGNPDADGNLPGPFQVKRRAPQLYRTLTGHPERALQDPLSMVDWINLYAIAVNEENAAGGRVVTAPTNGAAGIIPAVLHYYTRFTPGANEQGVIDFLMTAAAIGILYKLNASISGAEVGCQGEVGVACSMAAGALAAVLGGTPQQVENAAEIGMEHNLGLTCDPVGGMVQIPCIERNAMASVKAVNAARMALRGDGSHYVSLDSVIKTMRETGADMKTKYKETSRGGLAVNIVEC

SEQ ID NO: 50568 - protein, 119 aa, Burkholderia mallei; identical to SEQ ID NO: 47466

SEQ ID NO: 50569 - protein, 526 aa, Burkholderia mallei
MLAARHTISWLWIVPVAALVALGLYDLNQDRHAILRNYPLWGHLRFLFEFIRPEIRQYFVEDDTDEKPFSRAQRSVVYQRAKNVADNRPYGTELDVKAVAHEWISHSLAPTKLDGHDFRIRVGATRKQPYDISIFNISAMSFGALSANAIRALNLGAKQGGFAHDTGEGSLSKYHREHGGDIIWEIGSGYFGCRRDDGTFDPEKFAKQAREPQVKMIEVKLSQGAKPGHGGVLPAAKITPEIAEMRGVPMGKDCVSPAAHSAFSTPRGLLEFVDRLRELSGGKPTGFKLCVGHPWEFFGIAKAMLETGIVPDFIVVDGAEGGTGAAPLEFTDHVGVPLQEGLLLVHNTLVGIGLREQVKLGASGKIITAFDIARTLAIGADWVNSARGFMFAVGCIQAQHCHTDRCPTGVATQDPVRQRALVVPDKADRVYNFHRNTLHALQELVQAAGLSHPSELRAHHIVQRVAPHEVRLMSQLLKYLEPGALLNGGHCGFSLYETWWPLARGDSFSPGEGAYARVGTGAPARP

SEQ ID NO: 50570 - protein, 272 aa, Burkholderia mallei
MKPNRYLQVLMLAIGFGFLYIPIASLVVYSFNDSKLVTVWSGFSTRWYAALVEDDELIAAAWLSLKIAVMTAFASVFIGTWAGFVLARMGRFRGFALYSGMINAPLVIPEVIQGISLLLLFIELGKWFGWPAGRGMFTIWLGHVMLCISYVAIIVQSRVRELNPSLEEAALDLGATPFRVFFSITLPLISQALVSGWLLSFTLSIDDLVLSAFLSGPGSTTLPLVVFSRVRLGLNPEMNALATLFIVAVTIGVVAANYVMLRQEKRRMAEAA

SEQ ID NO: 50571 - protein, 595 aa, Burkholderia mallei
MGHYAAPLRDMQFVLHELLNVEAEVKQMPKHADLDADTINQVLEEAGKFCSEVLFPLNQVGDREGCTYVGDGVVKTPTGFKEAYQQYIDAGWPALGCDPDYGGQGLPAFVNNALYEMLNSANQAWTMYPGLSHGAYECLHAHGAPELQKLYLPKLVSGEWTGTMCLTEPHCGTDLGILRTKAEPNGDGTYSISGTKIFISSGEHDLSKNIVHLVLARLPDAPKGTKGISLFIVPKFVPDASGEPGERNGVKCGSIEHKMGIHGNATCVMNLDNAKGWLIGEPNKGLNAMFVMMNAARLGVGMQGLGLTEAAYQNSLTYAKERLQMRSLTGPKAPDKPADPIIVHPDVRRMLLTQKAYAEGARAFTYWSALQIDKALSHADEAVRKEAEDLVALLTPIIKAFLTDNAFECTNHAMQIYGGHGFISEWGMEQYVRDARINMIYEGTNSVQALDLLGRKVLGDMGAKLKKFGKIVAEFAEAEGVKPEMSEFITPLADIGEKVQKLTMEIGMKAMQNPDEVGAAAVPYLRTVGHLVFSYFWARMARIALDNEASGDPFYKSKLATARFYFARLLPETAASIRLARAGAKSMMDVDEALF

SEQ ID NO: 50572 - protein, 424 aa, Burkholderia mallei
MFLLLALIVYRIGAHIPVPGIDPDQLAKLFQSQAGGILGMFNMFSGGALSRFTIFALGIMPYISASIIMQLMAIVSPQLEALKKEGQAGQRKITQYTRYFTVVLATFQAFGIAAALENQPGLVTDPGAVFRLTTVVTLVTGTMFLMWLGEQITERGLGNGISIIIFGGIAAGFPNAVGGLFELVRTGSMSIISAIIIVVLIAAVTYLVVFIERGQRKILVNYAKRQVGNKIYGGQSSHLPLKLNMSGVIPPIFASSIILFPATILSWFSSGERKGWMSDTLHNVAEALKPGQPVYVLLYTLAIVFFCFFYTALVFNSRETADNLKKSGAFVPGIRPGDQTARYIDRILTRLTLAGAIYIVFVCLLPEFLVLRWNVPFYFGGTSLLIIVVVTMDFMAQVQSYVMSQQYESLLKKANFKGGNIPMR

SEQ ID NO: 50573 - protein, 294 aa, Burkholderia mallei
MMAAITASMVAELRAKTDAPMMECKKALTEADGDMAKAEELLRVKLGNKASKAASRVTAEGVVASFVGANAGALVELNCETDFVAKNDDFNAFAKTVAELVATQNPADVAALSALPLDGKTVDEVRLALVGKIGENISIRRFVRFETSNKLATYLHGSRIGVIVEYTGAQEQVGKDVAMHVAAMKPVSLSADEVPADLIEKERRVAEQKAAESGKPAEIVAKMVDGSVQKFLKEVSLLNQPFVKNDKQTIEQMLKAADAAVQKFALFVVGEGIEKRQDDFAAEVAAQVAAAKQQ

SEQ ID NO: 50574 - protein, 369 aa, Burkholderia mallei
MARWGTSGRKDPASFNVSTGIQMAYEAASERYADMQYRVSGKSGLKLPALSLGLWHNFGDTTPISTQREILRTAFDLGITHFDLANNYGPPYGSAETNFGRLLREDFKPYRDELLISTKAGWDMWPGPYGSGGGSRKYVLASLDQSLRRMGLDYVDIFYSHRFDAHTPLEETASALASAVQQGKALYVGVSSYSAASTREIAKLLAEYKVPLLIHQPAYNMLNRWIERELLDALDETGSGCIAFTPLAQGLLTSKYLNGVPADARINKPGGGSLKEAHLSAENLEHVRKLNEIAQRRGQSLAQMALAWVLRDSRVTSALIGASRAEQVRENVAALAHLAFSDDEIAEIDRYATEGGINLWEKPSTDQAI

SEQ ID NO: 50575 - protein, 103 aa, Burkholderia mallei
MYAVIKTGGKQYKVAVGEKLKVEQIPADIDAEITLDQVLAVGEGESIQFGTPLVSGASVKATVVSHGRHAKVTIFKMRRRKHYQKHGGHRQNYTELRIDAINA

SEQ ID NO: 50576 - protein, 237 aa, Burkholderia mallei
MPCADGRYFTADLSNRPIPDTIMQHHACSPPRLILASSSRYRRELLERLRVPFDVVAPEIDETPLPDETPCATALRLAAAKARAAAERARAPHGALVIGSDQVATFDGLQIGKPGTHARALAQLQAMRGRDVEFHSALCLYDSRSGATQSEDIVTRVRFRTLTDVELDAYLRAETPYDVAGSAKSEGLGIALLDAIDSDDPTALVGLPLIALTRMLRAAGYPLFGAPAPAADGVNGR

SEQ ID NO: 50577 - protein, 372 aa, Burkholderia mallei
MKFIDEARIEVIAGDGGDGSASMRREKFVPFGGPDGGDGGRGGSVYVIADRNINTLIDYRYAKKHMARNGENGRGSDCYGKGGDDITLRMPVGTVINDMDTGELIADLTEHDQKVLVAKGGAGGLGNLHFKSSTNRAPRQKTDGKPGERRMLKLELKVLADVGLLGMPNAGKSTFISSVSNAKPKIADYPFTTLAPNLGVVRVGPGKSFVIADIPGLIEGAAEGAGLGHQFLRHLQRTGLLLHLVDLAPFDERVDPVAEARAIVGELRKYDESLYEKPRWLVLNKLDMVPEDERRARVADFIERFGWTGPVFEISALTGQGCEGLVYAIHDYLVEHSDAHRAELAEDLASDVRFRDAPGAGGEPHERDAGAH

SEQ ID NO: 50578 - protein, 505 aa, Burkholderia mallei
MRGACASRAMFDTGGKRQAASGKRQAASGKRQAASGKRQAASGKQQAASSKQQAASSKQQAASSKQQAASSKQQAASSKQQAASSKQQAASSKQQAASSKQQAASSKQQAASSKQQAASSKQQAASSKQQAASSKQQAASSSRPAPVLMVRRRIERKHCGACPPRSTREPRTRASRCVVFPSRIPTLKPNVTMPEIVTLTPNPAIDVATCVERVTDTRKLRCGPARRDPGGGGINVARVLTRLGADCSAVYLAGGGTGLALRGLLADEGVRAHGIDIAGETRENFSVLETSTGREFRFVLPGPALAAHEWPRCVEALGRLADASRYLVMSGSLPPGMPDDCYARLARRASARGVRTVVDTSGPALAAALDAGVYLVKPSLGELRALTGLPLEDDGARLAAARAIVAGGRAQIVALTLGDAGALVVSRDDAVRLPGVKVAVRSAIGAGDSFVAGLVAALNRGANVADAARHALAAASASLLSTGPALGTKEDIARIYRELPGTIDA

SEQ ID NO: 50579 - protein, 805 aa, Burkholderia mallei
MSGTQLLPSERTTLPLLPLRDVVVFPHMVIPLFVGRPKSIKALEVAMEGGKHIMLVAQKTAAKDEPTEKDMYDVGCIANILQMLKLPDGTVKVLVEGLQRAQALSIEEQETQFSCEVMPLEPDHADSAETEALRRAIVSQFDQYVKLNKKIPPEILTSLSGIDEAGRLADTIAAHLPLKLDQKQHILEMFPVIERLEHLLAQLEAEIDILQVEKRIRGRVKRQMEKSQREYYLNEQVKAIQKELGEGEEGADLEELEKRINAARMPKEAKKKADAELKKLKLMSPMSAEATVVRNYIDTLIALPWRKKSKVNNDLSNAEKVLDEDHYGLEKVKERILEYLAVQQRVDKVKAPILCLVGPPGVGKTSLGQSIARATNRKFVRMALGGVRDEAEIRGHRRTYIGSMPGKILQSLSKVGVRNPLFLLDEVDKMGMDFRGDPSSALLEVLDPEQNHTFADHYVEVDFDLSDVMFVATSNSLNIPPPLLDRMEVIRLSGYTEDEKVSIAQRYLLPKQKKNNGLKEGEIDVAEQAIRDIIRYYTREAGVRSLEREVSKICRKVVKMLLLKKASGAIKVDGENLDTFLGVRKYDFGLAAKENQVGQVTGLAWTEVGGDLLTIEAAVMPGKGNVIRTGSLGDVMKESVEAARSVVRSRSRRLGIKDEAFEKQDIHIHVPEGATPKDGPSAGIAMTTALVSVLTGIPVRADVAMTGEITLRGEVLPIGGLKEKLLAAHRGGIKLVLIPEENVKDLADIPDNVKNAIEIVPVRWIDKVLELALERLPNALPEEEAKAAPVAEPAKDAGSTEVVKH

SEQ ID NO: 50580 - protein, 139 aa, Burkholderia mallei
MLFKRDLAPPARRARAPARRHGFRYDIRSTTRFGKKGVAMSEVNKEKLMSDIKTVLADAEDLLKQAASSTGDRATELREKALARLKQAKEKATDVQMVVVEKGKKAARATDDYVHEHPWTSIGIAAGVGVLIGLLINRK

SEQ ID NO: 50581 - protein, 323 aa, Burkholderia mallei
MKTTFLDFEQPIAELEAKIEELRFVQDDSAVDISEEIERLSKKSQQLTKDLYANLTPWQVSQIARHPQRPYTLDYVSELFTDFHELHGDRAFADDQSIVGGLARFNGHACMVIGHQKGRDTKERAARNFGMPRPEGYRKAERLMRVAEKFGLPIFTFVDTPGAYPGVGAEERGQSEAIGHNLYVMAELKTPIIATVIGEGGSGGALAIAVADTVMMLQFSTYSVISPEGCASILWKSAAKAPEAAEALGLTAHRLKALGLIDKIVNEPLGGAHRDPKGMAALLRRALGDSLRQFQGMSVDALRERRFERLMAYGKFKETTPRA

SEQ ID NO: 50582 - protein, 465 aa, Burkholderia mallei
MKHIVKHIHFVGIGGAGMSGIAEVLVNLGYQVSGSDLARNAVTERLEALGARVSIGHDAANIEGANAVVVSTAVRSDNPEVLAARRLRVPIVPRAVMLAELMRLKQGIAIAGTHGKTTTTSLVASVLAAGGLDPTFVIGGRLTSAGANARLGMGDFIVAEADESDASFLNLYPVIEVITNIDADHMDTYGHDFARLKQAFIEFTQRLPFYGSAVVCIDDANVRQIVPLISKPVVRYGFAADAQVRAENVEARDGRMHFTVRREGREPLPVVLNLPGLHNVQNALAAIAIATDLDVADAAIQQALAEFNGVGRRFQRYGEIAAAGGGAYTLIDDYGHHPVEMAATIAAARGAFPGRRLVLAFQPHRYTRTRDCFDDFVNVLSTVDALVLTEVYAAGEAPISTANGDALSRALRAAGKVEPVFVATVDEVPDALAKLARDGDVVITMGAGSIGGVPGKLAQDTQQKG

SEQ ID NO: 50583 - protein, 135 aa, Burkholderia mallei
MRERGDATRVDVFDGAVRIAPRRAVGRAPLITAGHGADFTRDALAGPPRVLGASAGAWVDGILVASNLRLADLLAEIDRYRPGRVRCDAAVANLRVSGTYPLDDTDRILDTLRETLPVDVEYLSRYWVTVVAARD

SEQ ID NO: 50584 - protein, 499 aa, Burkholderia mallei
MKARSPAMLAAPAHCADTPRTPDMPDMPDMPDTRGTPAHDASPRPEHKPHGKMLHPVVMMIWVLAAAVALTWLVDSGRYARNGKLVVPGTYQVVPKATSLATLVAPAVSKSTPQLAMPASLVSAFVAVPGGLVKNAPLIVMVMFVGGMFGVMRRTGVVDAGIDRLLQLTGNDVYLLTPLLMILIGLGSTLLGFISEYLVIIPMVMVIAKRLGLSNLFAVALVALAAKIGYIASVTNPLALAVAQPLVGVPLFSGVALRAAVFAVYLALGILYLLHHVKRSGYRRERAKALAHAHGVARLSVRHQATLALLAAAVAMLVFGTRELKWGNIELAAFYAFVAIAADAFVDGMKSMMLAALLMGLAASVELLLQNSLVLDTLIHLFTRLANGQSPVWVANGLMAVQMVLDVFIPSVSGKAAVSMPIIGPIAQLSGVSGQTSVLAFVLGGGLTNLVTPTSGMLLAYLATARVDFGAWLRFVLPLFAVLLALSCGVLAFAVQIGY

SEQ ID NO: 50585 - protein, 651 aa, Burkholderia mallei
  MISC_FEATURE (25)..(25): X=any amino acid
MCGITGFWALSHARRRRLARPSREXTDSLAHRGPDDTGLWIDHDAGVALGHRRLSIVDLSEHGHQPMLSACGRYAMTFNGEIYNFRQLRSELEREHRAPEWRGHSDSEVLLAAFCAWGVDRALQKAVGMFALALWNRESRVLTLARDRIGEKPLYYGRIGGSFVFGSELKALRRFPGFDAHPIDRDALCLYLRHASVPAPYTIYEGIRKLPPGTYAQLEDLAEAPAPRRYWSLERAIAAGRANPFDGDANAAVAQLDYVLRDAIAEQSVADVPLGAFLSGGVDSSVIVALMQTQTAQPVQTFTIGFHEAGYDEAGYAKAVARHLGTSHTELYVKPADVLATVPRMPCVYDEPFADSSQIPTLLVSELTRRHVKVSLSGDGGDELFGGYTRYFLTPRLWGRLRRVPAAVRMRIAAALHALRPDHADQIASLVQGAWSASAQRDASPRVGDRLHKLANVMTADSRASLYRLLMSSVHHPERFTLAGHEPQTLIDTPGAWPAGLSFAEQAMAVDTLTYLPTDILTKVDRAAMAVSLETRMPFLDHRVVEFAWRLPEALRIPDGQDKWLLRKLLYRYVPRPLIDRPKQGFCAPVGAWLRGELSDWAAELLRPARLRDEGYLDAARVERLWRQHQSGRMNWQHPLWTVLMFQAWLE

SEQ ID NO: 50586 - protein, 1395 aa, Burkholderia mallei
MGEVQSSAPSDSQQKLAALAQRGSNADAVQTVSNMGLAINAAQVTAAGTSAWAAGTFQCFAGRVIAPLGGAMLGGALAEALGADRPVTWVLDKMGLPAVAKPGKAPARVGHKIVHENAFIGALTGLLAGIAVGVAIAAAAAAIVATGGAAAVAIAAAGPFVVGFVSGAVGGFVGAAVAKGIGHTGSVTGAIAHGSPNVSFEGAPVARVTDPVTCSKDPGMPPPQIAQGSLTVSVNGLPLARIGHKITCSAVIQEGCTTISADETTGTFGKIDANVSLLEQLVLTATDVIMMRRPPRKAACWTACCASCSASPIDMATGDYADYRTDFTWPHVLPLTLSRAYAGRQPVEGLLGDRWISNWSQRLRYRRPADGPATVTFFDADGQQLVYPVPHEPFNAINFWAPHYALHGSRARAVVFDERSQQSLIFEPAHAEDDVARLTRIEDRNGNTIDFEYNALGRLCTVRHSGGMTLWVTCDSRGLLQSVSEQPGGEGELVRYRFDGKRLTDVHSRFQGEFHFGYTDEGWLNHWRDSGATQVALRYDERGRVIATRTNTALYDDRFEYDDEARLTTYIDALGHRHQRWFDAQNRLIRSRDPLGRVMCASYDENGWLASRTDPLGRVSTYRHDCRGRPLQVTDAFGRVSRYGWNGAGQLVEQQDHNGKVQWHYSAEGNLVALRARSGETRFRYDARGLLVGRTDPDGAVHAWRYDGAGRPERWTDPLGRHTYLEHDRYGRLIARIDAAGHRTTYGYERGPSNPREQLASITYPDGAIARFQYDSEGLLTEAVNPLGQRTRYAWGAFDLLASVTDPGQATTRYHRDGAARLIGVTNAAGQHWKFERDPAGQLIAQTDWSGRRTRYVLNPMGQVTEKHLPDGVAIRYEYDSQDRLVALTGPRRRHVFAWTASGLLTRAEVWTRNDEAGEWRRDDRLDLEYDDACRLVEESQHGRAVGYEYDPMGRTRSMATPSGRTLWQYDAAGQLGSMESNGHRFHFDYDGLGLETLRRYTPTQAHVARHPQWVEPYSEGYAQQQDHDGRWRLTKQACATWAELRERGAARTRHYEWDAAGRCVGMHEARRGLPIAQDRWRYDARGQVVDAHYERTETRSGRERYEYDALGNVSTRQIDAGEAMTHVYHGDQLVSAGPSRYEYDARGRMIARTERRDGFRPRTWRYQWDDFDQLEQVLTPEGERWRYRYDAFGRRISKACLSTPKAGRPARIDYLWCGSRLIEAWRAYGERDGTQYEIQRWHYRPGTHSVLAQERLKYDDKPDLQNSEWFALACDPNGAPHTLYSSDGRIMWSARRELWGRVADDPDRDTVRHAVREQLRTSLLTGDAFDPPDCELRFPGQWADEESGLHYNFHRYYDPATGQYLSPDPLGLAGGLRTHAYVHDPLQWVDPLGL

SEQ ID NO: 50587 - protein, 589 aa, Burkholderia mallei
MSLIEVKVPDIGDFSGVDVIEVNVKPGDVIEKEQTLITLESDKASMEVPSDVAGTVKEIKIKAGDKVSQGTVIAIVEASAGAAAPAPAKAPEAPKPAAAAPAPAAAPAPAPQAGSSSGSADIECDMLVLGAGPGGYSAAFRAADLGMKTVLVERYSTLGGVCLNVGCIPSKALLHTALVVEEAQALASHGITFGKPQVELDKLRDFKGGVVKKLTTGLAGMAKARKVEVVTGVGAFVDPYHMEVQGENGKKIVKFKQAIIAAGSQAVKLPFMPEDPRVVDSTGALELRQLPKRMLVIGGGIIGLEMATVYSTLGAEIDVVEMMDGLMMGADRDLVKVWEKYNAKRFGNVMLKTKTVGAQAKEDGIYVTFEGEKAPAQAQRYDLVLVAVGRSPNGKKIGADKAGVAVTDRGFIEVDKQMRTNVPHIFAIGDIVGQPMLAHKAVHEGHVAAEAAHGEKAYFDALQIPSVAYTDPEVAWAGKTEDQCKAEGIKYGKAVFPWAASGRAIANGRDEGFTKLLFDEETHRVIGGGIVGLNAGDLISEVCLAVEMGADAEDIGKTIHPHPTLGESIGMAAELYEGVCTDLPPQRKK

SEQ ID NO: 50588 - protein, 337 aa, Burkholderia mallei
MDLDQIVADAQQSFEGAADITTLENEKARFLGKSGALTELLKGLGKLDPETRKTEGARINVAKQQVEAALNARRQALADALLNQRLAAEAIDVTLPGRGAGAGSLHPVMRTWERVEQIFRSIGFDVADGPEIETDWYNFTALNSPENHPARSMQDTFYVDGKDADGRPLLLRTHTSPMQVRYARMNRPPIKVIAPGRTYRVDSDATHSPMFNQVEGLWIDENVSFADLKGAYTDFLKKFFERDDILVRFRPSYFPFTEPSAEIDMMFEHGKNAGKWLEISGSGQVHPTVIRNMGLDPERYIGFAFGSGLERLTMLRYGVQDLRLFFENDLRFLRQFA

SEQ ID NO: 50589 - protein, 296 aa, Burkholderia mallei
MVRRITSSASAILRLGLVAGLSGCSELHVLDPKGAVGAAEKSLIATSTWAMLIVVVPVILLTLLFAWRYRASNRNATYAPKWAHSTAIEIVIWTVPSLIILFLGILTWKTTHALDPYRPLESAVKPIDVEVVALDWKWLFVYPDLGIASVNQLAVPVGTPINFRITSDSVMNSFFIPQLGTQVYAMAGMQTRLHLIADEPGDFAGISANYSGRGFSDMKFRTLATSRDAFDAWVAKVRASADRLDMTAYGQLAQPSEKQPVRYYSTVDPRLFNNIIAKYNDGRVLDLTDAACRTKG

SEQ ID NO: 50590 - protein, 491 aa, Burkholderia mallei
MSREVLMLVDALAREKNVDKDVVLGALEAALASASKKLFDEGAEIRVHIDRESGEHETFRRWLVVPDEAGLQEPDREILLFEAREQKPDVEVGDYIEESVPSIEFGRIGAQAAKQVILQKVRDAEREQILNDYLERGEKIMTGTVKRLDKGNFIVESGRVEALLRRDQLIPKENLRVGDRVRAYIAKVDRTARGPQIELSRTAPEFLMKLFEMEVPEIEQGLLEIKAAARDPGVRAKIGVVAYDKRIDPIGTCVGIRGSRVQAVRNELGGENIDIVLWSEDPAQFVIGALAPAAVQSIVVDEEKHSMDVVVDENELAVAIGRSGQNVRLASELTGWQINIMTPDESAQKQNEERDALRGLFMARLDVDEEVADILIDEGFTSLEEIAYVPLNEMLEIEAFDEDTVHELRNRSRDALLTMAIANEEKVETAALDLKSLDGVTPELLAKLAEQGVQTRDDLAELAVDELVDMTGMEEEAAKALIMKAREHWFQ

SEQ ID NO: 50591 - protein, 249 aa, Burkholderia mallei
MTHRFPWLRTAAALCVAGAALLAAPAHAGLFDDDEARRAVLDLRSKSDSQASQLAAAQRTILDQTNRLDQLNQQVATLRGENEDLTNRLTTLERQQKEYYTDLDTRLKKFEPQKTTVDGVEGTVQPGETDAFNAASQQFRNGNFKGAAASFRAFIAKYPQSPYQPTAQYWLGNAQYALRDYKGSTATWQGLVKNYPQHPRAADALIAIGTNQLEQGQKAAAKKTFEQVVSQFPGSNAAETAQSKLDAIK

SEQ ID NO: 50592 - protein, 540 aa, Burkholderia mallei
MTLNSLPVWPALQAHYEEIRDAHLRDWFAPANDRAPTRAERFTFEGGGLAADFSKNRLTDATLALLVRLAREAGVEARRDAMFAGETVNPTEGRAALHTALRANAPDAPFQAQVAAERAKMARFADAVRSGAWTGYTGKRIRHVVNIGIGGSDLGPKMVVHALHHVATPDIATHFVSNVDGADLARVLERIDPEETLAIIVSKTFTTLETMTNARSLRDWFVANGCPEGALAKHFVGVSANPAEVVKFGIAEANVFEMWDWVGGRYSLWSAVGLSIMIAIGPERFDELLAGARDMDEHFRTAPLERNLPVLQGLVGIWYRNFFGAQSYLVAPYSEALHYLPSYLQQLEMESNGKSARIDGAFVDYPTSAVTWGEPGTNGQHAFFQMLHQGPTLVPIDFIAVLTPEHPLASHHPKLLANCFAQSEALMLGRTLDEARKIAGPAKPELAPHLTFPGNRPTTTLLVDALTPRTLGALIALYEHKVLVQAAVWNINPFDQWGVELGKILGKVVEADLTAAQVDPAKHDSSTSALIARARKALGE

SEQ ID NO: 50593 - protein, 210 aa, Burkholderia mallei
MSVQVLIADDHPLVLLGVRHMLAGMGDVSIVGEAHDPAGLLALLAATPCDIVITDFAMPEQPAADGLAMLTAIRDGYPSVRVIVLTMLDNPVLMHTMRQAGALAVLSKRGDLDELPRALAAVYQGRPFVGTHAGAAGGGAMRGTDAPRQLSPREIEVVRLCATGMTMTDIANRYGRSIKTVSTHKHNAMGKLGLKSDVDLFMYATENGLV

SEQ ID NO: 50594 - protein, 199 aa, Burkholderia mallei
MTRKTRIQPIEHPGEDADHGCDRPSKSQLKRDMHALQELGAALVELPKDAFKRMPMPEDLADAVREARRITDHEGKRRQLQYVGRVMRSLSADETAALRAALDAQRGVNKAETARLHWIERTREQLLANDDALTAFVREHPSADVQEGRTLIRNARKEAQQGKPPRYFRELFQWIKTASGSASDAPDLSADADDDDDEA

SEQ ID NO: 50595 - protein, 682 aa, Burkholderia mallei
MQERVAARQARLERRAAGLRELHVRHAVVARIGLALDPAERLERLQLARERARIDAQQLDEPLLRRRAAMLLERDHDAPARQRLADVRLECGHERAVRAPELLQDRDAVLFFHALASAPICVNEGTRRRSLGEDGRLELAAQLDGRHAAALPHRRERDERADADADMDRADERFARRFEQMGAMMPGAHEFVHHARLRGAVDQHLRIGKACLPAQRAVRGERVAHAVRVELIDERAGECRAEHAAHHAQRLQQRGRDPEMLAARRLLREHGQVRQHEAEAHAARDHQRHQRPARRRMRRRDDARAREREQQEADVQHRVRTADPRDHAAVHDAADRDEHDERRDDDARLLRRHPEAALEQQRRVEEQREHREAGEDREDEQRGQRAVREHVERQDRLRAALLPAPQRDAARERGDEQQRRPAADSVFRQPFDEQLHRAERHGDEERARPVEPHLPRVLDVPHVRQIAPDEKDRQQAHRQIHVEHRAPAVILREHAAERRADRVRDPERRAHQHLPAQPHDRIGEEIRNARERGADEHPAADPLQAAREHERQHVLRHRAQHRRAREHDERRDHERLAPVVIAEPPEDRHGDHRREQVRRGDPRVQIEAAQLGDDRRQRGADDGLVERDEHRDEGDAEHREQRLAKRKDLPARMVGGGMDSHLLFVQLLMRQRIENSIMHQVI

SEQ ID NO: 50596 - protein, 72 aa, Burkholderia mallei
MAKDDVIQMQGEVIENLPNATFRVKLENGHVVLGHISGKMRMHYIRIFPGDKVTVELTPYDLSRARIVFRAK

SEQ ID NO: 50597 - protein, 435 aa, Burkholderia mallei
MSRQQQAQELQKQWETDPRWKGIKRAFTAEDVVRLRGSIQQEHTLAKRGAEKLWTLINNEPFVNALGALTGNQAMQQVKAGLKAIYLSGWQVAGDANVAGEMYPDQSLYPANSVPLVVKRINNTLTRADQIQWSEGKNPGDEGYVDFFAPIVADAEAGFGGVLNAFELMKAMIEAGASGVHFEDQLASVKKCGHMGGKVLVPTREAVAKLTAARLAADVMGTPTVLVARTDAEAADLITSDIDDNDKPYLTGERTVEGFFRTKPGLEQAISRGLAYAPYADLIWCETGKPDLEYAKKFAEAIHKQFPGKLLSYNCSPSFNWKKNLDDATIAKFQKELGAMGYKFQFITLAGFHALNYSMFNLAHGYARTQMSAFVELQQAEFAAADKGFTAVKHQREVGTGYFDAVTQTVEREASTTALHGSTEDEQFFDGQKVA

SEQ ID NO: 50598 - protein, 181 aa, Burkholderia mallei
MRAKAPPASPSRKQAAHAGAARPAHVRLAPSETHEPAEPHEPLGPDDPLALPHNPYKGNRGLMRAWYALKNSYNGFRVAIREESAFRQELTLAAIMLPIAVFVPVEPASRALLIGTVLLVLIVELLNSSVETAIDRISLERHELSKRAKDLGSAAVTVALCTCLSTWGLILGPLVWRRLAG

SEQ ID NO: 50599 - protein, 137 aa, Burkholderia mallei
MDLYNGEIIAWHSATRASFDLISSMLKKAFSRLTRGERPLLHSDQGWQYQMPAYRRLLDQRAVQQSMSRKGNCLDNAAMESFFGTLKAEFFHLNEFDSVEQLQAGIRQYIRYYNHERIRLKLKALSPVQYRTQPLLA

SEQ ID NO: 50600 - protein, 198 aa, Burkholderia mallei
  MISC_FEATURE (30)..(30): X=any amino acid
  MISC_FEATURE (39)..(39): X=any amino acid
  MISC_FEATURE (46)..(46): X=any amino acid
  MISC_FEATURE (189)..(189): X=any amino acid
RLGVSEADHEAYFRAKLGDIDEPTAPFGCXAFRETGVRXRRRRGRXSRSCSGALRGHARRLGVSAASMMHVAWGLVLSRTTGRQDVVFGTVLFGRMQGGAQSDRALGLFINTLPVRMRVAQTGVEASVKGAHAQLAELMRHEHAPLVLAQRCSGVPAQTPLFTSLLNYRYSKPKVAAAHIADGIELLDXPAPYKQGQP

SEQ ID NO: 50601 - protein, 552 aa, Burkholderia mallei
MATVGGQIAHAPMTGDEKRVIFASSLGTVFEWYDFYLAGSLAAYISKSFFSGVNPTAVFIFTLLGFAAGFAVRPFGAIVFGRLGDLVGRKHTFLITIVIMGISTFVVGFLPGYASIGIAAPVIFIAMRLLQGLALGGEYGGAATYVAEHAPSHRRGFYTSWIQTTATLGLFLSLLVILGVRTAIGEEAFGSWGWRVPFVASILLLAVSVWIRLQLNESPVFLRIKAEGKTSKAPLTEAFGQWKNLKIVILALIGLTAGQAVVWYTGQFYALFFLTQTLKVDGASANILIALALLIGTPFFVFFGSLSDRIGRKPIILAGCLIAALTYFPLFKALTHFANPALEAATQKAPITVVANPDECSFQFNPVGTAKFTSSCDIAKSALAKSGLNYENVAAPAGTLAQIKIGDTAIATYDGKAADAKDQAKAFDKTLASTLKAAGYPAKADPARLNWPMTTVILAILVIYVTMVYGPIAAMLVEMFPTRIRYTSMSLPYHIGNGWFGGFLPATAFAIVAAKGDIYSGLWYPIGVALVTFVIGLLFVKETKDSNIYAQD

SEQ ID NO: 50602 - protein, 295 aa, Burkholderia mallei
MTSLLDLAQAQHYPAGALYIVATPIGNAADITLRALHVLTLADRIAAEDTRNTGQLLVRYGISKPLVAVHEHNERAAAAKLIDHLGAGERIAYVSDAGTPGISDPGAKLVDAVRAAGFGVIPLPGANAAAAAVSVAGDWAGAFTFAGFLPPKPKQRDAALQPLKTHPYALVFYEAPHRIVETVEALAAALGGERRLLIARELTKLHEELFEGTLADGPTWLRADANRQRGEFVLVVEGAPQGAQDEDERAHDALLELLLDEVPVKSAAKLAAALTGAPRNALYARALALKKEEEE

SEQ ID NO: 50603 - protein, 1436 aa, Burkholderia mallei
MARQTLGRRARGGRETGRRGDPRHGGHRRHDEPARLSNRRRRRHAAVRRDREKPGRRPDHPCAVPRRPAGARGRRARRDRSPRAPGDRRPGDSEARAGQGDARQRPARARAPSAARRNERGAGADAGYMESARQRAACADPRRSGRRAERPRGRRLHDDPRAHLGAHRLSARRPGQPREGQRYGAAHARHDFADHRDLFRIAGCTAGDPGGAAARRGRGRRDEHGRRDDALAWAPAHDREPRRSDQRRGPDESGVRECRRRAVARAVGDDPHRRRRAAQRDGGAGGRDPDRAGRQLRLCDRRRRQGRDAARRGVASGARLRGRQARPASRRARRRAGPVPVAGRRARRRDDDAGARRARRRRRRRAERSRAGGGPRSARRARDERAPIMSRNLFAVFIRYPVATCLMTAGILFAGVAAYFHLPVAPLPQVEFPTIQVSAVLPGADPVSVASTLAQPLETQFSKIPYVTQMTSQSTLSSTSIVLQFSLERSIDAAANDVQSAIDAAAAQLPADLPSPPTFQKVNPADSPIMLLSAISSTLPLTTIDDYVETRLTKSLSQIDGVGSVSIGGQQKPSIRIQLDPVKLASRGLSSEDVRRALSGLSGVNPKGVFNGTTRSYTIYTNGQLTEPAQWNDAIVAYRDGTPVRIRDIGQAVLGPEDNTLAAWIDGRRAISVGIYKKPGANTVSTVDKIRARLPELEASLPPSLKIAVLADRTQTIRASLLDIELTLLLNVVLVVVVIYAFLGSVRTTIIPAVTVPVSLFGACALMWVCGYSLDNISLMAMTIAVGFVVDDAIVMVENIARHVEAGELPLQAALKGLSETSFTIASISLSLVAVLLPLLLMSGIIGRMFREFAVTLSMTIIVSAFVSLTLTPMMASYLLRAHRHDAGRPPRPGLFERAFARTAAAYERALDVALRHRFVTLCAFLASVAASVFLYVGIPKGFFPQQDTGVITGISEAAQTISVEDMARHSMALAAIIRADPAVEHCQMAVGGSAYAGTTVNNGRWYITLKPRDQRDATADEVIRRLRPQFAKVPGVRMYLQAAQDVIIGARLARTQYQLTLQSADVGALTTWAPRLLARLSGLPQLRDVASDQQVNGSALSVAIDRDQAARYGLTPEAIDGTLYDAFGSRQVAQYFTQLSTYKVIMETLPSLQRDPGTLDRIYMKAPSGALVPLSSVARWTTDTVQPLSVNHQSHFPSVTISFNLAPGVSLGEATAAIEAARASLRMPPAVVGSFQGTAQAFQSTLATMPMLILSALIVAYLVLGALHGSFIHPWTILSTLPSAGVGAIATLWLFKYDFNLIALIGVILLIGIVKKNGIMMVDFAIAATRERNMTSLDAIRSACLLRLRPIMMTTMTALFGALPLMFTPGMGSELRQPLGYAMVGGLLVSQVLTLFTTPVIYLYLDTLSNRLKARLRPLGADMPSNAHVEGPTQD

SEQ ID NO: 50604 - protein, 584 aa, Burkholderia mallei
MQKLFNKSAIAIGISTLLVLSGCGSVDGPSLSASGVKPATVGNTGTSGTSGTSGTSGTSGTSGTSGTSGTSGTSGTSGTSGTSGTSGTSGTSGTSGTSGTSGTSGTSGTSGTSGTSGTSGTSGTSGTSGTSGTSGTSGTSGTSGTSGTSGTSGTSGTSGTSGTSGTSGTSGTSGTSGTSGTSGTSGTSGTSGTSGTSGTSGTSGTSGTSGTSGTASSPLGNILAQTGNLITATGTVVSATGNQISGTSVPGVNGATTTNLGNAVSSLGNGVQTLGNGTAAGLGTLGTSTNPLGPTLTSTSGVVSNVGNAVSSLGGVVTSIGTGPLAPVTSPLGGAVGTLGSTVTQVGSGLNNVLTSAPVQQLETGVSSIINPISNVVSGTTQTIGTATGLGAPVNNLLTTVGNGLNAAGAKVSGSTNNQVVQAVGGVVSQLGNTVTSVGGLLTGGTTNPLAPITGIAGSLSGTLGANAGLNAGATQPGTTTNPLAPVTGLLGGLSGSAGGNAAAGLTAVLAPITNVVGSLTAGVNGTVAAPSPAPTTGSTTTAPATGVVGSLTGGTTASGTSTTNLLAPVTNLIGGLLGGVSGK

SEQ ID NO: 50605 - protein, 373 aa, Burkholderia mallei
MNVGLVGWRGMVGSVLMQRMQEEGDFDLIEPVFFSTSNAGGKAPSFAKNETTLKDATSIDDLKKCDAIITCQGGDYTSDVFPKLRAAGWNGYWIDAASSLRMKDDAVIILDPVNLNVIKDALVNGTKNFIGGNCTVSLMLMALGGLFRENLVDWMTAMTYQAASGAGAQNMRELLAQMGALNGAVAAQLADPASAILDIDRRVLAAMNGDAMPTSQFGVPLAGSLIPWIDKDLGNGMSKEEWKGGAETNKILGKPAMGEPGSIPVDGLCVRIGAMRCHSQALTIKLKKDVPLDEINGMLASANDWVKVVPNEREASMRDLSPAKVTGTLSVPVGRLRKLAMGGEYLSAFTVGDQLLWGAAEPLRRMLRILLDK

SEQ ID NO: 50606 - protein, 285 aa, Burkholderia mallei
MNTTKPSPATAAELLRASPLDALDARILLAHALGWSRTQLITRADEPLDAAARARYLALQARRAAGEPIAQLTGAREFFGLKFDITPDVLIPRPETELLVETALDAIDGIASPCVLDLGTGSGAIAVSIASERPDARVWALERSVAALDVARRNARKLLDPARAGGPLRFLESDWYAALDPGLRFHVVVSNPPYIARHDPHLAEGDLRFEPRGALTDENDGLAAIRTIVAGAHAFVAPGGALWLEHGYDQAAAVRALLDAAGFADVESRADLASIERASGGRLPG

SEQ ID NO: 50607 - protein, 323 aa, Burkholderia mallei
SVKNAAVNVPYGGAKGGIRVDPRKLSRGELERVTRRYTSEIGIIIGPNTDIPAPDVNTNEQIMAWMMDTYSMNQGQTATGVVTGKPISLGGSLGRKEATGRGVFVVGCEAAKKKGLEIEGARIAVQGFGNVGGIAAKLFQEAGAKVIAVQDHTGTIHQPAGVDTVKLLEHVGRTGGVAGFEGAEPMPNDEFWTVETDILIPAALENQITEKNASKIRTKIIVEGANGPTTTAADDILSANGVLVIPDVIANAGGVTVSYFEWVQDFSSFFWTEDEINHRLERVMREAFAGVWAVAEEHNVSVRTAAFIVACKRILMARECAVC

SEQ ID NO: 50608 - protein, 212 aa, Burkholderia mallei
MSAIVDIIGREILDSRGNPTVECDVLLESGTMGRAAVPSGASTGSREAIELRDGEAGRYGGKGVLKAVEHINTEISEAIMGLDASEQAFLDKTLLELDGTDNKSRLGANAMLAVSMAVAKAAAEEAGLPLYRYFGGSGAMQLPVPMMNIVNGGAHANNSLDIQEFMIVPVSQPTFREALRCGAEVFHALKKILGDRGMSTAVGDEGGFAPNF

SEQ ID NO: 50609 - protein, 325 aa, Burkholderia mallei
LVDRFGRAVTYVRLSVTDRCDFRCVYRMAQDMRFPPRSDVLTLDALAALARACVALGVRRIRLTGGEPLVRPGLTTLVERIARLPGLDELALTTNGARLAQFAAPLKAAGLARVNVSLDSLREDRFGALTRTGRLRDVPAGIAAAKRAGFRRIRLNCVILRGRNDDEVLDLVRFARAQRLDLAFIEEMPLGAIDEHDRASCFVSSDEVLARIRGRYALFPSDVSTGGPARYFRMADSEIRIGVIAPHSHNFCGDCNRVRVTASGRLLQCLGNEHGAELRDVLRTSPGDDARLRGAIAAAMPLKPERHRFDLDAPHIVRFMNMTGG

SEQ ID NO: 50610 - protein, 155 aa, Burkholderia mallei
MSTEKINFDIHKILTLLPHRYPILLVDRVLELEPHKAIKALKNVTVNEPFFTGHFPKRPVMPGVLIIEALAQAAALLTFAEAQPKDPENTLYYFVGIDNARFKRVVEPGDQLILNVTFERYIRGIWKFKAVAEVDGKVAAEAELMCTVKTADAAP

SEQ ID NO: 50611 - protein, 284 aa, Burkholderia mallei
MSGRSFLIGLIGAGIGGSLSPAMHEAEGRRQGLNYVYRRIDLDALGLTADALPELLATAERMGFDGLNITHPCKQRVIEHLDELSADAAALGAVNTVCFAHGRRIGHNTDWSGFAKAFARGLPGASLERVVQLGAGGAGAAVAHAALTMGAAQLALFDVDPVRARSLADQLQARFPHARLSAGGTLADALANATGLIHATPTGMLGHPGLPLPAHLLRSGLWVADIVYFPLETKLIRAARALGCRTLPGGGMAVYQAVDAFELFTGRAPDAERMFEHFRALVAR

SEQ ID NO: 50612 - protein, 281 aa, Burkholderia mallei
MSRRMTLQGSNKMNLMNPEFAMPDVQSTVDTRQMPIQRVGVRAVRHPLTVRTAEGETQATVGTWNLDVHLPADQKGTHMSRFVALLEERGGPLTADAFRTMLATMLEKLEARAGRIEVSFPYFVNKTAPVSGVRSLLDYEVTLTGDVRDGLTRVFAKVLVPVTSLCPCSKKISQYGAHNQRSHVTIDAELAADVPVEDLIRIAEEEASCELWGLLKRPDEKFVTERAYENPKFVEDLVRDVARRLDADERIVAYVLEAENFESIHNHSAYALIERDKRRGA

SEQ ID NO: 50613 - protein, 821 aa, Burkholderia mallei
MGQILTPAARPFRIYGKMPRSIHPPGPADGAAGRTGRFLQAVDAHHDMTETVALKIVQRIADELSVQPRQVAAAVQLLDEGSTVPFIARYRKEVTGNLDDTQLRQLEERLLYLRELEERRATIIASIDEQGKLTDELRAAIDAADSKQTLEDLYLPYKPKRRTRAQIAREAGLEPLAQALLANPLLDPQAEAAAYVNTDRGVADVKAALDGARDILSEQFGETAELLGKLRDYLFERGVVSSAVVDGKQGEEGEKFRDYYDYSETIKTVPSHRALALFRGRNAGVLTVKLGLGEELDAQVPHPGEAMIARHFGIANQNRPADKWLSDVCRWCWRVKVQPHIETELLTQLRETAEHEAIRVFARNLKDLLLAAPAGPKAVIGLDPGLRTGVKVAVVDRTGKLLATDTIYPHEPRRDWDGSLAKLARLAAQTQAELVSIGNGTASRETDKLASELIAKHPELKLQKIVVSEAGASVYSASELAAKEFPELDVSLRGAVSIARRLQDPLAELVKIEPKAIGVGQYQHDVNQRELARSLDAVVEDCVNAVGVDANTASAALLARVSGLNSTLARNIVDYRDANGPFPSREHLRRVPRLGDKTFEQAAGFLRINGGENPLDRSSVHPEAYPVVERMLAKISKRIDDVLGNRDALAGLSPAEFVDERFGLPTVRDILSELEKPGRDPRPEFKTATFREGVEKVSDLAPGMVLEGVVTNVAAFGAFVDIGVHQDGLVHVSAMSTKFIKDPHEIVKAGQVVKVKVLDVDVKRQRISLTMRLDDDAAPSAPGNRGGAERGAMRGGARAQRSREPEPAGAMAAAFAKLKQR

SEQ ID NO: 50614 - protein, 451 aa, Burkholderia mallei
MANMTQAAADGELDLSTLALPQAARMPAFSLTMAWWAVCSAVFYIVVGATLALDYGARNALIGMVLSVVSYGLVNAAISRYAIRTGLSVALFSRVLFGSAGAALATLIFFATAIYYAVFEGSVIAVAAHGLMPALDYKWAALIVVCYSVPLVFGSVQHWLDKFNGVLLPFYLLGLLAAVALATHRYGYHAAWLDFGPKGGAPAHGWWHCFVYYMGVWVLMMFTFDYARFGREADAGYHGRWNFGMPFYLVTFVVNGAAGIYLVSTIPGLGALSEVSVVTALLKLMGVWGLLFVWVTQSRINTANYYLATVNMQAFFQKAAGLRAPKYVWALVVGAVVYALMMADIFSKLLQALAWQGVFIVAWVGVALAHILSTRYEELLGSGIECRDTHVPAFNPGGLSAWFAGVFAGMMLTTATGFAQSLSAPVTFVVSWAVYRGMLASAKRTWFVRER

SEQ ID NO: 50615 - protein, 350 aa, Burkholderia mallei
MTRRSTKDNLGLRRPTIPVAYLRHLLTVFEERGIDARDARAGTGLRDDVLGEPDARIAPSQWGRLVLNAIRLSGDEGIGFELGLRLRMSVHGFLGYAALTAADLRASLLVNARYFRMRNRQYRLHYAERDDGATLSLHGVQASPVLQHHAMFEIVLTGIAQNVGTVAGRADPPIELQFAWPEPDYYARYRDRLPPVRFGCAANAVWVSRDALDWPLPLADDVAHRQALAQVEREYADVRHEEGDLVARVRAELTLTAHGYPGPDALARRLLMSTRTLRRRLLDAGCGYRALVDEARLRDARRLLRASDLDLKTIAARLQFNDPANFTRAFRKWTGLTPSAYREAGGGDER

SEQ ID NO: 50616 - protein, 1074 aa, Burkholderia mallei
MVAPETARRKGKGHSLTIVCAIASGLLLAAPAWADTVSPSGTDNVYGVDATDPGVSTNQGNTAYGAQAGAKVTGSYNTAIGYQAGQNVNVIDTVSIGKQATASANDAIAIGTNTKASGPADIYMGLNAGAGAGSTTSPDGTVTLGIRNMGLGESAGSYVTGQNNTGIGYQSGMNVTGDQNVGLGQQAGQFVTGTGNSAMGHLAGSTVSGSYNAAFGEYAGTNTSGGANAAFGFYAGRYINGTNNTALGAYDLPVVNGTWYGSYVTGSNNLGAGHNSGAYVSGASNVGLGDGAGTFVTGSNNVAIGTAAGSGAYTSGPSGATLNAALVASNTVSIGTRATASQSDAIAIGKGATASGAQSISIGTGNVVSGKGSGAIGDPSTVSGAGSYSIGNNNTVANSNTFVLGNGVTTTQDNSVVLGNQSTDRAAVAVSSETINGTTYNYAGVASPANGVVSIGGVGTERQLINVAAGQVSATSTDAINGSQLYATNQAVIAEDAKVNSLGGGVASALGGNAAYNATTGAITAPSYAVYGTTQNSVGGAIDALQALAPLQYTSGPGVTTPNAPGSAPTNTVTLVGAGGPGANTTPVTLTNVAPGKLSATSTDAVNGSQLYATNQQVANLVSSVNNGGVGPVQYSDPSAPTTPNGGKPSQDLTLVGAASGPVALHNVAPGTASTDAVNVGQLGAVTTGLGGGAAIDPKTGAVTAPSYTVYNADGTTSNVSNVGAAIDAINSTGIKYFHANSTKPDSQALGADSVAIGPNAVANNAGDVALGSGAVTSQAGGTLSETINGVTYSFAGTTPIGTVSVGAPGVERTITNVAAGRIGQSSTDAINGSQLYGTNQSIEALTDKMNSLGNTVANTLGSGASYNPQTGAVNGPANSGGVVTPTVIQEAANKWVSANPSTYVAPVATGTNGMAVGSGAVSTGQNSVALGTNASDGGRSNVVSVGAPGAERQVTNVAAGTQATDAVNLGQMNGALAQQTDSFNQRLGAVQQDVDNVARAAYGGIAAATALTMIPEVDKDKTIAVGIGGGTYRGYQAVALGATARITENIKVRAGVGMSSGGTTAGIGASMQW

SEQ ID NO: 50617 - protein, 694 aa, Burkholderia mallei
MAVDYTTRDGVAVITLNNPPVNGLGLSTRLGIMEGLERAQRDPAVAAIVLTGAGRAFSGGADITEFNTPKALQEPTLHTVIDAVEASGKPVVVAIHSVAMGGGLELALGAHYRVASAGAQIALPEVKLGLLPGAGGTQRLPRAVGLETALNMIVSGAPVPSEQLAKSGLFDAFVEGDLLEAAVAFARKAGAASGPHPRVRDREIVHENAAGFIQFARNSVKAVAQHYPAPHKCIDAIEAGVLQGFDKGLAFERDCFVALVQTPESRALRHAFFGERAAGKIADVPADTAVRGIESVAVIGAGTMGGGITMNFLNAGLPVTLLETKQEALERGLATIRKNYDAQVSKGKLTQEKLDARMALLRPTLSYDDLKDADLVIEAVFEELGVKEQVFKRLDEVAKPGAILASNTSTLDVNKIAAFTRRPQDVVGLHFFSPANVMKLLEVVRGEHTAKDVLATVMQLAKKIRKTAVVSGVCDGFIGNRMVEQYIRQALFMLEEGALPAQIDRAIEAFGFAMGPFRMSDLAGNDIGWAIRKRRYVEQPDLHYSKIADRLCEQGRFGQKTGAGWYDYVPGERRAKPSKLVDEMIVAYSSERGVARRQIGDAEIVERLVYALVNEGAKILEEKIASKASDIDMVYLTGYGFPLWRGGPMLYADTVGLYNVERAMRGYAQRANGDAWQIAPSIVELAKSGRGFNA

SEQ ID NO: 50618 - protein, 577 aa, Burkholderia mallei
MNESRDVPAVPVRARGGFVAIAPAARRSRAVARPRRPPASNANPSVQAPGPKPDATGSLSPREPFNIHSKCFQFTFASHRPRIVLAFLKEITPTGSRNMKRVRLAALLGASVFAAAGCGSDEPKTPGASDNGAQTGAARNVIFFLGDGMGMTTLTAARIYALGEDGALTLDTLPETAFVKTYSNDAQVTDSAPSMSAYMTGVKTNNEVISMTPDTKAIEPSASLTGNCGANNGKPVPTLLEIAKAKGLATGVVTTTRVTHATPAATYAHVCHRDAENDIAAQLVPGGAGYNAALGGGVDVVLGGGAQFFVPKEAGGKRADGRHLVNEPKAKGYAIAQNRDELLAADATKRGKLAGLFASSHMSYDLDRGATKEPSLADMATRALDVLQKNPNGYFLMVEGGRIDHALHDTNAKRALQDTVAFDNAIKATLDKVRQTDPELKNTLVVVTADHDHTLVLNGYAARTGKTEAGKPGVLGVLRNYQTGAVAKDADGAPYTIIGFGNGENRVQGSRAGTSLTDAVTGADDYRQEAVVRMAKGGETHGGTDVFLGAIGRGADGFHGVIENNKVFELVRGAAQL

SEQ ID NO: 50619 - protein, 128 aa, Burkholderia mallei
MNKHGIVLFGHGARDARWAGPFERLAAKLRAARGAEASVVLAFLELMEPSLAAATAALAAQGCDTITVIPVFFGEGGHVRRDLPGLIDACRAAHPGVDIRCATAVGEDDAVLDAIVAYCMRASADPTS

SEQ ID NO: 50620 - protein, 104 aa, Burkholderia mallei; identical to SEQ ID NO: 47327

SEQ ID NO: 50621 - protein, 310 aa, Burkholderia mallei
MRPALRRAARIALAALFCASACAHALAAAHADIAVTDDAGHAITLAAPARRVVSLAPHVTELIYAAGGGAKLVGAVSYSDYPPAAKAIARVGSNKALDLERIAALKPDLIVVWRHGNAEHETERLRALGIPLYFSEPRHLDDVAASLDKLGLLLGTHEIASAAADAYRRRIAQLRARYADKPPVTVFFQAWDKPLITLNGDHIVSDVIALCGGRNVFARLQPVAPSVTDEAVLAANPEAIVTTAAGASPTHDALPDFTRWRAWPKLTAVARGNLFAIDGDLLTRPAPRIAQGAEQLCRDLDVARARRPKP

SEQ ID NO: 50622 - protein, 156 aa, Burkholderia mallei
MFNVVLVEPEIPPNTGNVIRLCANTGARLHLIEPLGFPLDDAKMRRAGLDYHEYAQMRVHRDWDAFVAAEAPDPARMFAFTTRGSGRFHDRAFEPGDWFVFGAETRGLAPALVDRFAPEQRVRLPMRPGNRSLNLSNTVAVVVFEAWRQAGFEGGA

SEQ ID NO: 50623 - protein, 562 aa, Burkholderia mallei
MMEFPMSYNRRSKNITQGVARSPNRSMYYALGYQKEDFDKPMIGIANGHSTITPCNAGLQRLSDAAVAAVKDAGANPQIFGTPTISDGMSMGTEGMKYSLVSREVIADCIETCVQGQWMDGVVVVGGCDKNMPGGMIALARINVPGIYVYGGTIRPGHWKGHDLTIVSSFEAVGEFTAGRMSQEDFEGVEKNACPTTGSCGGMYTANTMSSSFEALGMSLLYSSTMANPDQEKVDSAAESARVLVEAVKKDLKPRDIITKQSIENAVSVIMATGGSTNAVLHYLAIAHAAEIDWSIEDFERIRKRVPVICDLKPSGQYVATDLHAAGGIPQVMKLLLDAGLLHGDCMTITGRTLAEELKDVPSVPRADQKVIHPIDQALYKEGHLAILKGNLAEDGAVAKITGLKNPVITGPARVFDDEQSALAAILDDRIRAGDVVVLRYLGPQGGPGMPEMLAPTSAIIGKGLGESVGLITDGRFSGGTWGMVVGHVAPEAFVGGTIALVQEGDSITIDAHKLLLQLNVDDAELARRRAAWKQPAPRYTRGVLAKYAALARPANQGAVTG

SEQ ID NO: 50624 - protein, 329 aa, Burkholderia mallei
MTDLTATPAPAEPAASAYDPTAKQKAQAKTARIPIKIVPIEKLKKPEWIRVKAATSSSRFNEIKTILREHNLHTVCEEASCPNIGECFGKGTATFMIMGDKCTRRCPFCDVGHGRPDPLDADEPKNLARTIAALKLKYVVITSVDRDDLRDGGAGHFVECIREVREQSPATRIEILTPDFRGRLDRALAILNAAPPDVMNHNLETVPRLYKEARPGSDYAHSLKLLKDFKALHPDVATKSGLMVGLGETTDEILQVMRDLRAHDVDMLTIGQYLQPSEHHLPVREYVHPDTFKMYEEEAYKMGFTHAAVGAMVRSSYHADLQAHGAGVV

SEQ ID NO: 50625 - protein, 1131 aa, Burkholderia mallei
MKPADTLEDVGRAQFVAHMARRPRRARRREAPGVADTPLWYKDAIIYQLHVKSFFDANNDGVGDFAGLIAKLDYIAELGVDTVWLLPFYPSPRRDDGYDIADYRGVHPDYGTLADVRRFIREAHARGLRVITELVINHTSDQHPWFQRARRAKRGSVHRDYYVWSDTDLKYAGTRIIFLDTETSNWTHDPVAGQYYWHRFYSHQPDLNFDNPAVVREVLQIMRFWLDLGIDGLRLDAVPYLVEREGTSNENLPQTHAILKLIRATIDAEYPNRMLLAEANQWPEDVQEYFGDEDECHMAFHFPLMPRIYMSIASEDRFPIIDIMRQTPALAPSNQWAVFLHNHDELTLEMVTDSERDLLWQAYASERRARLNLGIRRRLAPLMERDRRRIELINSILLSMPGTPVIYYGDELGMGDNLHLGDRDGVRTPMQWSSDRNGGFSRADPELLVLPPVMGTLYGYDAINVEAQTRDPHSLLNWTRRILSTRRATRVFGRGAIRFLRPGNRKILAYLRELDGETPVLCVANLSRASQAVELDLSEFAGCVPTEMTSDSPFPPIGQLPYLLTFPPYGFLWFALSEHGREPAWHQQYAEPLPEYLTLVMRRGETQPGAALLDTLAQDALPSWLARRRWFASKERRVDSARFDALTPIPGEPFQYAEARVAVDGREERYVVPLASAWGSETPQPLFAQLALARVRRGHTVGLLTDAFALPSFAHGVLRQLRAGAAVPVAGGGRLEFRPEPDLARLDPGDAPGVRWFAAEQSNSSLVIGEAIVLKIVRKLATGVHPEAEMGRHLRRIGYRNVAPLVGEVVRIGADGAPHTVAILQEYVDNQGDAWTRSCDFLKRAIEELALPAANDADAAAPSAEPEMIDGYATFAGIVGKRLGELHAALAQPSDDAAFAPQRVSPARVDGWIGDALGWFERAASLLAERLDTLEGQTRAAAELLVAQRAAVAEALRALVPRELDGCCIRIHGDFHLGQVLDVQGDALLIDFEGEPARPLGQRRAQSHPLRDVAGFLRSLSYASAAAQFTIEKAPQQAAERKRALFERFGQAAADRFVAQYREALSAASREFVEPRYADRLLALFLIEKASYELCYEAANRPDWLSVPANGLAALVARLIGGAAPQQEDAR

SEQ ID NO: 50626 - protein, 156 aa, Burkholderia mallei
MPRRREVPKREVLPDPKYGNVDVAKFMNMLMLSGKKSVAERIVYGAFEQIQTKGGKDPLEVFTVALNNVKPVVEVKSRRVGGANYQVPVEVRPSRRMALAMRWLREAAKKRSEKSMALRLAGELSEAAEGRGGAMKKRDEVHRMAEANRAFSHFRF

SEQ ID NO: 50627 - protein, 188 aa, Burkholderia mallei
MRIAIRSLEGAMPNIGPTSVEACVVDITTLTLDAIVNAANASLLGGGGVDGAIHRAAGPELVKECATLGGCATGDAKLTRGYRLPAKYVIHTVGPVWRGGGHGEAELLASCYRRSLEVAAGAGCASIAFPAISCGVYRFPPADATAIAVRTVAGALAGELADARFERVVFACFSSDMLDFYRTALVRF

SEQ ID NO: 50628 - protein, 183 aa, Burkholderia mallei
MARAAVIVVDMQRGLLQRAKPAHRLDEVVAGINRLTAAARAAGAPVCFVQHDGGADDDVVPGTPGWRLHAELTCADADWRIRKRASDAFHGTPLAAQLAAHGVDAVVICGYASEFCVDSAARRAALLGYRTTVVSDLHTTNDRAHLSAAQIVAHHNFIWSHCSFSGNGVAPRPLDEVIAAEFA

SEQ ID NO: 50629 - protein, 787 aa, Burkholderia mallei
MPDLLANLNPEQLAAVTLPNEPALILAGAGSGKTRVLITRIAWLIRQGYAAPATVLAVTFTNKAAREMMARLAAMMPIDTRGMWIGTFHGLCNRMLRAHYRDAGLPQTFQILDTADQLSAIKRLMKAANVDDEKYPPKNVQYFINNAKEQGLRPEKVDATDSFNRKFVELYQAYEQQCQREGVVDFPELLLRCYELLAHNPPLRAHYQARFKHILVDEFQDTNKLQYAWLKLLAGGHNAIFAVGDDDQSIYAFRGANVGNMRDFEHEFRVRNLIKLEQNYRSHGNILDAANHLIANNAHRLGKNLRTDAGHGEPVRVYEAATDAQEAAWIVEEIRSLVNAGLARSEVAVLYRSNAQSRSIEHTLMTAGIAYRVYGGLRFFERQEVKHALAYLRLIDNPNDDTAFARVVNFPTRGIGARSIEQLADAARLYDCSMAAAIPYVAGKAGSSLASFANLIAKMRAETAQMSLPETVEHVVRASGLADFYQGEREGQDRLENLQELVNAATAFVSEEGYGLDTPARSIPLHARASAAPELAAGGADPADAVLAPANLADPAQNPDAMTPLAGFLSHASLEAGDNQAQAGQDAVQLMTVHAAKGLEFTAVFITGLEEGLFPHENSALESDGLEEERRLMYVAITRAKERLYLSFAQSRMLHGQTRYNIRSRFFDELPQHVLKWLTPKVEAGARWGGRSDNAGWGRDWFARPGGGARQGVVDAAVSAPLPAFANQQREAQNGLRIGQQVFHTKFGEGTVTALEGSGTDAKAQVKFKRHGEKWLALAVAKLQAVE

SEQ ID NO: 50630 - protein, 240 aa, Burkholderia mallei
MDLESILFTQGFGSRRQCRALVEAGHVAVGGATCADAHASFDTTQLVFEVDGVAWPYRARAYVALNKPAGYECSREPQHHSSVFALLPPQFAERGVQCVGRLDQDTTGLLLLSDDGQFVHAYTSPKRKVPKTYVATVRHPLDDAQLDALRAGVLLHGEPKPVAALAAVARGERLLEMTIAEGKYHQVKRMVAAASNRVEALHRSRIGGFALPEDLAEGAWRWLDERDLAALRDTAETLSG

SEQ ID NO: 50631 - protein, 393 aa, Burkholderia mallei
MTDVVIVSAARTAVGKSGGSLAKIAAPELGASVIRAVLERAGVKPEQVSEVILGQVLTAGSGQNPARQALIAAGLPNAVPGMTINKVCGSGLKAVMLAANAVVAGDAEIVVAGGQENMSAAPHVLPGSRDGFRMGDAKLVDSMIVDGLWDVYNKYHMGITAENVAKEYGITREAQDQFAALSQNKAEAAQKAGRFDDEIVPIEIPQRKGEPLRFATDEFVRHGVTAESLASLKPAFAKEGTVTAANASGINDGAAAVLVMSAKKAEALGLEPLARIKAYANAGVDPSVMGMGPVPASRRCLERAGWSVGDLDLMEINEAFAAQALAVHKQMGWDTSKVNVNGGAIAIGHPIGASGCRILVTLLHEMLKRDAKRGLASLCIGGGMGVALALERP

SEQ ID NO: 50632 - protein, 558 aa, Burkholderia mallei
MDIKRTVLWVIFFMSAVMLFDNWQRSHGRPSMFFPNVTQTNTASNATNGNGASGASAAAAANALPAAATGAAPATTAPAAQAQLVRFSTDVYNGEIDTRGGTLAKLTLTKAGDGKQPDLSVTLFDHTANHTYLARTGLLGGDFPNHNDVYAQVAGPTSLAADQNTLKLSFESPVKGGVKVVKTYTFTRGSYVIGVDTKIENVGAAPVTPSVYMELVRDNSSVETPMFSHTFLGPAVYTDQKHFQKITFGDIDKNKADYVTSADNGWIAMVQHYFASAWIPQSGAKRDIYVEKIDPTLYRVGVKQPVEAIAPGQSADVSARLFAGPEEERMLEGIAPGLELVKDYGWVTIIAKPLFWLLEKIHGFVGNWGWAIVLLTLLIKAVFFPLSAASYKSMARMKEITPRMQALRERFKSDPQKMNAALMELYKTEKVNPFGGCLPVVIQIPVFISLYWVLLASVEMRGAPWVLWIHDLSQRDPYFILPVLMAVSMFVQTKLNPTPPDPVQAKMMMFMPIAFSVMFFFFPAGLVLYYVVNNVLSIAQQYYITRTLGGAAAKKKAS

SEQ ID NO: 50633 - protein, 587 aa, Burkholderia mallei
MNMPSAEFSTSESLSPQKTGSIGATVLMKALADENVEFIWGYPGGSVLYIYDELYKQDKIQHVLVRHEQAAVHAADAYSRSTGKVGVCLVTSGPGVTNAVTGIATAYMDSIPLVVISGQVPTAAIGQDAFQECDTVGITRPCVKHNFLVKDVRELAQTVKKAFYIARTGRPGPVLIDIPKDISKTPCEYEPVKNVSLRSYNPVTKGHSGQIRKAVSLLLSAKRPYIYTGGGIILADASRELNQFADLLGYPVTNTLMGLGGYRSSDRKFLGMLGMHGTYEANMAMQHCDVLIAIGARFDDRVIGDPAHFASRPRKIIHIDIDPSSISKRVKVDIPIVGDVKEVLKELIEQLQTAEHGSDADALAQWWKEIEGWRGTDCLKYDRASEIIKPQYVVEKLWELTDGNAFVCSDVGQHQMWAAQFYRFNKPRRWINSGGLGTMGFGLPAAMGVKMAHPDDDVVCITGEGSIQMCIQELSTCKQYDTPVKIISLNNRYLGMVRQWQQIEYSKRYSHSYMDALPDFVKLAQAYGHIGMRIEKSADVEPALKEALSLKDRTVFLDFQTDPTENVWPMVQAGKGITEMLLGSEDL

SEQ ID NO: 50634 - protein, 518 aa, Burkholderia mallei
MMNINTISHGTLRTTLIAATVAAMLSLSACGGSGTISKGLDGSGSGSGGGNAISTTGGSGSGGSGGSGGSGSGGSGSSGSTGGLSGGGGSTSGGTSTSSSINALGTIAGNTGGIISGAGSTVSGLGTVVGSQTLPGVNPQTTQALGGIVQDLGGAVSALGSGVTSGIGQLGSSTNPIGTTVASTGGVVSQLGGAVTQTGNLVTSLGTGPLAPLAPLTSPLGGAVSTLGNTITAGGTTLTTALSTGPVQQLTQTVSSAITPITSMVTGTTQTVGNVTGLGAPVNTLLGTIGGGLNQAGALISKTGNNPVTTGLGQTVSATGNTITSVGGLLTGGSGATNPLAPITAAVGGLTGTLSGVSGATSGTPLAPLTNVVSTVTGALSGATGSATSTSPLAPITGLVSTVTGALSGATGGATGSTSPLAPVTGLVSTVTGALSGATGGTTSTSPLAPVTNLVSTATGALGGATAAPATSTTTSATNPVASLTAPLTGTSSGTSGATNLLAPVTSLVGGLLGGIKK

SEQ ID NO: 50635 - protein, 369 aa, Burkholderia mallei
MSGNTLGTLFTVTTFGESHGPAIGCVIDGCPPGMALTEADVQLELDRRKPGTSRHVTQRQEPDQVEILSGVFEGVTTGAPIALLIRNTDQRSKDYGNIAETFRPGHADYTYWQKYGVRDYRGGGRSSARLTAPVVGAGAIAKKWLRERFGVEVRGYMSALGEIEIPFVDWSHVRENPFFAPNADIVPQLEDYMDALRKDGDSIGARIDVVASGVPVGWGEPLFDRLDADIAHAMMGINAVKGVEIGAGFASVAQRGSVHGDELTPDGFVGNHAGGVLGGISTGQDITVSIAIKPTSSIRTPRRSITRAGEPAVVETFGRHDPCVGIRATPIAESMLALVLIDHALRHRAQCGDVSSATPRIAARAPDAQ

SEQ ID NO: 50636 - protein, 576 aa, Burkholderia mallei
MEDRMASTIADYLARTLAAAGVTKIWGVTGDSLNGLSDSLRRDGGIRWMHTRHEEVAAFAAGAEAAQTGRLAVCAGSCGPGNLHLINGLFDCHRNHVPVLAIAAQISSTEIGLGYFQETHPQELFRECSHYVEFVTNASQFPRVLERAMRAAIGEHGVAVIVLPGDVALSAAPARTPSWFDFASPVTTPADADLERLAALLDGSDAVTLLCGSGCAGAHDEVVALADALAAPVVHALRGKQHIEYDNPNSVGMTGLIGFSSGYHAMQSCDTLLMLGTDFPYRNFYPTRARIAQIDRRASALGRRAPLDVGLVGDVRATLSALLPRIRRKTRRGFVERALAHYAAARKGLDELARPSPAGRPIHPQYLTRVVDELAAADAIFAADVGTPTLWAARYLTMNGRRRLHGSFNHGSMANALPQALGAQAAHPGRQVVSLSGDGGLSMLLGDLLSARQLDLPIKVIVYNNSSLGFVAMEMKAGGYLDTGTDLHETDFAAIAKGAGLYSLRVTESEALPDALGKLLAHPGPALLDVVTDKHELAMPPKIEWAQAKGFSLYMLRAVLSGRGDEVLELAQTNLR

SEQ ID NO: 50637 - protein, 326 aa, Burkholderia mallei
MRLALVVGLCALAFLVLYLDRDGLRDSTKSEPMSIADLVYFTMVTVATVGYGDIVPVTARARLIDAFFIVPIRIGIWFIFLGTAYQFVIQRVIEEYRMKRLQKNLRDHVVICGYGLSGSIAVRELLESGVDPATLIVIDSQEQALEAAAALGVTGLCGDPAHEDLLQQAQVRSAKAVIISVTDDPTAILLTLSVRSIAPDTKIVVRIQENLYQRQLRQAGADVIVSSTKIGALLLADAVESRYIVPFVNDMLSTRGRATLVERPAAAHEIGCMSNAVAGALVVGLDRGGRILSFYEDPPCLIEAGDTLVVIQSTRAMERAGIELAD

SEQ ID NO: 50638 - protein, 323 aa, Burkholderia mallei
MIRSSCFRRVWSSARMLCPAAVDDNVLRGDQPAVVRGEKERHAREIARQQFGVDALPRLDRRAARIVEPQAALLVGHHPARHERVHANAERPELARERTREPLHRRLRRRVDRIAGVLQHPADRAEIDDRAAAQPFHVVDHRLRGEELMAQIHRDARVERFGRHVGDRVPHVVRRVVDEHRDRADAHADRVDRAAQRADVGEIAHDEHRFVRGVGKPRDERAAGLLVEIDERDARALPREVLDERRADARRAARDQHRAADEARVACVTLVLRVERAIRFAMRSHVVYLFVPGNGRRAQSRAPRFFNWSSSTAASRIAPRTRY

SEQ ID NO: 50639 - protein, 458 aa, Burkholderia mallei
MAKQKTVFVCTECGGQTPKWQGQCPSCHAWNTLVESVESAPSAHRFQSLAKRAPVQRLADIEAADVPRFSTGIGEFDRVLGGGLVAGGVVLIGGDPGIGKSTLLLQSLAQIASERPALYISGEESGAQIALRAQRLALLEGGASAADLKLLAEIQLEKIQATIDAERPDVAVIDSIQTIYSEALTSAPGSVAQVRECAAQLTRIAKQSGTAIIMVGHVTKEGNLAGPRVLEHIVDTVLYFEGDTHSSFRLVRAFKNRFGAVNELGVFAMTERGLRGVANPSALFLSQHTEVVPGSCVLVTQEGTRPLLVEVQALVDTANVPNPRRLAVGLEQNRLAMLLAVLHRHAGIACFDQDVFLNAVGGVKITEPAADLAVLLAIHSSMRNKPLPKGLIVFGEVGLAGEIRPSPRGQERLREAAKLGFTTALIPKANAPKQPIDGLRVHAVERIEQAIDQIRVLE

SEQ ID NO: 50640 - protein, 472 aa, Burkholderia mallei
MRGLTSRVRRRRHFRAPPAKLEKSRRCDCIVADRGSRIADRGSRIAPRASCLAPRASRLAPRASRLAPRASRLAPRASRLAPRASRLAPRASRLAPRASRLAPRASRECDRGALAAFADAGACRPFPFLPKVMPMSTPVNRQLRLKARPDGRVGHEHFTLAEAPLPPLGPGEMLVRVLYLSMDPTNRVWMSDIPQYLPPVAIGDVMRALGIGRVVASNAPGFAEGDLVQGLVGWQDYAHVRADEIAQYTKLPAALGLPLPRLLGACGMSGLTAYYGLTEIAPVQPGETLVVSAAAGSVGSVAGQIGKIHGARVVGIAGGADKCRYLTDELGFDAAVDYKSDDWKRALKDATPDGVHVSFENVGGEIMRAVLSRMAIGGRVALCGVIANYNNGRPADDVSVLIAKRLTMRGFLILDYRKSREAIATLAGWLRDGRLKAEETVADGLTNAPDVLNRLFDGSHRGKLVLRVDPQA

SEQ ID NO: 50641 - protein, 503 aa, Burkholderia mallei
MDFSIKGCDWSKGTANGFLTGKSDCIVLGVFEAQTLSGAALDIDEATKGLVSRVIKAGDIDGKLGKTLFLHEVSGIGASRVLLVGLGRQDAFSQKAYGDAAKVAWRALLGTKVVQVTFTLAQLPVPERASDWGVRAAILALRNETYKFTQMKSKPDAGAPALKRVVFSVDPADDKAAKVAAKQAVALANGMDLTRDLGNLPGNVCTPTYLANTAKKIAKDWGLKVDVLGLKQIQALKMGSFLSVAKGSVEPPQFIVLQYRGAAAKAAPVVLVGKGITFDSGGISLKPGEGMDEMKYDMCGAGSVLGTMRAVAEMGLKVNVVAIVPTCENMPAGNANKPGDIVTSMKGLTIEVLNTDAEGRLILCDALTYAERFKPAAVIDVATLTGACIIALGHHNTGLFSKDDALAGELLDASREAGDPAWRLPLDDEYQDQLKSNFADLANIGGRPAGSVTAACFLSRFAENYPWAHLDIAGTAWKSGAAKGATGRPVPLLAQFLIDRAGA

SEQ ID NO: 50642 - protein, 232 aa, Burkholderia mallei
MAKISKRRQAFAAKVDRQKLYPIDDALALVKECASAKFDESIDVAVQLGIDAKKSDQVVRGSVVLPAGTGKSVRVAVFAQGEKAEQARAAGAEVVGMEDLAEQIKAGQMDFDIVIASPDTMRIVGTLGQILGPRGLMPNPKVGTVTPDVATAVKNAKAGQVQFRVDKAGIIHATIGRASFEPTALRTNLSALIEALQKAKPATSKGVYLRKIALSSTMGVGVRVDQGSLAAQ

SEQ ID NO: 50643 - protein, 508 aa, Burkholderia mallei
MTEPTQPQAAVAADENQIVAERRDKLRALRDQGIAYPNDFQPTHHAAGLQTEYADADKEALDAKALDVAVAGRMMLKRVMGKASFATVQDGSGQIQFFVTPADVGAETYDAFKKWDLGDIVAARGVLFRTNKGELSVKCTELRLLAKALRPLPDKFHGLADQETRYRQRYVDLIVTPETRATFRARTKAIASIRKFMSDADFMEVETPMLHPIPGGAAAKPFVTHHNALDMQMFLRIAPELYLKRLIVGGFERVFEINRNFRNEGVSPRHNPEFTMMEFYAAYTDYRWLMDFTERLIRQAAVDALGTATIRYQGRELDLAKPFHRLTITQAIQKYAPNYTDGQLSDDAFLRGELKRLGVDVTQPAFLNAGIGALQLALFEETAEAQLWEPTFIIDYPIEVSPLARESDTVAGITERFELFVTGREIANGFSELNDPEDQAARFRKQVEQKDAGDEEAMFFDADYIRALEYGMPPTGGCGIGIDRLVMLLTDSPTIRDVLLFPHLRRED

SEQ ID NO: 50644 - protein, 126 aa, Burkholderia mallei
MKAHRTLRISMLAAGALVSSLAAAQPHGPGGPGDERHGPPPGKHVGRDHGKHGDDGARPGEHRGDENAAWRRGERLPDEYRDRQYVIDDWRGYHLSPPPRGYHWVGIGGDYLLVRISTGVILQIGP

SEQ ID NO: 50645 - protein, 196 aa, Burkholderia mallei
MTNEGIAMNRSEPLLQVFDLSVEVAKRRVLQSVSLAVPAGALVVLMGANGSGKSTLGMTLAGHPAYRATHGHVRFGGQDLLAMSVQERARAVSGGERKRNELLQLALLCPRLAMLDEIDSGMDVDGVRAAVALIGRLREQGTAFVIVSHYLQMIEALVPDTVLLLDRGRIAESGDLALARDIAAKGFARSDALAQA

SEQ ID NO: 50646 - protein, 315 aa, Burkholderia mallei
MIERDDQRQRKQRADPEAEQQRRGQRQAERRGDQRDQAGEQRDERREERGAAIRQPLDERRHGEPRDDLRERHAAEQAARGFGRPAERHVVGRQPGEHERVRARAEAEERGEQPRARAVGAARGGARVCGAGRRAGRERPQQRGRGGGQRPAGERAGPADRVRGEWRGDAREHRAAHDRRRIEAHHAARARGELRLDERGQQRLRGRDAEPRAQRGGEQRGGRARRDARRAREPDQRDAEPDARAHADAAREPWRDEPERAHQQDRQGREQARRAVGQAARALDRVEKRADRRERRAQVQADENDGDEPPCGGKQ

SEQ ID NO: 50647 - protein, 282 aa, Burkholderia mallei
MKGFLRAACFAILTFLSIGGACRAEQPVPPLAARVTDETGTLTAAERATLEQSLKDFETRKGSQIAVLIVPTTQPETIEQYSIRVVEQWKLGRANVDDGALLIIAKNDRALRIEVGYGLEGVLTDATSRRIIDELIVPSFRRGDFYGGVSAGVGGMMRVIEGEPLPPPRARGGEEGGLGRVLPLLFVMTIVAGGVSRAIFGRLAGSVVTGGVVGFVAWLWSGALLVAIAAAAIALFFTLLGGGMGARVGGPFIGGRGGRGGGNDGFRGGGGGFGGGGASGRW

SEQ ID NO: 50648 - protein, 137 aa, Burkholderia mallei
MEASIMTDSPMQLPQKPPALRVVPQPSDANVHGDVFGGWIMAQVDIAGSIPASRRANGRVATVAVNSFLFKQPVFVGDLLSFYASIVKTGNTSVTVDVEVYAQRMSLMSEIVKVTEATLTYVATDSDRRPRALPPLE

SEQ ID NO: 50649 - protein, 315 aa, Burkholderia mallei
MLMDIKLDTPLLGALRCFEAAGRLGSFTKAADALHLTQSAISQQIRQLEARLGYPLFVRHARGLALTPKGGALHEATVAAFASLGRTLRQLSAPDAPLQVSCLPSFALQWLMPRLTEFHRLHPQTPVRLRAEFHAIDRETMSADDIDIAIRWDPFSYGALHVEPLFDESLVAAAAPAYLDRHPPRATAKWVSSVVPLHDASAWPEAPRYVEWRTWLDAVVPGYASALRGPEFNLASLAIAAAVAGQGVVVCREALVDDEIARGRLVNVFARRVPAPAQYKAICARPEDARVKAFVGWLRAESDSYAARRQTQARP

SEQ ID NO: 50650 - protein, 416 aa, Burkholderia mallei
MRARGARPLFAFLPRFDSTMNTAADSLLRLASRVDAIEPFYVMEIVKEAAVLERAGRDIIHMSIGEPDFTAPEPVVDAAAAALRRGVTQYTSALGIAPLREAIAAHYARAHGLSIAPERIVVTAGASAALLLACLALVGRDDEVLMPDPSYPCNRHFVATAEGRAVLVPSGPETRFQLTADDVKTRWGERTRGVLLASPSNPTGTSLEPAELGRIIDAVRARGGFSIVDEIYQGLSYDGAPVSALSFGDDVVTVNSFSKYFNMTGWRLGWLVVPPALVGTFEKLAQNLFICPSALAQHAALACFEPDTLAIYEARRAEFRRRRDFIVPAIESLGFKVPVMPDGAFYVYAQCGGVAHPAAGDSAALVNAMLHDAGVVLVPGMDFGVHAPRDYIRLSYATAYSRLEEAVERLGKLFGR

SEQ ID NO: 50651 - protein, 124 aa, Burkholderia mallei
MAIAKEDILAAVEGMTVLELNELVKAFEEKFGVSAAAVAVAGPAAGGAAAAAEEKTEFTVVLAEAGSNKVAVIKAVREITGLGLKEAKDLVDGAPKPVKEGVDKASADEAKKKLEDAGAKVELK

SEQ ID NO: 50652 - protein, 261 aa, Burkholderia mallei
MFTRLREDVATIRERDPAARSAWEVLTCYPGLHALVFHRLAHACWRSGWRWLGRFVSQLGRFLTGIEIHPGATLGRRVFIDHGMGVVIGETAVIGDDCTIYQGVTLGGTSLARGAKRHPTLERGVIVGAGAKVLGGFTVGAGAKIGSNAVVVKPVPAGGTAVGNPARVVVPAEAKRTPERTAFCAYGITPNADDPMSLAIHGLIDHAAKEAQRVDEIVVALERLGAHLDALQGTDGARLDLRRLSAAFEGRALDGGTAAER

SEQ ID NO: 50653 - protein, 293 aa, Burkholderia mallei
MSILINKDTKVITQGITGKTGQFHTRACREYANGREAFVAGVNPKKAGDNFEGIPIYASVKEAKAETGATVSVIYVPPAGAAAAIWEAVEADLDLAICITEGIPVRDMIEVKDRMRREGRKTLLLGPNCPGTITPDELKIGIMPGHIHRKGRIGVVSRSGTLTYEAVAQLTALGLGQSSAVGIGGDPINGLKHIDVMKMFNDDPDTDAVVMIGEIGGPDEANAAQWIKDNMKKPVVGFIAGVTAPPGKRMGHAGALISGGADTAEAKLEIMEACGITVTRNPSEMGRLLKAAL

SEQ ID NO: 50654 - protein, 169 aa, Burkholderia mallei
MTKYDERFKLEVVQRYLSGDKGCKALAREFGVSSTQVEQWVASYKRHGADGLRRKGHVKYSAQFKLEALERMQRENLSRTHMQALLDIRDAGAIARWERQYHEGGFAALLPRPKGRRPKMSTSPLSEPAPPESEPDTRTREQLLKEVEYLRAEVAYLKKLDALIRAEQR

SEQ ID NO: 50655 - protein, 3334 aa, Burkholderia mallei
MAELDVLPAAERTQVLHGWNETGRAYARDACLHQLFEAQVSRTPEAAAVICGDETLSYTDLDARANRLAHYLRGQGVGPDTRVGLALGRGVEMMTGLLAILKAGGAYVPLDLGYASERLRAILDDSRPAIVLADAAGRAALDALAGAPPIADLHADASRWSALPSTPPRVEGLTPRHLAYVIYTSGSTGQPKGVMVEHASVVNLWRALDEAIYRTHPSARRVSLNASIAFDSLVKQWVQLLSGRTLVVVPEPVRFDGRRLLDAIGRDRIDVFDCTPSQLALIEGARGPEDEAYPQVTLVGGEAIGEGMWSELASASSRTYYNVYGPTECTVDATLARITAEHAPHIGGPLANVRAYVLNERLSPAPVGVRGELYIGGAGVARGYLNRPELTRERFIDDPFVAGGRLYKTGDLARWRTDGSLEYLGRNDFQVKIRGFRIELGEIEAQLAKVTGVREVVVLARDSAAAVHDSATEHATPNALSPSPETSTATATATATATATEKRLVAYYTGDADVAALRAQAAQHLPSYMVPSAYVRLDAWPLTPNGKLDRRALPEPADDAYARAEYEAPQGAKEEALAAIWRDLLQVDRISRHDNFFQLGGHSLQAISLGDMMRERGLHADVRTLFNAETLAALAAQSGTDSIDVDVPPNLIPVGAARITPDMLPLVALTQPQIDAIAQQVDGGATNVQDIYPLAPLQEGMLFHHLLHTQGDLYLEPHLLAFRTRERLERFLSALQCVIDRHDVLRTGFFWEGVPQPVQVVWRRARLPVEYVELPDGHGDVASQLEARCDPRRHRIDIGRAPLVHCHVAHDARNDRWVLGVLTHHLVSDHTTLALLAEEAQAFEQGRGDALPPAVPFRNFVAHARLGTSEREHEAFFREMLGDVDEPTAPFGLLDVQGDGSAIVEHRRALAPGLSRSVRAHARRLGVSAASVMHVAWSLVLARTANRRDVVFGTVLFGRMQGGAHAHRTMGLFMNTLPVRIALDESDVETSLIATHDRLARLLRHEHAPLALAQRCSAVPAQAPLFTSLLNYRYSPHEEQGDATDDDVQFIAARERNNYPLTMIVDDTGEGFALTAQVDASIDAARVCAFMHTALEQLVRALDDARGAVLAELDVLPADEHRCVVSACNDTDAELPGVDFVDRRFEAQAARTPEAIAVACGAHALSYAALNRRANRLAHYLRAHGAGPERVVALALERSVDMMVGLLGILKSGSAYLPLDPAYPAERLAYIVDDARPALLLTEAALRDDWRDAGAPVVLLDADGPAIDACPDHNPDAAAGRDARTLSSLAYVIYTSGSTGRPKGVMIEHRNLANLLGAMGEQPGIGAHDVLLAVTSLSFDIAALELFLPLLHGARAVIAARDDAADPARLAHLIESSGASLMQATPSTWRMLAQHGWPRSARPLTLLCGGEALPPALAERLLAHVPAIWNLYGPTETTVWSTVRRVTTPVVDIGGPIANTQVYVLDERLRPAPIGVSGELYIGGAGVARGYLNRPELTRERFVDDPFRRGGRLYRTGDLARRRADGNLEYLGRNDFQVKIRGFRIELGEIEAQLAKAHGVQGVALAARDTPTADKRLVAYYVGDASAAALREHAAARLPAYMVPAAYVRLAAWPLTPNGKLDRAALPAPDDEAYARAEYEAPRGEHECKLAAIWRAVLQVERIGRHDDFFELGGHSLLAVRAITAMRDAFGSDTSLRDLFARPVLKDLAEHASTAARARDAAIPKAARGEPAPMSFAQQRLWFLARMGGLGDAYHMPIAVRLRGALDVDALQRALSRIVSRHDALRTTFALEGEQPVQRVHADDGAGLRLRIDDLRGCADAGARRARILAGQASEPFDLARGPLVRGALVREADDVHTLCVTIHHIVSDGWSIDVFCRELSELYRAFAGGQPDPLPPLPVQYADYAAWQQRGIGGAALHAQAEYWRDALAGAPTLLELPTDRPRPPQPDYAGATVGLALDAPLTAGLRALARRHGATLFMTVFAAWSVLLSRLSRQTDVVIGTPSANRGHAQIEGLIGFFVNTIALRVDLDGAPTVAELLARVKARTLAAQQHQDIPFEHVVERVQPARSLSHSPVFQAMFAWQHASRGEMRLEGLRAEPLDDAARTIAKFDLTLSLRESGDAIDGGLEYASALFERATIERFAGYLRRLLEGMVADDTQRVDALPMLSRDERRDLIERRNATARPYPANSGVHRLFEAQAARTPDATAIVDGATTLDYRALDARANRIAHALAHAGVRAGDRVALHLEPSIGLVAAQLAVLKLGAAYVPVDVGNPPARKAFVAQDSGARLVLGDAALDWPAAAGVPQRDLAALLAGPWPSDAPARAPQCGGDTPAYVMYTSGSSGQPKGVLVTHRGIARLAVNSGYATFDASDRFAFASNPAFDASTFEVWTALLNGASIGIVKRDDLLDLGALAGKLSSIGVTCLFLTTALFNRCVSFDPAMFARLRCVISGGERADPAVYRKVMEAGPPRHLLNAYGPTETTTFAAVWEAEPRTLAAQAAPIGRPIGNTSVYVLDAYGAPVPVGVTGEIHIGGPGVAQGYLNRPALSAERFVRDPFVGGDARMYRTGDLGRWRPDGMLDCIGRADFQVKIRGFRIELGEIEACLLEHGALAQAAVLARDDGGDGGKTLVAYYVPRAGHEDGAPALRAHLAARLPEYMVPAAYVRLPAMPLTPNGKLERRALPAPDERSYVRRDYAAPQGEIETTLARIWAELFGIERVGRHDGFFELGGHSLLAVRMVARVHDVLGVEVPLRALFADPVLHVFASAVARASTRQASSNLVAFRSAGTAAPLFFIHSGLGEIGFVGDLLPGIAPEIPVYGFAAVGFLAGETPHATIEEMAAQYVDAMRRVQPHGPYRLAGWCAGGNIAFEMAHQLIAADETVEFLCMIDSPTSAPIDRSVTACVLARIPDDIPEALRTRLHALGDAFDVRGMLHACQAAGMLPIDLPTGLMERHVAVQYAIKHAKLNYVPPRLPVDVIHFVAQDEPMWRNGWAMDGWHDVADRVICLPASGDHMTMVAAPHAEQLGRRITDALAVHGGPRADGAERGYAPRIAIQTAPRDARAPTLFCIPGAGASVTTFSTLARHLPATFSVDGLQPRGLCGTMVPYLDVETAARAYLRSIRKAAPRGPYHLVGHSFGGWVAYEIACRLQEQGERVATLMLLDTERPGATDIVRGRKTRVDALAKLVELYEMHLGRPLGVSRDDLAALAHDAQIEHLRAALVRAKILPPSVHPNVLLGVVRVLEMNVNTPYRPAGLYAGTMHVVLIANAKADADLDAWRDEQAEQWRGLADDVRIVRAGGNHMTMLQPPHAASIAALLERTAGAPARLAQVH

SEQ ID NO: 50656 - protein, 364 aa, Burkholderia mallei
MKQPPYPTDDARWAALVARDVDADGAFCYAVKTTGVFCRPSCASRLPRRENVSFFADTGAARAAGYRPCKRCRPEGLPRELDIVNRACAVLDAHRQDRFTLAQLSDAVHVSPFHLQRLFKRVVGVSPRQYQAAQRGAALRDALQSGAAVTRAAVDAGFNSPSRLYESVPRELGMSPSAFRRKGAGLKIDYATADTRLGVVLVAATSKGICKIAFGDAAAPLVDELRTGFANAQIAESPERIAPFIAQIDAYLNGTRRRFELPLDLAATEFQQRVWDALRRIPYGETRSYTQIAEALGAPRAVRAVASACASNPVALAIPCHRVVQKGGSLAGYRWGLPRKAALLDAEAQRAAGESVESAVDHAA

SEQ ID NO: 50657 - protein, 624 aa, Burkholderia mallei
MFSKAAVWLVIALVLFTVFKQFDKPRVQEGVSYSQFMDDAKNGKVKNVVVQGRNLTVTPADGQKYQIVSPGDIWMVGDLMKYGVQVSGKADDEPNALVSALYYLGPTLLIIVFWFYMMRQMQGGGKGGAFSFGKSRARLIDENNNAVNFSDVAGCDEAKEEVSELVDFLRDPQKFQKLGGRIPRGVLLVGPPGTGKTLLARAIAGEAKVPFFSISGSDFVEMFVGVGAARVRDMFEQAKKHAPCIVFIDEIDAVGRHRGAGMGGGNDEREQTLNQMLVEMDGFEANSGVIVIAATNRSDVLDKALLRPGRFDRQVYVGLPDIRGREQIMRVHLRKVPIANDVDAAVIARGTPGFSGADLANLVNEAALFAARRGKRIVEMQDFEDAKDKIFMGPERKSAVIREEAKRATAYHESGHAVIAKLLPKADPVHKVTIIPRGRALGVTWQLPEHDNETYSKDYLLDRLAILFGGRVAEELFLNLVSTGASDDFNKATQTARAMVARFGMTDALGPMVYVDDENDGGPFGRGFTRTISEATQQKVDAEIRRVLDEQYGLARRLLEENRDKVEAMTAALMEWETIDADQINDIMEGRPPRSPKSVPPAGDPSSGGSSGAEVKPGNATAPA

SEQ ID NO: 50658 - protein, 489 aa, Burkholderia mallei
MTTAHETLALKDPALLRERAFVAGEWQAADGGATLEVRNPATGALIGTVPAMGAAETRRAIDAANAAWPAWRKKTAKERAAILRKWHDLMIAHADDLALILTTEQGKPLAEAKGEIGYAASFLEWFAEEGKRVYGDTIPTPAADKRIVVTKEPVGVCAAITPWNFPAAMITRKVGPALAAGCPIVVKPAEATPFSALAMAVLAERAGVPAGMFSVVTGEPKAIGGELTSNPIVRKLSFTGSTPVGRLLMAQCAATVKKVSLELGGNAPFIVFDDADLDAAVEGAIASKYRNSGQTCVCTNRFYVHEKVYDAFAEKLTAAVAKLKVGPGTEAGVVQGPLINGAAVRKVEAHIADALDKGARVTTGGQRHPLGHGFFEPTVLTGVTPDMKVAKEETFGPLAPLFRFSTEEEAIRYANDTEFGLAAYFYSRDIGRVWRVAEALEYGMVGINAGIISNEVAPFGGVKQSGLGREGSHYGIDDYVVIKYMCVAV

SEQ ID NO: 50659 - protein, 588 aa, Burkholderia mallei
MDGNPFLKIQSLGRALMLPIAVLPVAGILLRLGQQDVLNIKMIADAGGAIFENLPLLFAIGVAVGFAKDNNGVAALAGAIGYLIEVAIMKDIDPKLNMGVLSGIIAGVVAGLLYNRYKDIKLPDYLAFFGGKRFVPIITGLACVVLGIVFGYVWQPVQHAIDAVGQWLLTAGAIGTFVYGFLNRLLLVTGLHHIINSLVWFVFGTFTPAGGAAVTGDLHRFFAGDPSAGGFMAGFFPIMMFGLPAACLAMFHEAPKARRAIVGGLLFSMALTSFLTGVTEPIEFSFMFLAPVLYVIHAVLTGLSLAICQLLGVKLGFTFSAGAIDYVLNYGLSTKGWIAIPLGLAYGLAYYGLFRFFIRKFNMATPGREPAGADAQAQSFASGGFVAPTAGASVPRAQRYIAALGGAANLSVVDACTTRLRLSVVDPEKVSEADLRTIGARGVLKRGGSSVQVIIGPEADLIADEIRATLGSGAAAPAAAAAAAPAAAATATAAGAQSGPLDPEPTRWLAVFGGATNVASLDAVAATRLRVVVRDPSAVDRQRLATLDVAWVASDTFHIVCGQSAPRYAQQLAARLPSSDGGTAAQPA

SEQ ID NO: 50660 - protein, 124 aa, Burkholderia mallei
MRHYEIVFIVHPDQSEQVPAMIERYKSTITSHGGQIHRVEDWGRRQLAYMIEKLAKAHYVCMNIECDQTTLDELEHAFKFNDAVLRHLIVKMKKAETGPSPMMKEVQREEAKKAAAAQPTEAQA

SEQ ID NO: 50661 - protein, 445 aa, Burkholderia mallei
MSHREGSLEAPTRHPLDWRSDAFYDQAAIDAELARVFDICAGCRRCVSLCGAFPTLFDLVDETETGEAHAVDPKSFGKVVDQCYLCDLCYMTKCPYVPPHPWNVDFPHLMLRARAARYRRNEVRLRDKLLSNTDMLGHFAGIPIVTQAVNAANRTPAMRGALEATFGVDRRAWLPPFASRKFRRVAPRSPAPPPRDGERTPGRVAIYATCYVNYNEPGIGHDLLAVLAHNGIPYELVASEACCGMPLLEQGNLEGVAAKKAANIPVLARHAREGHALIGAIPSCVLMYKSELPLMFPDDADVRAVADAFWDPFEYMIARHRDGLLKTDFKHELGVVSYHVPCHARVQNIGRKAADALSLVPGTKVKVVERCSGHAGTFGVKREFHAQALKIGAPVFNAIAEQAPDYMSSDCALAGHHIEEGIGAKGVEPPPFAHPITLLRRAYGI

SEQ ID NO: 50662 - protein, 263 aa, Burkholderia mallei
MGFLDGKRILLTGLLSNRSIAYGIAKACKREGAELAFTYVGDRFKDRITEFAAEFGSELVFPCDVADDAQIDALFASLKTHWDSLDGLVHSIGFAPREAIAGDFLDGLTRENFRIAHDISAYSFPALAKAALPMLSDDASLLTLSYLGAERAIPNYNTMGLAKAALEASVRYLAVSLGAKGVRVNAISAGPIKTLAASGIKSFGKILDFVESNSPLKRNVTIEQVGNAGAFLLSDLASGVTAEVMHVDSGFNAVVGGMAGLEE

SEQ ID NO: 50663 - protein, 684 aa, Burkholderia mallei
MSEFTDSAAGRSSTPPADAPSPASRPLRAIQPLPDQLISQIAAGEVVERPASVVKELVENALDAGAGTLRILLDEGGVKRISITDDGCGIPADELPLALMRHATSKIRSLAELEAVATLGFRGEALASIASVAEMFITSRTEDAAHATRIDAQTGVVGPAAGTRGTTIEVRELYFSTPARRKFLKSEQTEFGHCLEMIRRAALARPDVAISVLHNGRAVEHWNASEPAARVAKILGDGFATAHLPLDERAGPLAVYGCAGLPTASRGRADQQYFFVNGRFVRDKLLTHAVRAAYEDVLHGDRYPSYVLFLDLPPEAVDVNVHPSKIEVRFRDSRSIHQFVFHAVQRALARHAGASPETTAGGHAAHLAPIVPASADSAAAPGASFVRSGPTAGAGVGQPASGNTWLRQSRMTQGTLPVAQPLALYDALFGRKDTGAGTPHGATLALEAHDAHDAPDGANAPGAPLYATMPGDDATPAFSPAGAAGLPMHDEQPLGFAVGQIHGIYVLAQNARGLVIVDMHAAHERILYEQFKRALADRTIAVQTLLIPVSMTATPVEVGTAEEERETLDALGFDLAVLSPTTLAIRAVPALLKDADLQALARAVLADLHAFGGSRVLTERQHELLGTLACHHAVRANRRLTLDEMNALLRQMEATERADQCNHGRPTWYQLTLGDLDKLFMRGQ

SEQ ID NO: 50664 - protein, 518 aa, Burkholderia mallei
MRRARGANHNYVRMEMRQMQDQYILALDQGTTSSRAMLFDRQGNIVSIAQKEFEQIYPQPGWVEHDPQEIWSTQAGVAAEAVTRVGLNGTAIAAIGITNQRETTIVWDRETGHPIYNAIVWQDRRTADFCDKLKAQGLSEKVRAKTGLPIDSYFSATKIRWILDNVEGAREKARQGKLAFGTVDSWLVWNFTKHELHVTDVTNASRTMLFNIHTLDWDDELLDALEIPRSMLPQVRASSEIYGPTKTTVFASKIPLAGIAGDQQAALFGQMCTSSGMVKNTYGTGCFLMMNTGETPIESRNNLVTTIAWQVDGKVSYALEGSIFIAGAVVQWLRDGLGIIKSASEIEALAAGVPHTDGVYLVPAFAGLGAPHWNARARGSLFGVTRGTTSAHLARAALDSIAYQSLDVLKAMEADSGIRIGELRVDGGASANNLLMQFQADLLGVDAVRPRITETTALGAAYLAGLAIGYWQNVDELHSQWQLERRFAPSMQAEQVGSCLAGWQRAVRAAKAWADDTQ

SEQ ID NO: 50665 - protein, 381 aa, Burkholderia mallei
MMRDAANFEPADSRVTRPAFWQALPERWTSDVEETLVCCHVRQETHDVKSFFFRSPQGRAFSFEPGQFVTLELDIDGETINRCYTISSSPARPHTISITVKRVPGGKVSNWLHDNLQPGAPLRVLGPAGEFTCARHPARKYLFLSAGSGITPLMSMSRAHHDLAEDRDIVFVHSARTPDNIIFARELDLIASTHANFRTAFVCERLGARTNWHGVTGFLSLPLLKLVAPDFMEREIFTCGPAPYMKAVRELLAEAGFDRSRYHEESFSFETLAQGEAPADAPAGEDAAARGAQVRQYTIAFAKSHREIACGADQHVFDAARRAGVRLPASCTQGMCGTCKVKLVSGQVDMKHNGGIRQREIDQGMVLLCCSKPLSDLVVDK

SEQ ID NO: 50666 - protein, 513 aa, Burkholderia mallei
MACVIGVDIGTQSTKAVLVGLDGAILAQHAVAYRPDTPKPLWAEQWPHVWFDAVRECIARVSADARAAGIGAESIEALCVSSLYGGSGIPVDREMRPLHPCLIWMDRRATDEVDWVRAHVDVARLGEITGNGVDSYYGYTKMLWLREKRPDVWANVRYFVPPNAYVAYRLTGELAVDHSAAGNIGGVYDLGRRDWSDEALDMLGIPATMMPERLVDSDAVVGGLLREWAHALGLEVGTPVVAGGVDAAVATFAAGATRRGQHVAMIGTSMCWGYLAETADARRGLVSMPHVFDGRRDLYVFGGAITAGASVSWFREQFCHAEIEAARAGGGDAHRLLEAAAAEVSAGSDGVLFLPYLMGERSPVWDAKASGAFVGLSLYHTRAHLYRAVLEGLAYALRHNIEAGAAGARALDARLVVVGGAAHSDLWMQSIADITGYPVWTIAEEVEAAMGAALLAALGAARVSREAARRGWVTLAERARPDARHAALHDARFALYAGLYPALQPFMHGLQTS

SEQ ID NO: 50667 - protein, 302 aa, Burkholderia mallei
MIVRPREHGFRMLFVWNGSVLKSILPQLALMSAVSIVALLTNGRILGEKVPLNPTPFTLAGLALAIFAAFRNNASYDRYWEARKLWGGVLSAARALTSQALGYDALADGASFARATAGFVYALKHQLRGTDPTHDLRRRLPADWLDPVLAAQFRPVAILHALRGRLAGRHRDGALTDAQLWMLDAQLNELAAKLAGCERIASTPIPFPYHVLLHRTVYAYCVMLPFGLVDSIGIATPFVSVFVSYTLIALDAIAGEIAEPFGDGPNHLALDALTRQIERSLFELAGLPLPDEMRAGPNHRLS

SEQ ID NO: 50668 - protein, 104 aa, Burkholderia mallei
DTSDTIAKIKYPMIGDPTLAISRNFDVLIEEEGLALRGTFVINPQGEIKLCEIHDNGIGRDAGELLRKVQAAQYAAAHPGEVCPAKWTPGADTLTPSLDLIGKI

SEQ ID NO: 50669 - protein, 254 aa, Burkholderia mallei
MGRMLIEAVLAAPDATLAGALDRTGSSQLGQDAGAFLGKQTGVALTDDIERVCAEADYLIDFTRPEGTLAHLDAALRHDVKLVIGTTGFSEPQKAQLRAAGGKIALVFSANMSVGVNVTMKLLEFAAKQFAQGYDIEIIEAHHRHKVDAPSGTALMMGETIAAATGRTLDDCAVYGRHGVTGERDPSTIGFSAIRGGDIVGDHTVLFAGIGERIEITHKSASRVSYAQGALRAARFLAGHQAGFFDMQDVLGLR

SEQ ID NO: 50670 - protein, 234 aa, Burkholderia mallei
MTMAGLAIDARGLTKWFGEGEARTRALADVSVQARFGEMLLIVGPSGSGKTTLLSVMSGILRPDAGSVIVDGVDLWAQDNDAIAEFRLNRIGFVFQDYHLFASLTTAENVAIPLILKRRDWNRALADAHEYLDVVGLRNRASLPPVKLSGGEQQRVAIARAIVSQPDILILDEPTASLDGDTGRTIIDFVKHKVLNDKRCIVIVTHDSRIFDYADRILRMEDGKLTAIERGGGL

SEQ ID NO: 50671 - protein, 344 aa, Burkholderia mallei
MTQSSHFATGAAPIELVCPAGSLPALKAAVDNGADCVYLGFRDATNARNFAGLNFDAQAIAAGIRYARERGRKVLVALNTYPQPDGWAAWREAVGRAADAGVDAIIVADPGLMRFARERYPELRLHLSVQGSATNYEAINFYHEHFGVSRAVLPRVLSLAQVEQVAENTPVEIEVFGFGSLCVMVEGRCALSSYATGDSPNTRGVCSPAKAVRWQKTPDGLESRLNGVLIDRYEDGENAGYPTLCKGRFTVADESYYAIEEPTSLNTLELLPKLMQIGIRAIKIEGRQRSPAYVAQVTRVWRDAIDQCTANLARYYVKPAWMTELNKVAEGQQHTLGAYHRPWK

SEQ ID NO: 50672 - protein, 420 aa, Burkholderia mallei
MTYCAIDFGTSNSAVALPRGGGTTGMRLAPVEGEHLTLPTAIFFNTDESTREYGRAALASYIDGFDGRLMRSMKSILGSPLAETTTDLGDGSAIAYTDVIALFLMHLKQKAEACAGGAIGCAVLGRPVFFVDDDPRADRLAQQQLEAAAHAVGLADVQFQYEPIAAAFDYESRQDAERLVLVADIGGGTSDFSLVRVGPERMRRLERKDDVLAHHGVHVAGTDYDRRVELSAVLSAFGYRALDPEGRELPNRIYFDLATWHLINTVYTPKRVGELKLMKHLYADARHFDRLLRVVEQRLGHALAARAEEAKIGVSAGGETMIDLNDVEEDLLIAFDADQLIDASRDETARIVDAARETVRLAGIAPRDVGALYFTGGSTGLAFLSGALAAAFPDAQPVYGDRLASVATGLGIHARRVYGG

SEQ ID NO: 50673 - protein, 627 aa, Burkholderia mallei
MSFQAEVKQLLHLMIHSLYSNKEIFLRELVSNASDAADKLRFEALENNALYESDPNLRIRLSFDKAARTITIDDNGIGMSRDEAIANLGTIARSGTKEFFSKLSGDQQKDAALIGQFGVGFYSGFIVADRITVETRRAGLPASEGVRWESAGEGDFQVDTIERAARGTTITLHLREGEDELLSSYRLKSIVQKYSDHVALPILMKKEEWDQEKGEMVEKDEDETINQASALWTRAKSEVTDEQYKQFYQHVAHDHQDPLAWTHNRVEGRSEYTQLLFVPSHAPFDLWNRDYRGGLKLYVKRVFIMDDAEQLLPQYLRFIKGVVDSSDLPLNVSREILQESRDVKAIREGVTKRALSMLEELANAEDDAGKEKYKTFWSAFGQVLKEGVGEDHANRERVAKLLRFASTHGDTDAQDVALADYVARMKPEQTKIYYVTADTWQAAKNSPHLEVFRKKGVEVLLLTDRVDEWMLSFLHEFDGKPLASVARGDLDLGALNDDEKKAQEETGEAMKPVVDKMKETLGEKVKDVRVTFRLTDSPSCLVADDNDMSGYLQRMLKAAGQSAPSFQPILEINPEHPLVKALKADGADFGDWCHLLFDQALLAEGGALEDPASFVKRTNALLLSRAA

SEQ ID NO: 50674 - protein, 343 aa, Burkholderia mallei
MAFNVTLKQSGRQFQVEADETVLAAALRQNVHLPYGCKNGACGSCKGTIVQGQFEQGPHSASALSNDERTRGLALLCCSKPQSDLEVDVREIAGVDGVQVKKLPCRVAALERRADDVIVLKLQLPANERLQYLAGQYIEFILKDGARRSYSMATAPHEEGPIELHIRHMPGGKFTDHVFGPMKERDILRFEGPLGTFFLREDSDKPIVLLASGTGFAPIKAIIEHAHHVKLERPMTLYWGARRKKDLYLLDAAEQWAKEIPNFKFVPVLSEPDASDAWTGRTGFVHRAVIEDLPDLSGHQVYACGAPVMVESAQRDFTQHHRLPADEFYADSFTSAADLAHTV

SEQ ID NO: 50675 - protein, 757 aa, Burkholderia mallei
MTGFIAIGTLLQAALVRFGGADMPLAPYFPFIAAAAWATSLAGGIAATAASAALAWLLFLNDPAAYSAPLAWRLMQLATFAVVSCAICAIVVALKGSRRANDALRRREAGARHYYETLLQSLTQGVVVSDRHGMLTYMNPSAAALIGCDATAVRGLPFRDVYRAYDGRGARVRASALEHVLRSGRSASVEGHWLAPHDGQRVPIAEAASPLVDSAGDMTGAVLIVRDISIERERSAASQMLRRLVEASPDAIVGVGSNRRITSWNPAARRMFGYDEHAARGCDVAMLIAPRWLRNHPLPESVPDMREPIENVDVLCVRQDGGRMRATMSASPVFDERDACIALSLTLRDTGEQRRRERRVHRSLRGARDARRQADTSNRLKDELLATVSHELRTPLNVIYGWIEVLRNPVDGALQQQAIDAIDRSARSLSRMVGDILDASSLATGKLRLDAMPVDLVRIVNDVTGALGAAAQADGIALSVECALATCIVSGDGERLRQMLSNLLSNAFKFTPRGGRVTVSLERHDAQAKLTVADTGHGISPEFLPHVFEAFRRAEGAPASPRRGLGLGLSIVRHIAELHGGKVEAASAGKNRGTTFAITLPAGWQPMGALAWAAQAEGGARMTLDAQRILLVDDDATSRASLAAALKTLGAEVVVASSGREAIGKVDAMRPTVVLSDLAMPDGDGYWLLDTLRHVDADADADTRTRAANDAPVLAVTAHAGRDSERRVLAAGFDGYLCKPVDLQTLARAILRATGSG

SEQ ID NO: 50676 - protein, 155 aa, Burkholderia mallei
MSAVRSDAGEAAAVRGSIPLQASAAFPKAARLLKTDEFSSVFRLRPWRRTAHFVIYGKPTGRDARLGLVIGKKYAARAVTRNLVKRLAREAFRTRRAEFAGWDILLRLHTRFDKKAMPSAASAPLAALCAGEIRELLDRAAREVARRNGAKPASE

SEQ ID NO: 50677 - protein, 348 aa, Burkholderia mallei
MSTPIASPAAQAIAPTAPPTLPRPSADDFAAVLERGAFAALEQFGIVDVTGADAATFLHGQLTNDVEHLDAASARLAGYCSPKGRLLASFLAWRAGHDVRLLVSKDVQPAVQKRLSMFVLRAKAKLADASGALVAIGFAGDVRAALSGIFDALPDGIHTKVDAPAGALMRLPDAAGRARYLWIATRAEFDARLPALEAALPRVSAAVWDWLDVRAGEPRITQPAVEQFVPQMVNFDVIGGVNFRKGCYPGQEVVARSQYRGTIKRRTALAHVAAGTDAAHAGVELYHSDDPGQPCGMIVNAAAAPEGGVDALVEIKLAALGNGSVHLASASGPTLAFLPLPYALPVEA

SEQ ID NO: 50678 - protein, 299 aa, Burkholderia mallei
MRWAILFIFVACAAFTHRRGKVRHGFFRQLSDHSTFTAPLNCFAYAFSNVPNTPYIDDAHFPELAILKREWRTFRDEALALRDASRIKASGEYNDIGFNSFFRKGWKRFYLKWYDRPHPSALAHCPRSLAILSKLPSVKAAMFAQLPPGGKLGLHRDPYAGSLRYHLGLSTPNDDECAIVVDGDPYAWRDGEAVMFDETYLHWAENRTGHDRIILFCDIERPMKYRWAQAVNGAIGGVLMRAAASPNETGDRTGGLNRLFRYLYAVRRVGKRLKAWNRTVYYALKWALFGGILIAILWR

SEQ ID NO: 50679 - protein, 266 aa, Burkholderia mallei
MGQKIHPTGFRLAVSRNWASRWYANNNNFAAMLQEDIGVREYLKKKLKNASVGRVVIERPAKNARITIFSSRPGVVIGKKGEDIELLKTELQRRMGVPVHVNIEEIRKPETDAQLIADSITQQLERRIMFRRAMKRAMQNAMRLGAQGIKIMSAGRLNGIEIARTEWYREGRVPLHTLRADIDYATSEAKTTYGIIGVKVWVYKGDTLGRNDAPVVEEVTEDKRPRRNARPGDRRPRRDGEGGAPGARRGGPRRGAGKPEDGKTGE

SEQ ID NO: 50680 - protein, 258 aa, Burkholderia mallei
MNALPNRQPAGTTSSLVVRNLKKRYGSRTVVKDVSLDVKSGEVVGLLGPNGAGKTTSFYMIVGLVPLDAGDISLNGSPISLMPIHKRASLGLSYLPQEASVFRKLTVEQNVRAVLELQHDENGKRLSKDAIGARTEALLEELQIAHLRENPALSLSGGERRRVEIARALASNPSFILLDEPFAGVDPIAVLEIQKIVKFLKQRNIGVLITDHNVRETLGICDHAYIISDGSVLASGAPKEIIENESVRRVYLGEHFRM

SEQ ID NO: 50681 - protein, 244 aa, Burkholderia mallei
MPLMETKNPSKILVVDDDPRLRDLLRRYLGEQGFNVYVAENATAMNKLWVRERFDLLVLDLMLPGEDGLSICRRLRGSNDRTPIIMLTAKGEDVDRIVGLEMGADDYLPKPFNPRELVARIHAVLRRQAPAELPGAPSETTEVFEFGEFSLNLATRTLTKSGQEIPLTTGEFSVLKVFARHPRQPLSREKLMELARGREYEVFDRSLDVQISRLRKLIEPDPGSPRFIQTVWGLGYVFIPDGAA

SEQ ID NO: 50682 - protein, 138 aa, Burkholderia mallei
MLQPKRRKYRKEQKGRNTGIATRGNAVSFGEFGLKAVGRGRLTARQIEAARRAMTRHIKRGGRIWIRIFPDKPISQKPAEVRMGNGKGNPEYYVAEIQPGKMLYEMDGVSEELAREAFRLAAAKLPLKTTFIVRQLGA

SEQ ID NO: 50683 - protein, 327 aa, Burkholderia mallei
MIRPARWFARTVTAALASLCVASAFAQDAAGDKVLRVGYQKAGLLAVVKAQGTLETRVKPLGYTVKWFEFPAGPQLLEALNADSVDIGYTGAPPAVFAQASGVRFVYVGAEPPSPHNEAIVVKADSPLRRVADLRGRKVALQKGSSANYLLLEALRQAGVRYDEIRPIYLPPADARAAFESGTVDAWVVWDPYYAAAQHALKARTLADYTGLSATYNFYEATRDFATRHPDVVGAVLQQLRETGLWVNAHSAETAALIAPKIGLDRALVETWVKRVPYGTTPLDDKIVASQQRVADAFLAAKLIPRKLTVADNVWTERRAADALAAK

SEQ ID NO: 50684 - protein, 354 aa, Burkholderia mallei
MSDLVHTALAALANTRTLTGIDLSDADLSGRDLSGCTFERVSLRGANLSAAQLDATRWLHCDLTGARLDGATLGESSWHAVALRAASLRATTGDAFAMTETDLAGATLTDALWARATFERGDFSAAQCGRAKLLRCEAADCRFERTDFANAELERFVAMRAELSSARFDATRLTHAFFAEANLRGQRFERCDLTMTHFSRAALAGCDFSGASLMQTMFFDADLERATLAGARGRHVRFAGATLDGANLAHAAFDESDFARARLRAANARGLRARMSLFAHADCAEATLAGGHFVYCDFSHATLSHADCTGADFSHANLHGLADHAARWDGARKTGARATDPALAHAERWTAPQR

SEQ ID NO: 50685 - protein, 474 aa, Burkholderia mallei
  MISC_FEATURE (287)..(287): X=any amino acid
LREIFEANRAGRASGIYSVCSAHRLVLEAAFEAARADESPLLVEATCNQVNHHGGYTGMTPADFRRDVDALARAAGFPARALILGGDHLGPNPWRHLAARDAMREARAMVAAYVAAGFTKIHLDASMACADDAAPLSDATIAERAAQLCAAAEEAAEAAGASPVYVIGTEVPTPGGEVSAQASGSAADTASGAAQAAARKAAVGAANGMAHEHGGAANPPADDARGAAAGHRGAFPQIEVTRADSVSATLAAHRDAFARHGLQHAWSRVIALVAQPGVDFDDRRVLXYDPARAAALGASILRVPSLVFEAHSTDYQTESALAALVRDHFAILKVGPALTFALREALFALTYIEDALFDDASERSQLRDVIDAAMRERPEYWAPYYRGDALAQRIARQFSYSDRIRYYWLQPAVAAALERLFVNLAAPPETLVAQWLPDVYAACRRGELAREPLAWVRHRIREVISRYARACAMQ

SEQ ID NO: 50686 - protein, 102 aa, Burkholderia mallei
MNKIRKGDEVIVITGKDKGKRGVVLAVGAEHVTVEGINLVKKHVKPNPMKGTTGGVEAKTMPLHISNVALVDANGKASRVGIKVEDGKKVRFLKTTGAVLSA

SEQ ID NO: 50687 - protein, 476 aa, Burkholderia mallei
MSKEFDVVVIGAGPGGYIAAIRAAQLGKTVACIEKWKNPAGALKLGGTCLNVGCIPSKALLASSEEFENAQHHLADHGISVDGVKMDVAKMLARKDGIVEKMTGGIEFLFKKNKITWLKGHGKFTGKSDAGVQIEVSGEGETQVVTAKNVIIATGSKARHLSNVPVDNKIVADNEGALAFDSVPKKLAVIGAGVIGLELGSVWRRLGAEVTVLEALPAFLGAADEALAKEAAKLFKKQGLDIHLGVKIDGVKTGANGVSIAYTDKDGNAKTLDADRLIVSVGRVPNTDNLGLEAIGLKANERGFIDVDDHCRTAVPNVYAIGDVVRGPMLAHKAEDEGVLVAEVIDGQKPHIDYNCIPWVIYTYPEIAWVGKTEQQLKAEGREIKSGKFPFSINGRALGMNAPDGFVKMIADAKTDELLGVHVIGANASDLIAEAVVAMEFKAASEDIARICHPHPSMSEVMREAALAVDKRSLNS

SEQ ID NO: 50688 - protein, 549 aa, Burkholderia mallei
RQILVTSALPYANGQIHIGHLVEYIQTDIWVRTMRMHGHEIYYIGADDTHGTPVMLRAEQEGVSPKQLIERVWREHKRDFDSFGVSFDNFYTTDSDENRVLSETIYLALKEAGFIAEREIEQAYDPVRQMFLPDRFIKGECPKCHAKDQYGDSCEVCGTTYQPTDLIHPYSVVSGAAPVRKTSTHYFFRLSDPRCEAFLREWVSGLAQPEATNKMREWLGEAGEAKLADWDISRDAPYFGFEIPGAPGKYFYVWLDAPVGYYASFKNLCQRRGLDFDAWIRKDSTTEQYHFIGKDILYFHTLFWPAMLEFSGHRTPTNVFAHGFLTVDGAKMSKSRGTFITAQSYIDTGLNPEWLRYYFAAKLNATMEDIDLNLEDFQARVNSDLVGKYVNIASRAAGFLLKRFDGRVQASAMNHPLLATLRGAIPQIAAHYEAREYGRALRQTMELADAVNGYVDSAKPWELAKDPANAVALHETCSVSLEAFRLLSLALKPVLPRVAQGVEAFLGIAPLTWADAGTPLSPEQPVRAYQHLMTRVDPKQIDALLAANR

SEQ ID NO: 50689 - protein, 241 aa, Burkholderia mallei
MTVYFIGAGPGDPELITVKGQRLVRRCPVILYAGSLVPAAVLDGHRAELVVNTAELDLDEIVALLARAHGKGQDVARVHSGDPPLYGAIGEQIRRLAALGIPYEIVPGVTATAACAAALGVELTLPGVAQTVILTHYAGKTTMPAGESLASLAAHRATLAIHLGVRHLARIVADVLPHYGADCPIAVIYRASWPDEARVTGTLADIVDKVSGRSIERTALILIGRVLSAEGFDESTLYAKA

SEQ ID NO: 50690 - protein, 561 aa, Burkholderia mallei
STISTNEAEAGGAAAPCMGSEAAAPIDRRLKQMSQAIEVKVPDIGDYKDVPVIEVLVKPGDAVEPEQSLVTLESDKATMDVPSPSAGTVKEVKVKVGDAVSQGSLIVLLDGAQAAAQPAQANGAATSAAQPAAAPAAAPAPAAAAGGGTVDVKVPDIGDYKDVPVIEIAVKIGDTVEKEQSLVTLESDKATMDVPSPAAGVVKDIKVKVGDAVSEGSLIVVLEASGGAAASAPQAAPAAAPAPAQAPAPAASGEYRASHASPSVRKFARELGVDVSRVTGTGPKSRITKDDVTAFVKGVMTGQRAAPGAAAAPAGGGELNLLPWPKVDFSKFGPFEAKPLSRIKKISGANLHRNWVMIPHVTNNDEADITELEALRVQLNKEHEKAGVKFTMLAFVIKAVVAALKKFPTFNASLDGDNLVFKQYYHIGFAADTPNGLVVPVIRDADKKGLVDIAKEMAELSKAAREGKLKPDQMQGGCFSISSLGGIGGTHFTPIINAPEVAILGLSRGQMKPVWDGKQFVPRLTLPLSLSYDHRVIDGAEAARFNAYLGALLADFRRIIL

SEQ ID NO: 50691 - protein, 90 aa, Burkholderia mallei
MSESSHQSDPHRRARLRWRARRGLLENDLIFERFFARHEHDLSDADVSALSRLLDLSDNDLMDLLLACKEPEGDLAGPDMSRLLEMLRSV

SEQ ID NO: 50692 - protein, 660 aa, Burkholderia mallei
MGASDFFSAVFPMSLYSITGAQLAFGHVALLDHADFSLEAGERVGLIGRNGAGKSSLLKIVADLAKPDDGLVTRQQHLVTVYVPQEPEFAAGQTVFDAVASGLTDTRALLAEYDEIAHRLADTPEGAEHDALLARMNALQSSLDATDAWNWRTRVATTLAQIGLDGDTKIDALSGGMQKRAALARALVVQPDVLLLDEPTNHLDFDGIRWLEELLVAQRAGLFFITHDRAFLDRVATRIVELDRGRLLSYPGNFSAYQTRKAQQLEVERVENEKFDKLLAQEEVWIRKGVEARRTRSVGRVARLEQMRRERAERRNAQGNVRLDVAQGEKSGKIVAELTDVTKRYGERTVVERFSATVMRGDKIGFVGPNGAGKTTLLKLILGELKPDAGTVRTGTNLQVAYFDQMRAQLDQEKSLADTISPGSEWVEIGGVRKHVMSYLGDFLFAPERARSPVKSLSGGERNRLLLARLFARPANVLVLDEPTNDLDIPTLELLEELLTDYDGTVLLVSHDRAFLDNVVTSVIASEGNGLWREYVGGFTDWQIQRERAQRIAHEEAAKRAAKEPASAKDDAPKGAAGRNAQRTVKLSFNEQRELDALPARIAALEAEQKAIAAQLEDGSIFSKDPQEGTRLTERFAALDDELLAALERWEALEAKRKPS

SEQ ID NO: 50693 - protein, 358 aa, Burkholderia mallei
ERHRVAAALAASEERFQLAVSGASAGLWDWNPKTGAMYLSPHFKKIMGYEDHELPDEITGHRESIHPDDLKRVLDALKAHLEHRDTYDVEYRVRTRSGDYRWIQSRGQAAVEQRGRAVPDGRLDMDVTDRKRDEDALRVSREELRRLSAHIQSIREEEKTRIARELHDDLGQQLTALKMAVTLVDNELKDAGWASRTSRLPNVYALIGQLLDSVRRIAADLRPVMLDDLGLMAAIEWLTHEFVERYRIPVTSRIEADDIAFTRGSATEVFRIVQEALTNVARHSEATEVTLDIIRDEPNCIVRIADNGCGTARDTRPNRHSLGLLGMRERAARLGGEIRIDTAPGRGFALTATLPLAV

SEQ ID NO: 50694 - protein, 271 aa, Burkholderia mallei
MLPTVFIVSDGTGITAETFAHSILSQFDQKFRLVRVPFIDSIEKAYDTVRKINDAAQHDGRRPIVFTTLVDGESNEIVKRSNALVLDMFQRFVEPLEQELQLKSSHAMGRVHQNADTEEYKTRIEAINFSLAHDDGQSNRNLADADVILIGVSRSGKTPTSLYLAMQYGVKAANYPLIPEDFERGKLPTPLHPHRDKLFGLSIDPMRLSEIRNERRPGSKYAAPENCRYEINEAEAMMRREGVKWLSSTHKSIEEIATTILQEIKLERQSY

SEQ ID NO: 50695 - protein, 197 aa, Burkholderia mallei
MPFNFPIFLTWVRIVLIPLVVGVFYLPDTMLSADHRNLAAAVIFILAALTDWFDGYLARKWNQTSAFGAFLDPVADKLMVTAALLMLVQLARIDAAIALVIVGREIAISALREWMAQIGASKSVAVNSLGKFKTACQMVAIPMLLFYGRLPFGGGVAIDTRGWGEWLIYLAAVLTIWSMLYYMKLAWPQIRERGGAA

SEQ ID NO: 50696 - protein, 323 aa, Burkholderia mallei
MNYRRLGRSGLQVSELSIGSWVTYGNQVDRRAARESLAAARDAGVNFFDNAEVYAGGKSEEIMGHALKSLGWPRISYVVSTKFFWGLAEAPNQYHTLNRKYLLNAIDASLQRLQLDYVDLVFCHRPDPNTPIEETVWAMSDIIARGKALYWGTSEWSADEIRAAYEIADRHHLRKPTMEQPQYNLFHRKRVEQEYRRLYEDFGMGLTTWSPLASGLLTGKYRHGVPAGSRAEIHGYDWLRAQLTDPAKNRVVEALGEIANDLGCTVGQLALAWVLKNPRVSTVITGASRVEQIIENMRSLDVATQITPDMKQQIEQIVGDAYQ

SEQ ID NO: 50697 - protein, 787 aa, Burkholderia mallei
MNQQAEPFLSVAADAERDAFRQVHVSRPHESAHLHVSGRATYIDDIPLVAGTLHAALGLSAKPHARIASMRLDAVRAAAGVVAVLTAADIPGTNDCGPIVHDDPVLADGVVQYVGQPMFVVVATSHDAARRAARLAQIEYEERPAILTAQAARAADSYVLPPMRLARGDAAARIAHAAHRDAGELTLGGQEQFYLEGQIAYAVPKEDGAMHVYSSTQHPSEMQHLVAHALGLASHDVLVECRRMGGGFGGKESQSGLFACCAALAAWKLQRPVKLRPDRDDDMMITGKRHDFHYRYDVGYDDAGVIEGVSVDMTSRCGFSADLSGPVMTRAVCHFDNAYWLPDVSIVGRCGKTNTQSNTAFRGFGGPQGAFAIEYIVDSVARALGRDPLDVRRANLYGKTERNVTPYGQTIEDNVLPELIAELEATSAYRARRAATRAFNAASPVLKKGIALTPVKFGIAFNVTHFNQAGALVHIYTDGSILVNHGGTEMGQGLNTKVAQVVAHELGVDFARIRVTATDTSKVANTSATAASTGSDLNGKAAQDAARQLRERLAAFAAEHVGGGAARAADVRFAHDEVRVGEVAVPFEELVAHAYRARVQLWSDGFYATPKLHWDQAALRGRPFFYYAYGAAVSEVVVDTLAGEMRVLRADALHDVGASLNPALDIGQVEGAFIQGMGWLTTEELWWNDGGRLMTHAPSTYKIPTVNDCPPDFRVRLFDNRNAEDSIHRSKAVGEPPLLLPFSVFFAIRDAIAAVGDYAVNPPLAAPATGESILRAVRAVRAARAGA

SEQ ID NO: 50698 - protein, 356 aa, Burkholderia mallei
MSKIRSAVPPPPLPEVVEGQRYATPQRGVTLADTMFVDCHFERVEWTGCRLANLRFVNCTFDANRFDRCELEKLSYDSSRIRAGAWTQSALQRVSFNECELDGGTWTGSLVKDVVCTQSKGGAWTFDAVRGAHVSLVAGDYAGVTLRGGRWSDTSWIGSRLADLRLESVELENLIAGQSGFERVVLVECRGVNVRWIDSRIERMTVHGCELKQAAWSHSTWATGEIHASRLPIASFDHASVNGLTVTNSELPQAIFDSASVADSALQGVRAPRIALRDAWLTRVNLSGAQMQQLDARGVHLERVDLRGADCRGGNLIGQLSHTWAAADTRDAIFEEATSADDRLWWQRVQPGARGV

SEQ ID NO: 50699 - protein, 173 aa, Burkholderia mallei
MRPWLASLVVETYDSLSAGLQTEYGTEAQLQNVFLRKKGGKVVGLETLAEQMRAFTGLTLAQQREMLAQDMVQTPAQNAADVRALHRLWRIGDADAIAAWANAKTERLARARSIADSIDNKIVHERNRRFVARMTAIAAPNRPLFVAIGSLHLGGPKGVLELLRQQGYRVDAG

SEQ ID NO: 50700 - protein, 465 aa, Burkholderia mallei
MDNKRNSSFSIDSMLEDSARLTALVCGSEPLNRIWSPHATLQRMLDVEAALARALAANGVIPANAVRPIEAACAASELDAQALMRDAALGGNLAIPLVRQLTARVKVRDAEAAKYVHWGATSQDIIDTAAVLQLRDTLDWLDPLLRDTCTALATLAAAHRTTPMIGRTWLQQALPITLGLKFAQWLDALLRHRERIVALRERALALQFGGAAGTLASLRDAAPAVARSLADDLRLALPAVPWHTQRDRIAETAACFGMLIGTLGKIARDISLSMQTEIGELAEPAAAGKGGSSTMPHKRNPVGCAAVLTAAVRAPGLVSTVLAGMVQEHERALGGWQAEWDALPELARLAGGALAQVAQIVEGLNVDVARLADNLDATRGLVLGEAVMLALGDRIGRLDAHHLVERASKQAVRSGRPLYDVLAADPDVAAHLTPQALRQLLDPAHYVGEAHAYVDAVLALHASRH

SEQ ID NO: 50701 - protein, 452 aa, Burkholderia mallei
MGRRYFGTDGIRGKVGDAPITPDFVLRLGYAAGKVLASAPGRAASGARPTVLIGKDTRVSGYMLEAALEAGFSAAGVDVMLAGPMPTPGVAYLTRALRLSAGVVISASHNPYHDNGIKFFSADGNKLPDEIEAEIEAWLDKPLDCAASDGLGKARRLDDAAGRYIEFCKSTFPAAFDLRGMKLVVDCAHGAAYQVAPHVFHELGADVIPIGVAPNGFNINDGVGATAPDALMRAVRANHADLGIALDGDADRLLVVDHTGRLYNGDELLYVLVKDRIATNGQVEGAVGTLMTNFAVEVALKEAGVQFVRAAVGDRYVLEQLRERGWQLGAEGSGHILSLDRHSTGDGIVSALLVLAALKRSGKTLAQMLEGVTLFPQKLINVRMKPGADWKGSEAIRRAIDSAEQALSGSGRVLIRASGTEPVLRVMVEARQATDANRHAEAIADAVKQATA

SEQ ID NO: 50702 - protein, 44 aa, Burkholderia mallei; identical to SEQ ID NO: 47623

SEQ ID NO: 50703 - protein, 357 aa, Burkholderia mallei
MCIDACAWADRRVSAPPPFDALYFGQVGLTTLAKIVRCRPAVNVATIRENADRPPADHAETRAGIGPEGRPRRAGYNCARPRHAPARPGARRRASAEARTSRPREPAPAPPNRPEGPCMTFQPVESYTRVRLSDVVSDQIKSLISAGKLLPGQKLPTERELAAQLNVSRPSLREALVRLEADGFIGSVGRGGFVVSDITAPVVSSPLADLLLQNPEASHDVLELRHGLETISTAYAAERATPGDLAKIKEAFDTLAGHSLKHEPGRLAEVDANFHLAIADATHNVALIHVMHGIHGLLQESMHKSHRLVNHADAMERALLEQHTEIYEAIAAKDPERARAAAERHLRYVRALYEQAA

SEQ ID NO: 50704 - protein, 913 aa, Burkholderia mallei
MAGRRGRYNRRFPRAAPGRRGSATFDPLERACARHLASRAAQKPSPNHTMHERYVPADVEAAAQSDWRAADAYRSKEDANRKKFYCVSMLPYPSGKLHMGHVRNYTINDVMYRYLRMNGYNTLMPMGWDAFGMPAENAAMANGVPPAQWTYENIAYMKKQMQAMGLAIDWSREVTTCKPDYYKWNQWLFLKMLEKGVAYKKTGTVNWDPVDQTVLANEQVIDGRGWRSGAFVEKREIPMYYMRITQYADELLNDLDGLGWPERVKVMQHNWIGKSFGVNFGFPYELDGEKKLLRVFTTRADTIMGVTFCAIAAEHPLAARLARDKPALQAFIDECKRGGVAEADIATMEKKGVATGFSVSHPLTGEPVEVWIGNYVLMSYGEGAVMGVPAHDERDFAFAKKYGLPIRQVIAVEGETYSTDAWQEWYGDKTRAVCVNSGKYDGLAYDAAVDAIAAELKAGGLGDKQITYRLRDWGISRQRYWGTPIPIIHCPSCGDVPVPEQDLPVVLPEDLVPDGTGNPLAKSDAFLNCTCPKCGAVAKRETDTMDTFVDSAWYFSRYAAPDAQTMVDARTDYWMPMDQYIGGIEHAILHLLYSRFWAKVMRDLGLVAFGEPAKNLLTQGMVLNETFYREDAAGKKTWYNPADVTVSFDDKGRPVGAVLKSDGQPVELGGIEKMSKSKNNGVDPQMLIDHYGADTARLFTMFAAPPEQQLEWSGAGVDGASRFLRRVWAFGFANREALAVRAPFDAAQLAEAGKTLRREIHGVLKQADFDYQRLQYNTVVSAAMKMLNAIEGAKGATPAVLRETYGVLLRVLYPVVPHVTFELWKVLGYADEFGPLLDAPWPKVDEAALEQAEIELVLQVNGKVRGALKVAKDASREAIEAAAVADGMFAKFAEGRPAKKIIVVPGRLVNVVV

SEQ ID NO: 50705 - protein, 407 aa, Burkholderia mallei
MEKFDIAVIGAGAAGMMTAAVAGQLGRRVVLLDHSPRLAEKIRISGGGRCNFTNLYAGPDNYLSANPHFCRSALARYTPRDFLGLLKNHRVTWHEKHKGQLFCDHSSDAIIDVLKSECDAGGVAWRRPVTVDAVRHAQADGFALDTSAGAIGAQALVVATGGLSIPKIGATDFAYRIAKQFGHKLVDTRPALVPLTFSADAWAPFAALSGVSLEARVSTGAKRGGGEFVEDILLTHRGLSGPGILQISSYWRSGEPIHVDLAPQIDAANELIRAKAGSRRQIGTLLAEWVPARLAHAWLEAERVHADARLADLPDKTLRRIGETLSRWTLTPSGTEGYRKAEVTKGGVDTRELSSATMMSERVPGLFFVGEALDVTGWLGGYNFQWAWASGVAAGRAAADGTRRLTG

SEQ ID NO: 50706 - protein, 234 aa, Burkholderia mallei
MKLPQRLAAEVFGTFWLVLGGCGSAVLAAAFPGLGIGFAGVALAFGLTVLTMAFAIGHVSGCHLNPAVSVGLTVAGRFPARDLVPYVIAQVIGATLGAFVLYLIATGKPGFDVAGSGFATNGYDARSPGHYSLAAAFICEVVLTGFFLFVILGSTDKRAPAGFAPIAIGLCLTLIHLISIPVTNTSVNPARSTGPALFVGGEAIGQLWLFWVAPIIGAAIAGVVYPLVAGRDES

SEQ ID NO: 50707 - protein, 491 aa, Burkholderia mallei
MTETLLLAAIVALAVALVVALVMLLRGGPRGGGLERLAEQIDDANDAHAHAAERLERELRAEIVDGARHSRTELAGNFAQLQQTLAAQLTSVATVQNNQIDGFAQQLAKLVAGNTQQFDAMRDTLQRQAQLAREEQGTALRHFGDTLNQQLTQLTQANDRRIGEVRATLETRLKEIEANNAAKLEEMRRTVDEKLHATLEQRLGESFKLVSDRLEQVHRGLGEMQTLAAGVGDLKKVLTNVKTRGTWGEVQLEALLEQMLTPDQYAKNVATVPKSGERVEFAIRLPGRHDEGAAGGGEPVWLPIDAKFPREDYERLIDAQERADAAAVEEAARALEARIRAEARTIAEKYVAPPHTTDFALLFLPTEGLYAEILRRPGLTDLLQRDYRVTVAGPTTLTALLNSLQMGFRTLAIEKRSSEVWQVLGAVKTEFGKFGDVLARTKSQLETVTRSIEAAEQRTRVMNRKLKQVEALPGEAANGLLGVDGAEADES

SEQ ID NO: 50708 - protein, 297 aa, Burkholderia mallei
MTRYRGRFAPSPTGPLHFGSLVGALASWLDARAWGGAWLVRIEDIDGPRTVPGAAEDMLATLRGFGFIADEPPVWQSARVAHYEAALARLTAAGLVYPCGCSRKEIADSLRAAHERHTTLAYPGTCRTGLHGKPARAWRLRVPDGAAAVVAFDDRWQRAQTQNLATEVGDFVLKRADGQWAYQLAVVVDDGDANITHVVRGADLLDSTARQIYLQRCLGLPTPRYLHVPVVLDANGEKLSKQTGAAALDPAAPLPALAAAARHLGLALDGAACASLDAFQAAAIAAWDARFGPNARG

SEQ ID NO: 50709 - protein, 736 aa, Burkholderia mallei
MEWATSTRVRAIAAGVAFYAAAAGHAQAQAAQPGADARQPGGEAKADTAAGGTLPAISVSGAAERDASVGLVARRSMTGTKTDTPIIEIPQTINVVTAQQIEATGATDINQAFRYIPGFSSYGSDNRSDWYAALRGFTPTVFVDGLQVPNTINLSSWRVDPYMIDSIAVLRGPTSVLYGQGDPGAIVDVQSKLANGERIRELGVQVGNYARKQLMFDIGDTIGKDGTLSYRIVGVGRDGNAQTGPLADQRVSFAPSLKWQPNADTSLTLAATYLQDWGDTSSNFLPSRGTVLPNPNGTISDDLYTADANFDHYRKKQWSLGYQFEHKLNPVWTLRQNVRWMHLSLDDASVYGGGLDDADPTMATMTRYAGLFQFNYSRFDVDNQAQAKFTTGPLSHTLLFGFDYNRQTTTDSEWLAKGPSLNLYRPVYTPIPSDIFSGPNASRTDTKTTLNAFGLYVQDQIKWRRWVLTLGGRQDWTRTSQDDIANAASFRQNDHAFSGRVGLTYLGDYGLAPYLSYSTSFNPQIGLKLAGGGLATPTKGRQIEAGLRWQPPGKNLMLNAAVYQINQTNVAMSNPNDPTSSTFVQVGEVRSRGVELSAVGNLSRELSVIAAYVYQDVKNVRANDNTLNKWPVDVPRPRQIASLWADWTWRTGPLTGFGVGAGVRYMSAAAGAVDNSLTVPSYTLFDAALHYELRNWRFALNATNLFNRRYVAGCQSDAVCMYGNQRTVIATAKYNW

SEQ ID NO: 50710 - protein, 945 aa, Burkholderia mallei
MSNKKADSKPQAKYPVNLLDTPFPMRGDLPKREPQWVEDWEARGVYEKIRAASQGRPKFILHDGPPYANGDIHLGHAVNKILKDMVVKSRNMAGFDAPYVPGWDCHGMPIEIQIEKRFGKSLPAAEVMAKARAYATEQIEKQKVGFKRLGVLGEWGNPYKTMNFQNEAEEIRALGKIIEKGYVYRGLKPVNWCFDCGSALAEAEVEYKDRTDPTIDVLFAFAEPEKTAHAFGLAELPRAEGGIVIWTTTPWTIPANQALNLHPEIVYALVDTERGLLVMAEERVEACMKDFGLTGRVIARTPGEKLANLRFHHPLAAAHPGYKRTSPVYLGDYVTTDTGTGVVHSSPAYGVEDFTSCKAHGMTDSDIINPVMGDGRYIESLPLFGGLTIWDANPKIVDALKAAGSLLRNERYAHSYMHCWRHKTPIIYRATSQWFAGMDTQPAGGGKTLRETALDAVDATAFYPSWGKQRLHAMIANRPDWTLSRQRQWGVPMAFFVHKETGELHPRTLELLEEVAKRVERQGIEAWQTLDARELIGDDANLYEKNRDTLDVWFDSGTTHWHVLRGSHKDQLQFPADLYLEGSDQHRGWFHSSLLTASMLDGRAPYKGLLTHGFTVDGEGRKMSKSLGNGIDPHEVANRLGAEIIRLWIASTDYSGELAISEEILKRVTEGYRRIRNTLRFLLANLSDFDYAKDALPAGQWLEIDRYAVAFAAQLQAELLAHYEKYEFHPVVAKLQTFCSEDLGGFYLDVLKDRLYTSAPASPARRSAQTALYHVTQGLLRVLAPFLSFTAEEAWRVFQPQSDTIFTETYYAYPEIAGAEALIAKWTLLRDVRGDVTKALEEARTANRIGSSLQAQVEVRASGARYDALASLGDDLKFVLITSAATVVKVDAQGDESVDVAASTYPKCERCWHYREDVGAHADHPTLCGRCFSNLFENGETRSAA

SEQ ID NO: 50711 - protein, 428 aa, Burkholderia mallei
MKKPFYKVLYVQVIFAIVVGVILGHYYPSLAVDMKPLGDGFIKLIKMVIGPIIFCTVVTGIAGMQDMKKVGRVGGKALLYFEIVSTCALVLGLAATHILRPGVGFNIDPATLNGKEVASYAAKAHGQSSVDFLMHIIPNTMIDAFAQGEILQILLIALLFGSVLAHLGERGRVVTDFIDGITRVLFGIVHIVTKLAPIGAFGAMAFTIGKYGVGSLVPLLKLIGTFYLTSVVFVLVVLGAIARFTGFSIIRFVGYIKEELLIVLGTSSSEAALPQLMEKLEKAGCSRSVVGLVVPTGYLFNLDGTNIYMTMAVLFIAQATNIELTWMQQLTLLAVAMLTSKGASGVTGAGFITLAATLAVVPTIPLSGMVLILGIDRFMSECRALTNIVGNGVATVVVSAWEKELDRAKLRAALSGNGEAAAGEAARV

SEQ ID NO: 50712 - protein, 2600 aa, Burkholderia mallei
  MISC_FEATURE (100)..(100): X=any amino acid
PASPAQEDLWLAAQVQEEGAAYHLSIALRLDAPVDDASMRRALVEVIARHPSLRTTFRRDAQGLRQCVRAAAQARSTGPRRCCRRRTRPASANPACATHXRDSRSRASDLHAGPLLRARLHRGAPDCDVVQIVVHHIVFDAWSRMVVSREIVDAYHALRAGRAIAWSAAAASPGAFARGQRDALTPQRVARLREYWRAQLAGVPPVLDLPTDFARPAVRDGIGATALRMLPAALAERLAAVGARHGASLFMTLMAAWQILLWRCSRQHEFAIGTPMAARDAGAFESTVGYLVNTVVLRASVRADEPFGGLLARVAQTVLDAHEHKALSLREVIELAGADRNPSHTPLFQAMFEFHNERPGVEAAQAAPVRAVPHDVGAAKYDLSLEIAYRHDGLACTIEYATALFARSSIDGLLAQYEALLEQIAAMPDAPVGSLSCLPDGERERVTRTWNATAFERTGSPLIHARFDARVRACPAAIALRTDAATMTFAALGERVDALAGRLLERTGGEPERIAICLERSFDMVSAILATLKAGCAYVPIDPQLPADRVAFMLSDSAAALLLTIEPIRRERLASFDIDTLCLDAPAPPRAAPPRAAPAVDPHAAAYVLYTSGSTGKPKGVAVTHANVTNLLDVMEASYPVGAHDRYLLKTNYAFDVSVPELFGWFVGDGSLAILAPQAEGSPDLIVEALLRHGVTHLNFTPSLLRQFVTEAAADARFARGHRLRHVFVVGEELTSALANDAWHALRPATIYNMYGPTETTVFATGYAHTAPIPNGRVPIGRALGNMRVYVLDERMRPMPIGMPGDLYIAGDGVARGYLNRDELTAERFLPDPFTPGGRIYMTGDLARWTRDGMLEFLGRTDQQIKIRGYRVELDEIASALNAHPLVGEAAVILKREPDGDARLVAYVVPAESAAAAPSRDERARLRDALVGALEQRLPDYMVPADYAFAHALPKGITGKLDRKALEALPVERPARDAALGAVAPRNDTQRALCAIWQAVLRVPALGVTDNFFAVGGDSILSIQAAARARRAIVFSARDIFRHQTVELLAAHVRWQQAPDEARRASAGDMPLLPIHHWFFEVDSTHVDHYHQSRLLDVPAGVDAAFVRAWLAALVARHDALRLRLRDTPAGWRAHFAEAPHADASARLMVCDVAWAGAPDAALDAFFADARRGVRLADGPLFVAALVAAGATGRGRLLLIGHHAVVDGVSWRVIVADLRRTFAQWPALRPDAPGPASDAYQAWARALVAAADSPALHAERAHWLRVLRAPAPALRLDRAAGGDATRRATRIGAVSLNAADTRALLADTHRAYRTQTIELLLAGLLLAFRRWQGHDALRIALEGHGREADALAHYGAERGLPDVGETVGWFTSYYPQWLTLAGAASAPAPAADSVAAAIMAVKTQYRATPHHGIGYGILRYVAGDPELAAEAAAHAPEIVFNYLGQFDVANDEAAGIAVLDLSSRDDIAAARPREHALGIDGGVKDGCLAFEIDYSGAAFDDESIAAFGAHFMHALREIAAHCKACAAWRPTPEDFPLAAVTQAELDAWHARHPSLETLYPATAIQRGMVFHSLLPKQASAYTNQVHARVGGGTFDAARLRHAWQTVLERHAALRTAFVGFEREQPLQIVLAHAACPWRDIDHRHLAPEARDAAFAALLAADKAAPFDFGRAPLMRFHLVRDDDAHYRFIWTYHHAVLDGWSVQLVWSDLLRVYEALAAGRPAALPAAVQFDAVLAWRQRHASDADKRYWREQIGARTQRTVLDIEQAGLAAASPAAPAVVERSLDEAASERLATAARACRVTLASVLQAAWALLLARHSGETAPVFGVTSSGRAIDVPGVETIVGPLIATVPARVDVDAALPLGDWLRAVHERHVEREAHAQLELVDILRESGVRGGQPLFDSLLVVENYPLAEPSAARILGLRDYGYAEDTHYGLTVSATPGPRLRVEINFDRSRYHIEDIEAMADNLKAVLTRVPDDLARPAGDVLGGADAARAQAGAEGEPRLSRVSRQGELRLGRHLVPHLVEDHAAATPERRALVYNERAYSYGELNRAANRIANRLMQAFPDLGTDALVGVRVSRSDRLVLTVLAIWKIGAAYIPIDPVLPGQRMREMLELAGAKALVVDAAVAAAEPAVAGVPRIAFDDLVQDDPRLEDNPDVHLSGNDLSYVLFTSGSTGKPKGAMIEHIGMLNNIANKALDLEMDEDSRVAQNASMSFDVSVWQMFIALTKGGTTFVYDERAVNDIAGLIRRMAADGVTILEVVPTYLIAVVEYLEEHPECVRPASLRFLIVNGETVDATLIRRWFALFPATKLINAYGPTEASDDITHHIMSPGDEIVNPVPVGRALANFDLYVVDDELRPVPIGTRGEIVATGVGIGRGYIGMAGATAQAFVKSPFPDRYKGRLYRTGDLGEMREDGVLMFHGRKDRQVKIRGMRIELDEVEASLRAIAAVRQAVVLAIRPENREAFLCACVVPLDGAREEIVDALKAKLPPYMVPSVFRFERELPQLPSGKVDRNRLREQCLNETPRASEHALAPRSPLERRLAEVFGEVLGHDAFGVLDDFFALGGDSFKAIRIAAKYGPPLEVTDIYDHPTIEALA

SEQ ID NO: 50713 - protein, 505 aa, Burkholderia mallei
MRWLSRALVAVSASGALAAHASTLTRDNGAPVGDNQNSQTAGANGPVLLQDGHLIQKLQRFDRERIPERVVHARGTGAHGVFVATRDISDLTRAKVFEPGTQTPVFVRFSSVIHGGTSPETLRDPRGFATKFYTAEGNWDLVGNNLPVFFIRDAMKFPDMVHSLKPAPDTNIQDPDRFFDFFSHQPEATHMITRVYSDAGTPASYREMDGNSVHAYKFVNAHGGVTYVKFHWKSLQGQKNLTAAQAEAIQGKDFNHMTRDLIAAIDAGRYPKWDLYVQTLKPDQLDQFAFDPLDATKVWPGVPEVKIGTMTLNRNPGNVFQETEQAAFAPSNLVPGIEPSEDRLLQGRLFAYADTQLHRVGVNGAQLPVNRPRAPVANYNRDGAMNGGAARGTVNYEPGAQAALAADPAFAASRAPLAGSTQQARIAKTRNFDQAGAFYRSLSASERANLVANLAGDLKQVRNDGVKYTMLSYFQKADAEYGRKVTAALGADQGRVDALTAKLAD

SEQ ID NO: 50714 - protein, 907 aa, Burkholderia mallei
NRPDPDQLLDKIQREEEKQQRGRLKIFFGASAGVGKTYAMLLAARRKQEGVDVVVGIVETHGRSETAALLDGLDVLPLMQIEYRGRTIGEFDLDAALARRPRLVLVDELAHSNVPGARHLKRWQDVYELLDAGIDVYTSVNVQHLESLNDVVGAITGIRVWETVPDRVFDAADEVTLVDLPAEELLSRLREGKVYMAQQAERAVRNFFRKGNLIALRELALRRTADRVDAQMREYRADRSIQRIWQARERLLVCVGPGAEAPTLVRAAARLAASLKADWLAVYVETPRLARLPDALRQRTLNALKLAAELGAETATLTGADAVAALIGYAQVRNASKIVAGGSSKTGFLRRFSRPFGEQLAERAGDLDLMLIRASASEDARAPLDARARAWRDAFSSVVDGRSPPRHYGYAAAICALITGAANLLQGHLDLTNLVMLYLLGVVFSAVRLGRGPGVVQSFLSVAAFDYFFVPPRMSFSVTDTQYLLTFFGMLLTSLVISHLTSSLTRGAAIAQRRERRTSAMYAMARELAAALTAEQIVEIGSRHVSEVFRARVAMLLPDSGDKVRQKIENPDEAVTITGAALDIDVGQWVYDQQKPAGHGTDTLPAAAALYLPLKAPMRTRGVLAVVTKDPGELEVPEQRRMLDAFAAQIALAVERVHYVEIARDALVNMESERLRNSLLSAISHDLRTPLTAIVGLSSMLANARGATREGSPAREDELVDAIHDEALRMTGIVTNLLDMARLQAGSLQLKRQWSLLEETVGAALAACKRVLARHPARVRLPADLPLLQTDAVLMERLFANLFENAAKYTPLDTPIEIGAERIVDDGRPFVRVFVDDHGPGLPAGMEARIFEKFTRGEKESATPGIGLGLAICRAIVDAHGGKIGALNRLGPDGRVEGARFWFTLPV

SEQ ID NO: 50715 - protein, 278 aa, Burkholderia mallei
MQYEIVSAGEDVDDERARGRRAAAPAAPSSAVPSSAALSSAALSSAAQPTGAPPATAAARRGRDLPRERLLARGPAALSDAELVALLLGSGLPGHDVFALAHTLLARFGSLRALLDAAPDDFKGLRGIGPARTAILVAVVELARRALAEKARERPLVDSPGAVDDYLRLLIGTRPREVFVCLFLDARHRLVQTEETAHGSLTRMAVYPREIVRRALALNAAALIVAHNHPSGAVRPSAADRRLTRVLRDALALVDIKLIDHFVVGASDTFSFAQAGWI

SEQ ID NO: 50716 - protein, 329 aa, Burkholderia mallei
MNSETLPAELPATLTIASRESRLAMWQAEHVRDALRKLYPACDVKILGMTTRGDQILDRTLSKVGGKGLFVKELESALADGRADLAVHSLKDVPMALPEGFALAAVMSREDPRDAFVSNDYASLDALPAGAVVGTSSLRREAMLRARHPRLDVRPLRGNLDTRLAKLDRGDYAAIILAAAGLKRLGLAARIRALLDVDDSLPAAGQGALGIEIAARRADVAAWLAPLHDHASALAVEAERAVSRALGGSCEVPLAAHAVWRGGELHLTGSVSTTDGARVLAAHAHARAATAADALALGRRVSDALERQGARAIVDALVAASAQAQKGGA

SEQ ID NO: 50717 - protein, 812 aa, Burkholderia mallei
  MISC_FEATURE (258)..(258): X=any amino acid
AACRARVAERGAGATPGDYPLARAGGLTQAALDRLPFDARAIDDIYPLSPMQQGILFHSLFAPERATYVNQLVATLVDPDVERLRAAFDAAVPRHDILRTGFAAHEAAPMQIVHRHARMPVEIVDWRGAHASPAALDTALDAWLAADRARGFDLAAPPLMRVTLIRTDDADWRLVWTRHHLLLDGWSTARLFADVLSDYIEPPRANPFAAPARTRYRDFIAWLARRDAQADRAFWLGRLARLDEPTHVAERARGASAXAHEAAGRANWRATLPAADTARIGEAARRMKVTVNTIVQGAWALALQRITHRRAVAFGATVAGRPHALPDVDTVLGLFINTLPVITAPLPQLAARDWLASLQRDNAAALEHAHTPLYEIQQWAGLGGALFDTLVVFENYPVDEAWQGRDARALQKRDLRNIEATDFAVTLVIEAGDTLAIDYGYDPARIGPARVEALHRAFAACIAGLVDHPDAPLGTISCASADDLALIARANATELDWPAAQRAPLFAQFEAAARARPDAIALECLASSDGGDGARAQMRYGELDAKADRVAAALAASGVRPDSVVALCVERSFDMVVALVGTMKARAAYLPVDPDYPAERIAYLLGDAKPPVVITQAHLRARVDAALAGADAAVVTVDELLARAAGAEPEAERVAAAADVAPGQLAYLIYTSGSTGQPKGAGNTHGALANRIAWMQRAYRLAPDDVVLHKTPFGFDVSVWEFVWPLAVGAKLAIAAPGDHRDPARLVAAIDAHRVTTLHFVPSMLAAFVAYLDDFGAAARCASVRTIVASGEALAPELVARVAALLPHAQLH

SEQ ID NO: 50718 - protein, 271 aa, Burkholderia mallei
MTYLQESSRPAVTVPKLQAMREAGEKIAMLTSYDASFAALLDRANVDVQLIGDSLGNVLQGQATTLPVTLDDIAYHTACVARAQPRGLVVADLPFGTYGTPADAFASAVKLMRAGAQMVKLEGGEWLAETVRFLVERAVPVCAHVGLTPQSVHAFGGFKVQGKTEAGAAQLLRDARAVEEAGAQLIVLEAVPTLVAAEVTRELSIPTIGIGAGAECSGQVLVLHDMLGVFPGKRPRFVKDFMQGQPSIFAAVEAYVRAVKDGSFPGPEHSF

SEQ ID NO: 50719 - protein, 562 aa, Burkholderia mallei
MNHPKHIDPRLDPTRVIRAPRGGEKTCKNWLAEAAYRMIQNNLDPEVAEHPHALVVYGGIGRAARNWDCFDQILASLKDLNDDETLLVQSGKPVGVFRTHENAPRVLIANSNLVPHWATWDHFNELDRKGLMMYGQMTAGSWIYIGSQGIVQGTYETFFAVANQHFNGDPSGRWILTGGLGGMGGAQPLAATMAGFSMIAVECDESRIDFRLKTRYVDRKATTLDEALGMIEEAKRTGKPVSVGLLGNAADVFTELVERGITPDCVTDQTSAHDPINGYLPQGWSVARWRDAQKVDPRSIVQVAKQSMAVQVRAMLTLQARGAATLDYGNNIRQMALEMGVENAFDFPGFVPAYIRPLFCEGKGPFRWVALSGDPEDIYKTDRKVKELIPDDAHLHNWLDMARERIAFQGLPARICWVGVNDRYRLGQAFNEMVKTGELKAPIVIGRDHLDTGSVASPNRETEAMKDGSDAVSDWPLLNALLNTAGGASWVSLHHGGGVGMGFSQHAGVVIVADGTDAAHARLGRVLFNDPATGVMRHADAGYELAQRTANEAGLKLPMLGR

SEQ ID NO: 50720 - protein, 179 aa, Burkholderia mallei
MAELATIARPYAEALFRVAEGGDISAWSTLVQELAQVAQLPEVLSVASSPKVSRTQVAELLLAALKSPLASGAQAKNFVQMLVDNHRIALLPEIAVQFEALKNAREGAADVQIVSAFPLEGAQLAELVTSLERKFKRKLKPAVEVDSSLIGGVRVTVGDEVLDTSVRARLAGMQAALTA

SEQ ID NO: 50721 - protein, 121 aa, Burkholderia mallei
MDKTQSRLRRARQTRIKIAELQVARLAVHRTNTHIYAQVFSPCGTKVLASASTLEAEVRAQLADKSGKGGNVAAATLIGKRIAEKAKAAGIESVAFDRSGFRYHGRVKALAEAAREAGLKF

SEQ ID NO: 50722 - protein, 156 aa, Burkholderia mallei
MRLVGVDGEPIGIVKLAEAFRKSEELDVDLVEIAPQAAPPVCRLMDYGKFKYQEAKKQHEAKLKQKVIQVKEVKFRPGTDDGDYNVKLRNLVRFLEEGDKTKITLRFRGREMAHQEIGMRMLERLRGDLDEVGQVEQMPKMEGRQMIMVLSPKKKK

SEQ ID NO: 50723 - protein, 175 aa, Burkholderia mallei
MTVAYLGLGANLGDARQALKDAVVCLAQQHAITVLGKSSLYRTAPVDASGGDYYNCVVKIDTVLAARALLALCQKIEHHFGRERPYRNAPRTLDIDILLYGELTIDEPDLVVPHPRLTERAFALVPLVEIEPALAIPARGRADGFLADVAHQRIEKVQTCQCLAMRAAAEKNRCR

SEQ ID NO: 50724 - protein, 203 aa, Burkholderia mallei
MQILLATVAAYLIGSVSFAVVVSAAMGLADPRSYGSKNPGATNVLRSGNKKAAILTLVGDAFKGWLAVWLVKRFGIGGEIGVALAAIAVFLGHLHPVFFRFQGGKGVATAAGVLLAVHPVLGLATALTWLIVAFFFRYSSLAALVAAVFAPIFDVFLFGTHDNPVAWAVLAMSVLLIWRHRSNISKLLAGEESRIGQKKKTGV

SEQ ID NO: 50725 - protein, 237 aa, Burkholderia mallei
MPNAYKRVLLKLSGEALMGDDAFGINRATIERMVADIAEVVRLGTQLAVVIGGGNIFRGVAGGAAGMDRATADYMGMLATMMNALALQDAMRHAGIEARVQSALRMDQVVEPYIRPRAIRQLEEGKVVIFAAGTGNPFFTTDTAAALRGSEVGAEVVLKATKVDGVYSADPKKDPSATRYSSISFDEAIGRNLQVMDATAFALCRDQKLPIRVFSINKPGALKRIVQGEDEGTLVHV

SEQ ID NO: 50726 - protein, 535 aa, Burkholderia mallei
MPIIESKLNPRSDEFRANAAALEALVADLREKIDRLALGGGQAARDKHLSRGKLLPRDRIAQLLDPGTPFLELSQLAAYGMYNDDAPGAGLITGIGRIAGRECVIVCNDATVKGGTYYPVTVKKHVRAQEIAAENRLPCVYLVDSGGANLPNQDDVFPDRDHFGRIFFNQANLSAAGIAQIAVVMGSCTAGGAYVPAMSDESIIVRNQGTIFLGGPPLVKAATGEEVSAEDLGGGDVHTRLSGVADHLAQNDAHALALARAIVGNLGARGGAAPAMREPLPPRYDARSVYGVIPADTRKPFDVREVIARIVDDSAFDEFKARYGTTLVTGFAHIWGQPVGIVANNGILFSESATKGAHFIELCCQRKIALVFLQNITGFMVGRKYENEGIARHGAKMVTAVSTAKVPKFTVIIGGSFGAGNYGMCGRAFGPRFLWMWPNARISVMGGEQAASVLATVRRDEIEAKGGEWSAQDEEAFKQPIRDQYERQGHPYYASARLWDDGVIDPAQTRDVLGLALAAARNAPIEDTRFGVFRM

SEQ ID NO: 50727 - protein, 460 aa, Burkholderia mallei
MHRFIIVGGGAGGLELATRLGDRYGARGDRPARALVTLVDRYPTHIWKPLLHEVAAGSMDPFTQELEYAAQARWHGFEFHQGELIALDRASRRVTLAPVADNDGAELLPLRELEYDTLVIAIGSTTHYFGVQGAQQHSIALDTVAEAERFRKRLIAACMRAEHQPAEPAVRTAEGGPEQAVEPTDAAQVSASPRIQVAIVGGGATGVELSAELRNTAQVLSAYGLHKLDPRHDVGIVLIESGPRILPALQERVSTATAELLEKLGVRLLLGERVTEVAPGVVRTASGKSVRADLTVWAAGIKAPSVLAKLDGLEVNKLGQLAVRRTLQTETDPDVFAFGDCAGCEWPGHERNVPPRAQAAHQQASFMLRALANRLEGRPLPEFTYRDFGSLVSLGHFSAVGNLMGGLIGGNMLIEGLFARFMYMSLYRLHIAALHGYPRMVLDTVAHWLRRSTLPRVKLH

SEQ ID NO: 50728 - protein, 206 aa, Burkholderia mallei
MTTTKRNHPDELVIGLVSISDRASGGVYEDKGIPALAEWLAAALVSPWRAETRLVQDDAPTISATLVELVDTLGCDLVLTTGGTGPARRDVTPEATLAVATKEMPGFGEQMRQISLNFVPTAILSRQVAVIRETADHAALIVNLPGQPKSIKETLEGLRGADGKVEVPGIFAAVPYCIDLIGGPYAQTNPAVCAAFRPKSAVRAPK

SEQ ID NO: 50729 - protein, 327 aa, Burkholderia mallei
MTSRIAPTPFAARFDLRLPLVQAPMVGATTPALVAAASNAGALGSLGGASFAPEKLAAEIAAVRAATRRAFAVNLFVLPDAQPDDAAVRRALDAIDPLRARFGLPPGAPLPRYAPDFRAQLDALVDARVPVASFTFGVLDKKDVVRLQAAGTYVIGTATHVAEGLAWQAAGADAICAQGAEAGGHRGTFIGSAEDALVGTIALVPQLVDATNLPVLAAGGIMDGRGIAAALALGAQAAQLGTAFLTCAESAIPACWKARLLASDDTSTSVTRAITGRHARGIRNALMAQLAGRPDSVAPYPVQNALTQELRQTAARAGDAEYLSLWS

SEQ ID NO: 50730 - protein, 108 aa, Burkholderia mallei
MMKGQLAGLMKQAQQMQENMKKMQEQLALIEVEGQSGAGLVKVTMTCRNEVRRVAIDPSLLADDKDMLEDLVAAAFNDAVRKAEATSQEKMSGMTSGLPLPPGFKLPF

SEQ ID NO: 50731 - protein, 345 aa, Burkholderia mallei
MMENFSATGRRPRAPLARLAAPAPVLPAGRRRAVLFVIELWCNAGMKIGHQFHTVALVGRSNTPGIAEPLASLAACIAKRGFEVVFEADTAQAIGSAGYPALTPAEIGARAGVAVVLGGDGTMLGMGRQLAPYKTPLIGINHGRLGFITDIPASDMREVVPMMLAGSYEREERTLLEARIVRNGEPIYHALAFNDVVVNRSGFSGMAELRVSVDGRFMYNQRSDGLIVATPTGSTAYALSSQGPILHPQLQGIVLVPIAPHALSNRPIVLPDDSKIAIQIIGGRDVNVNFDMQSFTALELNDTIEVRRSKHTVPFLHPVGYSYYATLRKKLHWNEHPSSEEDDDA

SEQ ID NO: 50732 - protein, 1175 aa, Burkholderia mallei
MRRAELVRHPAFANQPLVMSDNASPSQSPVALVKAGQRFAFDGAHGSADALVIARYLAAHRAQVPLLAVICANAVDAQRLAQELAYFAPDARVRVLPDWETLPYDTFSPHQDLVSERLATLHDLGEGRCDILLVPATTALYRMPPASFLAAYTFSFTQGERLDEAKLKAQLTLAGYEHVSQVVRPGEYCVRGSLIDLFPMGSPLPYRIDLFDDQVDSIRAFDPDTQRSLYPVRDVRLLPGREFPFDEAARTAFRSRWRETFEGDPSRAPIYKDIGNGVPSAGIEYYLPLFFDETATLFHYLPERAQLVFTGDLDAAIKRFTADTKQRHAFLSHDRERPILEPQRLFLSDDDFYLLAKPFARIVLPAQPSGGWAAPLPNLALERHADAPLAAFAAYLETTKNRVLFTVESAGRRETIAQLFAEHHLRPAGSDSFAAWLASDERFALGVAPLANGFAVPGEGYAIVTETELYGALGRRAGRRRQEQASNVDAMVRDLSELKVGDPVVHAQHGIGRYMGLVSMDLGEGDTEFLHLEYAGDSKLYVPVAQLHVISRYSGADPDSAPLHALGSGQWERAKRRAAQQIRDTAAELLNLYARRAAREGHAFGLDPRDYVKFADSFGFEETPDQAAAIAAVIGDMTSGKPMDRLVCGDVGFGKTEVALRAAFIAVMGGKQVALLSPTTLLAEQHTQTFADRFADWPVRIAELSRFKTAKEVNAAIAQINEGSVDIVIGTHKLLSSDVQFKRLGLVIIDEEHRFGVRQKEALKALRAEVDVLTLTATPIPRTLGMALEGLRDFSVIATAPQKRLAIKTFVRREEESVIREAMLRELKRGGQVYFLHNEVETIENRKAMLEELVPEARIVIAHGQMHERELERVMRDFVAQRANVLLCTTIIETGIDVPSANTIIMHRADKFGLAQLHQLRGRVGRSHHQAYAYLLVHDPQALTKQAQRRLEAIQQMEELGSGFYLAMHDLEIRGTGEVLGDKQSGEIHEIGFQLYTEMLNDAVKALKNGKEPDLTAPLAATTEINLHAPAILPADYCGDVQERLSLYKRLANCEHGDAIDGIQEELIDRFGKLPPQAHALVETHRLRLAAKPLGIVKIDASEAAIGLQFVPNPPIDPMRIIDMVQKHRHIKLAGQDKLRIETRTPDLAVRVSTVKETLRALGQPQQPRAQAAAR

SEQ ID NO: 50733 - protein, 430 aa, Burkholderia mallei
MSWSDRLVSRFNGVRDAGGAAAPRTAARAASGARATAGGLASVVNGARPTRSRMLDFDYSLLWVSIALLGLGVVMVYSASIAMPDSPKYASYHDYAFLLRHCVSLVVAFVAAVIAFRVPVSTWDKYAPHLFLIALVGLVIVLIPHVGKGVNGARRWIPLGITNMQPSEIMKLAVTIYAANYTVRKQEYMQSFAKGFLPMACAVGLVGALLLLEPDMGAFMVIAAIAMGVLFLGGVNGKLFGGLVATAVGTFTMLVWLSPWRRERIFAYLDPWDERYAQGKAYQLTHSLIAFGRGEWFGVGLGGSVEKLNYLPEAHTDFILAVIGEELGFVGVLVVILLFYWIVRRAFEIGRQALALDRTFAGLMAKGVGIWFGAQAFINMGVNLGLLPTKGLTLPLVSYGGSGILLNCVALAVLLRVDYENRVLMRGGKV

SEQ ID NO: 50734 - protein, 491 aa, Burkholderia mallei
MKRYETLARAMADDIRSGNITTGTRMPSLRQMIAQHRVSQSTVFRAYYLLEQWGLIRARERSGYYVAHGAQASVRANGMNGMNGAHATQDGRLTRDAAPAESRKVDISDLVFSVLEAATHPRIVPLGSAFASPHLFPLPRLAKSLAQAARLVSPWSAVVDLPPGSEQLRRQIALRYLGIGVSQPIDEIVVTNGALEALNLCLTAVTRPGDVVAVEAPGFYAALQAIERLDLRAVEIPVDPRTGLDLDALAAALERHDVRACWFMTNFQNPTGVTLSADKKKALVDMLAAREVPLIEDDVYGELHHGPDYPLPARAFDKHGLVMHCSSFSKTLAPGYRIGWAAAGRFAEKVQRLKLMTTLSASIPAQVGIADYLEHGGYDRHLRKLRGALRGQMERMNDALMRHLPPDVHWTLPDGGYFVWLEFPDAIDAMGLHREAIRRGVSVAPGPLFSAAHAFERCVRINFGHPWSAAVDDAIRTVGELVAQPSVRKRR

SEQ ID NO: 50735 - protein, 299 aa, Burkholderia mallei
MPIEKQVVALPSGLKVHVERHVFDPAFETVILVNGALATTASFGQTIRYLGERVNAVCFDLPYAGQSRQHNPGEYILTKDDEVEILLHLAERFEPSLLLSVSWGGVASLFALARGCASVRRAVIASFSPFLNDAMTDYVTRARDHIAAGENLKAAQLLNDTVGRYLPRIMKLYNYRYLTKLPRNEQDQVAFHVDQILAMQPEQYLPEFRQIGCAVKFINGELDEYTAASDVRRLAAYVRRAEFATIRQAGHFLDLEGRQQQEQVRAAVLGFFADERASAARDAAQDETLAPLGQLPALS

SEQ ID NO: 50736 - protein, 263 aa, Burkholderia mallei
MSYQTIRIEIDQAAQIATITLDRPDKLNSFTRDMHRELQSALDDVQAANARALVLTGAGRGFCAGQDLADLDFTPGAMTDLGEVIEAHFNPLVRRLQALPLPVIAAVNGTAAGAGANLAFACDLVIAAKSSSFIQSFVKIGLVPDSGGTWFLPQRVGFARALGLALTGDKLSAEQAERWGLVWRVVDDAELAGAAAQLARELAQQPTRAIAAIKQAMRASLTHTLDQQLDLERDLQRELGQSYDYAEGVRAFIEKRAPRFEGR

SEQ ID NO: 50737 - protein, 293 aa, Burkholderia mallei
MPADHSFILKLSCPDRRGIVHAVSGFLLERGSNILDSAQFGDSRTGEFFMRVHFEQAGACGAAAALDALRAEFAPLAEAFAMRWELHDAAVKPRVVILVSKIGHCLNDLLFRYHTGQLPIEISAIVSNHKDFYQLAASYDIPFHHLPLAAGASADAKAAQEARVLEVIDGHAADLVVLARYMQILSPALCERLAGRAINIHHSFLPSFKGAKPYYQAFDRGVKLIGATAHYVTTDLDEGPIIEQEVERVDHSMTPDELTAVGRDVECVTLARAVKWHVEHRIVLNGTKTVVFR

SEQ ID NO: 50738 - protein, 299 aa, Burkholderia mallei; identical to SEQ ID NO: 50735

SEQ ID NO: 50739 - protein, 814 aa, Burkholderia mallei
MRKMKLVMVGNGMAGVRTLEELFKLAPDLYDVTVFGAEPHPNYNRILLSPVLAGEQTLEQIVLNDYAWYASHGVTLHVGKKIVKIDRVKRVVIADDGTEAAYDRLLLATGSNPFMLPVPGAQLDGVLGYRDIADTQAMIDAAARHTHAVVIGGGLLGLEAANGLKLRGMDVTVVHLAPTLLERQLDAKAGDLLRASLEARGLTFLMPKQTQALVGDEHGRVRAVHFKDGGECKADLVVMAVGIRPNTALAESAGLYCNRGLVVNDTMQTYDPRIYAVGECVSHRGIAYGLVAPLFEQAKVAANHLAQFGIGRYTGSVTSTKLKVTGIDLFSAGDFLGGDDTEDITLSDPIAGVYKKLVIKDDRIVGACLYGDTADGAWYFKLLREGRNIADIRETLMFGETSLGDTGHSGATRAMTMADDAEVCGCNGVCKGTIVSAIKEKGLFTLDDVRKHTKASASCGSCTGLVEQILMSTLGGDYSASPKAKPVCGCTDHTHAEVRAAIREHKLLSVPEAMRFLEWRTPNGCSSCRPALNYYCISTWPHDAKDDPQSRFINERAHANIQKDGTYSVVPRMWGGVTSADELRRIADVVDKYAIPTVKVTGGQRIDLLGVKKEDLPGVWRDLGMPSGHAYAKALRTVKTCVGSEWCRFGTQDSTLMGQQLERALWRMYAPHKVKLAVSGCPRNCAESGIKDVGVIGVDSGWEIYVGGNGGIKTEVAQFFCKVKTHEEVLEYAGAFLQLYREEGWYLERTVHYLERVGLDHVKARVLDDAENRRALWDRLQFALKDEPDPWHDTQDAKVDLRQFIPIAVAPADA

SEQ ID NO: 50740 - protein, 196 aa, Burkholderia mallei
MRIDGWIAARAVVNPEGRLTVNGRAANIAVNGGVVTIAGTSANLSIDRQGRAAVTGTTADVRVASGFASLGGTSGNVAVGALGVAAITGRTADVAVEDGRASLDGASGNVAVGNGGVVSGSGTVRTLTAAANGTVAPGHSVGTLTVSGDVRFAPGSIYAVEVRPGGAGDRYESGSRALTYGGPLALPPKKTPPDPR

SEQ ID NO: 50741 - protein, 287 aa, Burkholderia mallei
MSWFGAIGALASLSGCGLDVLDPKGAVGAAEKSLIATSTWAMLIVVVPVILLTLLFAWRYRASNRNATYAPKWAHSTAIEIVIWTVPSLIILFLGILTWKTTHALDPYRPLESAVKPIDVEVVALDWKWLFVYPDLGIASVNQLAVPVGTPINFRITSDSVMNSFFIPQLGTQVYAMAGMQTRLHLIADEPGDFAGISANYSGRGFSDMKFRTLATSRDAFDAWVAKVRASADRLDMTAYGQLAQPSEKQPVRYYSTVDPRLFNNIIAKYNDGRVLDLTDAACRTKR

SEQ ID NO: 50742 - protein, 392 aa, Burkholderia mallei
MRMEACPTPLRAHLPADPVKLRVSAQTQAARRASCRRAAHCPRRPPTAKRPAPRRPLMLTFQQIILTLQSYWDRQGCALLQPIDMEVGAGTSHVHTFLRAIGPEPWRAAYVQPSRRPKDGRYGENPNRLQHYYQYQVVLKPAPENILDLYLGSLEALGFDLKQNDVRFVEDDWENPTLGAWGLGWEVWLNGMEVTQFTYFQQVGGLDCKPVLGEITYGLERLAMYLQKVENVYDLVWTEWEEPGPNGPELRRLTYGDVYHQNEVEQSTYNFEQANVELLFTFFNSYEAEAKRMIEAQLALPAYELVLKAGHTFNLLDARGAISVTERAAYIGRIRALSRLVAQAYYDSREKLGFPMIGNPVPGVPGLTTDAQEAAQPAWAPPLKAERKIDQD

SEQ ID NO: 50743 - protein, 148 aa, Burkholderia mallei
MSIIDNRKAFFDYHIEERYEAGLVLEGWEVKALRAGRGQIKEGYVVVKHAEIFLIGTHISPLPEASTHIKPDPVRTRKLLLHRDEIKKLIGKVEQRGYTLVPLNFHYKGGRVKCEIGLAKGKKLHDKRETEKKRDWEREKARIMRSAT

SEQ ID NO: 50744 - protein, 358 aa, Burkholderia mallei
MSVRLDDARDVRDEDRLDAAKLDAYLKPRIAGLSGEPRIRQFHGGASNLTYLIGYGDRELVLRRPPAGAKAGAAHDMLREAAVMAALGPDYRYVPAILARCDDPAVLGSEFYVMERIAGVILRRELPAELKLDRADVRKLCERFVDRLIELHAIDASRPEIAALGKGEGYVARQLSGWAQRWRNALTDGTNPCDDVLAWLERHRPAGERRICVIHNDFRFDNVVLDPADPLSIVGVLDWEMATLGDPLMDLGGSLAYWAQADDDPAFVAMRRQLTHADGMMTRRELVEYYGARTGLDVGGFVFYEVFGLFRLMVIAQQIYRRFVLGHTTNEQFAGLGAVVRYLGERCRRVIDAAGGAR

SEQ ID NO: 50745 - protein, 230 aa, Burkholderia mallei
MKNVPHTVTDAAIATIRERIERGFYPVGSLLPAQRQLSEELEISRASLREALSTLEALGMLRIRPGKGVYVESAQASAAHAWRFAEQSSLPDTYQMRYALEGFAARMAALAVSEEDLAWFEENVAALQEALANDELDSASQLDFDFHMRIVSLAGNAAIESILRGSADIMKESQRMPFYRRELVLSTYREHRAILDALIAKDPAAAGAAIEAHISNAAQRAGVFFPTPKR

SEQ ID NO: 50746 - protein, 160 aa, Burkholderia mallei
LARSPSRGACAPSWPRWDRFKRDFVSADGRVIDVGSADERTVSEGQAYGLFFALVANDRAAFDALLRWTEDNLAQGDLSARLPAWLWGRAADGAWRVLHANAASDADLWLAYALLQAGRLWRQRSFTARGAFLSKRLLHQETATLAGLRLLLLPGPHGFS

SEQ ID NO: 50747 - protein, 345 aa, Burkholderia mallei
MRHPAALSPTLSPAIVKVFRGLPNAESRAPCALTIGNFDGVHRGHQALLARVRAAADARGLPVCVMTFEPHPREFFNPASAPPRIAMLRDKLEALREHGVDRVVVEHFNHTFASQSPEAFVERTLVHGLHTRWIMVGDDFCYGARRAGDFASLKAAGERFGFEVEQMETLADADGARISSSGVRAALAAGDLDAAARALGHGYAISGHVAHGLKLGRDLGFPTLNLPIAHKRPALSGIFVVRVHGLAPEPLPGVASLGVRPTVDDSGRVLLEVHLLDWHGDAYGKLVRVEFLKKLRDEAKFVDLETLSRAIAQDVVDTRAYFAEHGRAPGSRATGFATSATDRIS

SEQ ID NO: 50748 - protein, 557 aa, Burkholderia mallei
MTPASLIEQYGPRESMEYDVVIVGGGPAGLSAAIRLKQLAAEKGAEIGVCVLEKGSEIGAHILSGAVMDPRAITELFPDWKEKGAPLNVDVTEDRFLFLTEKSSFQVPNWALPDNFKNHGNYVISLGNVTRWLGQQAEALGVEIFPGFPAAEILYNDDGSVKGVATGNMGVGKDGEPTENFQLGMELHAKYTLFCEGARGHLGRQLMDKFKLNANSDPQAYGIGIKELWEIDPVKHKPGLVIHTAGWPLSSDTYGGSFLYHMDNNQVVVGFVVGLAYSNPYLSPFEEFQRYKTHPAIRPFLEGGKRVSYGARAITAGGLLSLPKTVFPGGALVGDDAGFLNASRIKGSHAAIKTGMLAAEAAFDAVQAGRQADELTAYPDAFKTSWLHTELYRARNFKQWMGKGLYLGTLMVGVEQKLMNGNVPWTLHHQHGDHEMLKPASQCQPIDYPKPDGKLTFDRLSSVFISNTNHEENQPAHLTLKDASVPVNVNLRTYAGPEARFCPAAVYEFVKNDDGSDRLVINAQNCVHCKTCDIKDPTQNIVWVTPEGGGGPNYPNM

SEQ ID NO: 50749 - protein, 458 aa, Burkholderia mallei
  MISC_FEATURE (114)..(114): X=any amino acid
MNGRDGRECARGTRRARFPTIVFSPLDAACIASLTMDIDQYMTDVGRRARRASREIARASTAAKNAALEAVARAIGRDADALKAANARDVARAKDKGHDAAFVDRLTLSDKALXTMIEGLRQVATLADPIGEMSNLKYRPSGIQVGQMRVPLGVIGIIYESRPNVTIDAAALCLKSGNATILRGGSEALESNTALAKLIGEGLAAAGLPQDAVQVVGTADRAAVGKLITMTEYVDVIVPRGGKSLIERLINEARVPMIKHLDGICHVYVDDRASVAKALAVCDNAKTHRYGTCNTMETLLVARGIAPAVLTPLGRLYREKGVELRVDADARAVLEAAGVGPLVDATDEDWRTEYLAPVLAIKIVDGIDAAIEHINEYGSHHTDAIVTEDHDRAMRFLREVDSASVMVNASTRFADGFEFGLGAEIGISNDKLHARGPVGLEGLTSLKYVVLGHGEGRE

SEQ ID NO: 50750 - protein, 727 aa, Burkholderia mallei
MWDVDFFFAARRAAAAARPRIDPMSVSELRWAGSQAGGPAAHGKTAYLPYIDGLRAWAVLSDMLYHLDARWLPGGFAGVDIFFVISGFVVSVSVANRGPMSLGPFLLFFYARRMRRILPALVAALLATALVSTLFIPASYLSDRNRTTGLLAFFGLSNVILGAPGGDYFSPKAEFNPYTHTWSLGVEEQFYLLFPLLFHAWRAGGKRRYASAALFAAGLCASLAWSVWARPAMHAQAFYLIFGRFWELAAGVLLYQCVARAGRPAGRPAAAFGIEAGVWASAVAVLAGFVASKPALYPFPGALVPVAGALGLLGLLHGRARASPVRAALEQPALRFVGRISYSLYLWHWPVFVVFRWTLGLDSAGGKASALLVACALATASYRFIETPLRRGGAAARRAPRVAALAGGAGVLAAGAALSSMLAAAQPQLSLSTVARHRLDWYPYGVETNAAYPGCVADVGARDVRGGKLWIYARKGCGRPPESRQRVFVIGDSHAMAYAGMFKQFVVRTGIAVYSYNNAGCPFVSLQPWRERGEPGCRRYGDAALDDMLSKLAPGDIVFLPSLRLPRFVTQWAFVGDDDARRLSSGREAAQVRERAIADAVAVLREIGRRGARIVLEAPPPVFRTVPYRCSDWFNRRNAICARGPLVGRGEIDALRAPVLTAYARIAAQVPDVHTWDPLPLLCDEKACSAYDGARPLFFDGDHLSGYGNLRVLPGFEAFVRELIEAA

SEQ ID NO: 50751 - protein, 515 aa, Burkholderia mallei
MIKKLIRKLLGQDARTTQDAPQDPAEPRSAAPAAPAGRAKPPRGAAKKPRNGAPTIVHADVHGIDPALISKNAIRVTDTLQQAGFRAFIVGGAVRDLLLGIAPKDFDVATDATPTEVQRLFRRARLIGRRFQIVHVQFGQELIEVSTFRALVDAPQEPPADAAPAKRLKRDELDRRTHAVDASGRVLRDNVWGEQHEDAARRDFTINAMYYDPASQTVLDYHDGMADMRARLLRMIGDPATRYREDPVRMLRVVRFAAKLGFDIEEKTREPIKELADLINNVPAARLFDEMLKLLLSGHALACLKQLRKQGLHHGLLPLLDVVLEQPQGEKFVTLALNNTDARVRAGKPVSPGFLFATLLWHDMRQRFEQYSADGEFPVPALHRAMDDVIDMQTEKLAIHKRYSADMREIWGLQLRLEKRSGRSALRLLEHQRFRAGYDFLLLRCESGELDPAVGQWWTDFIDGDAATREALLTQGGSRDKSPRKRRRRGGRSRRTADSAEGAEGAARGESDAND

SEQ ID NO: 50752 - protein, 389 aa, Burkholderia mallei
LDTGEDVALVLPRGTVLRDGDVLVADDGALVRVAAAHEAVLLVRAPDALTLTRAAYHLGNRHTPVEVGAGCLKLEYDPALADMLTRLGATVERASAPFQPEAGAYGGGHRHGHDATFAEDYALAQQVFDEHHGTRTRTRTRTITITITITIISMARLARTVITMDTAELVALLHLASPALPIGAFSYSQGLEAALDAPLIRDADGARDWIASGLADVLAQGELPFLAHQLARWHAHDAAALADANDEFVASRESFELRRETEQMGWSLAQLCASLEWGDAARRATLASIPSVALPSAFAFAAAAHGATPDAALAAYAFGWVENQTAAAIKAVPLGQLAGQKIIVALREPIRDAVRRALATPPEAINTFAPQLGILSARHESQYSRLFRS

SEQ ID NO: 50753 - protein, 200 aa, Burkholderia mallei
MNAATTADVRQHILDTAKPIMLCKGFTGVGLNEILAAAGVPKGSFYHYFGSKEAFGESILESYFDDYVAHLDELLVRGPGAAIDRLMRYWTQWQQMQMGNDPEGKCLVVKLGAEVCDLSEAMRAALERGTSQIVARLAACIAAALDDGSLKVDLEPQQTAAMLYELWVGATLIEKIRRDGEPLAVAMASTRRVLGLTGAR

SEQ ID NO: 50754 - protein, 310 aa, Burkholderia mallei
MTAKPIADPIVDYLSNLRHVRKLSDHTLRAYAHELDELKRLANGRPLDSLTAVDMRSAVARAHAGGLSARSISHRLSAWRAFYRWFSQHVEMNANPVAAVRAPKRAKTLPKALSVDDTAALMDAPTAGTAESLRDHAILELFYSSGLRLAELIGLDIEYVKDGAYRSAGWLDLAEAEVTVRGKGDKERKVPVGRKALDALHAWLAVRGEFVKHDPRPLFLSVRGNRMSPGVVRERVKRAALAAGIPANVHPHVLRHSFATHVLQSSGDLRAVQELLGHASISATQVYTSLDFQHLAKIYDSAHPRAKKRD

SEQ ID NO: 50755 - protein, 531 aa, Burkholderia mallei
MISSEVVDLSRLQFGITALYHFLFVPLTLGMSWLLVIMEAVYVMTGKQVYKDMTQFWGKLFGINFAMGVTTGITLEFQFGTNWSYYSHYVGDIFGVPLAVEGLMAFFLESTFVGLFFFGWNRLSKVQHLVVTFLVALGSNLSALWILVANGWMNNPVGAEFNYQTMRMELANLFDVLFNPVAQVKFVHTVSAGYVTAAMFVLGVSAWYLLKKRDVDFALRSFAIAAGFGLASTLCVIVLGDESGYTTGEVQKMKLAAIESEWETQPAPASFTLIGLPNQEAERTDYAIKIPYALGLIATRSVSEPVIGLRELAKRSEEHIQSGMIAYGALQKLKAGDTSAETKATFDQHKQYLGYGLMLKQFTQNVTDATPDQIKAAAKQTIPPVAPVFFSFRIMVFLGFLFLATFIAAFWFCARRQLLQDNRRWFLRYAVWAIPLPWLAAEFGWVVAEVGRQPWTIAGILPTHLSASSLTATDLYLSLAGFIVFYTALFIIEITLMFKYARLGPSSLHTGRYHHEQAGRPLEKAVAGTAA

SEQ ID NO: 50756 - protein, 122 aa, Burkholderia mallei
MREAQGGEHVCGADRVDEARRRASRERGGELPELPELPELPELPELPELPELPELPELPELPELPELPELPELPELPELPELPELPAPPPIRTRCADARIRLRRFPPFNLSVDTAWRRARAP

SEQ ID NO: 50757 - protein, 700 aa, Burkholderia mallei
MARKTPIERYRNIGISAHIDAGKTTTTERILFYTGVNHKIGEVHDGAATMDWMEQEQERGITITSAATTAFWKGMGNNYPEHRINIIDTPGHVDFTIEVERSMRVLDGACMVYCAVGGVQPQSETVWRQANKYKVPRLAFVNKMDRTGANFFKVYDQLKLRLKANPVPVVVPIGAEENFKGVVDLLKMKAIIWDEASQGTKFDYVDIPAELADTCQEWREKMVEAAAEASEDLMNKYLEEGDLPEADIVKALRDRTIACEIQPMLCGTAFKNKGVQRMLDAVIDFLPSPVDIPPVKGELESGEAAERQASDEEKFSSLAFKIMTDPFVGQLIFFRVYSGVVNSGDTLLNSTKGKKERLGRILQMHANQREEIKEVRAGDIAAAVGLKEATTGDTLCDPAHPIVLERMVFPEPVISQAVEPKTKADQEKMGLALNRLAQEDPSFRVQTDEESGQTIISGMGELHLEILVDRMKREFGVEATVGKPQVAYRETIRSTAKDVDGKFVKQSGGRGQYGHAVITLEPNEQGKGYEFFDEIKGGVIPREYIPAVDKGIQDTLKSGVLAGFPVVDVKVHLTFGSYHDVDSNENAFRMAGSMAFKEAMRRANPVVLEPMMAVEVETPEDYMGNVMGDLSGRRGIVQGMEDMVGGGKIVRAEVPLSEMFGYSTSLRSLTQGRATYTMEFKHYAEAPKNVADAIISAKSK

SEQ ID NO: 50758 - protein, 969 aa, Burkholderia mallei
  MISC_FEATURE (260)..(260): X=any amino acid
  MISC_FEATURE (261)..(261): X=any amino acid
VAQFAAELKMPAGVLLEQLQAAGVQKASEDDALSETDKARLLDHLRKSHGATDGDKRKITLTRRHTSEIKQADATGKARTIQVEVRKKRTFVKRDDVSETGADQAQAQTDEQAEAELKRREEEARREAELLEKQAQELRERQERLEREEAERRAREEAAEAERRRAEEEAAAKRAAAAQAEAAQQAAAAREQAQRAQSEPAEQSAQDEAVRPPSAPRSAKRRRRPRTPHAKRPTRRAPSRKRFASVARPPRPKRARSAKXXTRRAVRRSRRSSRRSRPSRPRRRRPRRRHAAQAGETRRRGGRGAPHGEEAGKRRAGARRRARGRPHQEAGHRQERLAGRRGETPRNQDARRSSGGVDRGWRGGPKGRGKHQDSASSFQAPTEPIVREVHVPETISVADLAHKMSIKASEVIKVMMKMGQMVTINQVLDQETAMIVVEELGHRALAAKLDDPEALLVEGEIGSDAEQLPRPPVVTVMGHVDHGKTSLLDYIRRAKVAAGEAGGITQHIGAYHVETPRGVVTFLDTPGHEAFTAMRARGAKATDIVILVVAADDGVMPQTKEAISHAKAGGVPIVVAINKIDKPEANPDRVKQELVAEGVVPEEYGGDSPFVPVSAKTGAGIDDLLENVLLQAEVLELKAPVESPAKGIVIEAKLDKGKGPVATVLVQSGTLSRGDVVLAGTAYGRVRAMLDENGKPTKEAGPSIPVEIQGLSEVPGAGDEVIVLPDERKAREIALFRQGKFRDVKLAKQQAAKLESMLEQMGEGEVQNLPLIIKADVQGSQEALVQSLLKLSTDEVRVQIVHSAVGGISESDVNLATASKAVIIGFNTRADAQARKLAEANGIDIRYYNIIYDAVDEVKAAMSGMLAPEKREVVTGMVEVRQVFKVPKVGTVAGCMVTDGVVKRSSSVRVLRNNVVIFTGELDSLKRFKDDVKEVKQGFECGMSLKNFNDIVEGDQFEVFEVTEVARTL

SEQ ID NO: 50759 - protein, 213 aa, Burkholderia mallei
MSPIETKLREEICEIGASLYARGHAVGSAGNISAKLDDGWLITPTDACLGRLDPAGIAKVDPAGNAVSGGKPSKTLALHRGIYARNAEARGIVHTHSTHLVALTLAGVWSEADVLPPITPYYVMKVGHIPLIRYRRPGDPAVAAEVAALADRVRGVLLERLGPVVWGPSVAHASYALEELEETARLWLITHPKPEPLGEPALAELRDAFGARW

SEQ ID NO: 50760 - protein, 133 aa, Burkholderia mallei
MAKASNTAAQRVRKKVKKNVAEGVVHVHASFNNTIITITDRQGNALAWATSGGQGFKGSRKSTPFAAQVAAESAGRVAMEYGVKNLEVRIKGPGPGRESAVRALHGLGIKITAISDVTPIPHNGCRPPKRRRI

SEQ ID NO: 50761 - protein, 255 aa, Burkholderia mallei
MSGAATTAAVPRFFVDAALRADATLALPADVARHAHVLRLQPGDALALFDGTGGQYRARLVEIDKRGALARIDAFEPAEAEPPYRVTLAQGIAGGDKMDWVIEKAVELGVAAVVPLSTARGVVRLSGERADKRVSHWRGVVRASCEQCGRNRLPEIAPVRGFDAWLDALPATPADGALRLLLSPRASVPFASLPAAPPAGDVTLLIGPEGGLAPDEEQAARARGFAALSLGPRVLRTETAGAAVLAALAARWGGW

SEQ ID NO: 50762 - protein, 506 aa, Burkholderia mallei
MGGRGSPLPDSTDSEENLMGKITGFLEYERRHEAYEAPLTRVKHYKEFVAALTDADAKIQGARCMDCGIPFCNNGCPVNNIIPDFNDLVYRQEWRQAIDVLHSTNNFPEFTGRICPAPCEAACTLGIHDDPVGIKSIEHAIIDKAWAQGWVAPQPAAHKTGKKVAVVGSGPAGLAAAQQLARAGHDVTVFEKSDRIGGLLRYGIPDFKLEKWLIDRRMRQMEAEGVTFRTSVFVGRDPLPETIGNMAKETISPETLKDEFDAVVIAGGSETPRDLPVPGRELAGIHFAMEFLPQQNRVNAGDKLADQLLAKGKHVVVIGGGDTGSDCVGTSNRHGAKHVTQFELLPQPPEAENKPLVWPYWPIKLRTSSSHEEGCERDWAVATKRFEGRNSKVEKLIAARVAWVDGKMQEVPDSEFEIKADLVLLAMGFTQPAAPVLEAFGVAKDARGNARAGTDGDRAYYTSVDKVFAAGDMRRGQSLVVWAIREGRQCARSVDAYLMGSSELPR

SEQ ID NO: 50763 - protein, 413 aa, Burkholderia mallei
MGYQQGLSGLAGASSDLDVIGNNIANANTVGFKGSTAQFSDMYANSVASAVNNPIGIGTMLASVQQQFSQGTITSSTSSLNVAINGNGFFQMSNNGVTTYSRDGTFQRDKNGYIVNSQGLNLMGYAANANGVINTAATVPLQAPTTNIAPTATTKITGQFNLNSQDAVPATTPFNYTDPTSYNYTTSVQVFDTLGGSQNVNLYFVKSATSGQWEAYAGPAGKTPTDLGSVKFSTAGTITGTSTPAGVPTTNVGQFSFSIPTTTGAANPQNLTLDLTGTTQYGGKNGINNLAQDGFASGVLTTFSIGADGKVTGNYSNGQTSTLGQIVLANFNNPNGLVNVGNNQYVESAASGVPQISAPGSTNHGTLQGSALENSNVDLTSQLVKLITAQRNYQANAQTIKTQQTVDQTLINL

SEQ ID NO: 50764 - protein, 528 aa, Burkholderia mallei
MNPLLSAAASEELGRTRHLGVALLVALLAAGVAYVFVHLFADLAPVGPRSAFPYLLLGVALAIALGFEFVNGFHDTANAVATVIYTHSLTPNVAVIWSGLWNFLGVMASTGAVAFGILQLLPVELILQVGHGAGFAMVFALLIAAIAWNLATWYFGLPSSSSHTLIGSIIGVGLANQLMHGPSGTSGVDWAQAAGVGQSLLLSPLVGFLCAALLLAALKALVRVPALYREPQTNEPPPFWVRCLLILTCTGVSFAHGSNDGQKGMGLIMLILIGTVPTAYALNKAVTPGETQTFIAVAHRASETLARYAGAAQPSPNPRADVEAYVQSRRLSDATLPAVRRLSDALAAEVGATGSIAKVPEGQADNVRNTMYLVSEALRLMEKTGRPAFSPADRLALDDYRRQLDHATKFIPTWVKVAVAIALGLGTMVGWRRIVVTVGEKIGKQHLTYGQGASAEVVAMLTIGAADAYGLPVSTTHVLSSGVAGTMAANGSGLQWSTVRSLVLAWVLTLPASIVLAGALYWAFHALT

SEQ ID NO: 50765 - protein, 1315 aa, Burkholderia mallei
MPDAARCDQRPHPVRIARGRAAPSSSFELVLLPPVSRSIGEWARERARRNLGLSPDTSIRSTPGRPRMPLEKHTMSHFLDRLKFMSRVKSTFSDGHGAVVDEDRRWENGYRSRWQHDKIVRSTHGVNCTGSCSWKVYVKNGLITWETQQTDYPRTRADLPNHEPRGCPRGASYSWYVYSAQRVKYPMIRGRLMQMWREARKTMDPIAAWESISQNPEKARRYKSVRGLGGFVRADWNTATEIIAAANAYTIKRYGPDRVVGFSPIPAMSMVSYAAGARYLSLIGGACLSFYDWYCDLPPASPQVWGEQTDVPESADWYNSSYLLVWGSNVPQTRTPDAHFYTEVRYKGTKTVAISSDYGEMVKFGDIWLAPKQGTDAALALAMGHVVLKEFHASNQSTYFRDYVKQYTDMPMLVLLRERDGALVPDHFLRASHLAASLSEANHPEWKTLAIDAATGDIVAPNGSIGFRWGEAAHNGGEKVGRWNLEMKDGGSGRAIDPRLSLVDAHDEIVDVGFPYFGGEHEAVLARRVPAKRVALADGTSALVATVYDLQMANYGVDQGLGGPNVAASYDDDIPYTPAWQEKHTGVARHLVIQVAREFADNADRTRGKSMVIVGAALNHWYHNDMIYRGIINLLMMCGCIGQSGGGWAHYVGQEKLRPQFGWAPLAFALDWSRPPRQMNGTSFFYNHTSQWRHEKLAVGEILGPTADASKYAGMTLLDLNAKSERMGWLPSAPQLGRNPLDVVDEAERAGKEPVAYAVEMLKSDKLAFACDDPDNPANFPRNMFVWRSNILGSSGKGHEYFLKYLLGTQNALFSDEADALKPSEVQVRDAAEGKLDLLAVLDFRMSTTCLYGDIVLPTATWYEKDDLNTSDMHPFIHPLSEAVQPLWESKTDWEIYKTIAKKFSELAGPYLGTRRDLVCTPLLHDTPGELGQPFEPKDWRRGECDLIPGKTAPSMTVVERNYADIYKKFTSIGPLLDKLGNGGKGINWNTEHEVKEIGALSDTVAEPGVSRGRPRLDTAIDAAEMILTFAPETNGHVAVKAWDALSKITGRDHTHLAVGREHDKIRFRDVQAQPRKIISAPTWSGLESEEVSYNAGYTNVHELIPWRTLTGRQQFYQDHRWMLDFGEGSCAYRPAIDTKTVAPLHKRMPNGQPELVLNWITPHQKWGIHSTYSDNLRMLTLSRGGPHVWISEAEAQQAGIRDNDWVEVFNVNGTLTARAVVSQRVPAGMCLMYHAQEKIVNVPGAQTSGKRGGIHNSVTRTVTKPTHMIGGYAQQAYGFNYYGTVGSNRDEYVIVRKMNRVDWLEEPLNEGAEQ

SEQ ID NO: 50766 - protein, 112 aa, Burkholderia mallei
MRYCLALDLKDDPDAIARYEAHHERIWPEVAAYLRAHGVVAMEIYRLGTRMTMVMDTDDACFDAARFDADARADAKIVEWEALMGAFQQPTPWTPAGVKWTPMTRIFDLSKQ

SEQ ID NO: 50767 - protein, 361 aa, Burkholderia mallei
  MISC_FEATURE (149)..(149): X=any amino acid
MALTLEALAARFGGEIVGDGRCEVGALAPLDQAGPRQLAFLANPKYLAQVETTGAGAVLIAPGDLEKLGAAAHGRNFIVTPNPYAYFARVAQMFIDLAAPPRAAGVHPSATIDPAAQVAASAVIGPHVTVEAGAVIGERAQLDANVFVXRGTRIGDDSHLYPNVAIYHGCTLGPRAIVHSGAVIGSDGFGFAPDFVGEGDARTGAWVKIPQVGGVKVGPDVEIGANTTIDRGAMADTVIDECVKIDNLVQIGHNCRIGAYTVIAGCAGIAGSTTIGKHCMIGGAVGIAGHVTLGDYVIVTAKSGVSKSLPKAGIYTSAFPAVEHGDWNRSAALVRNLDKLRDRIKALETALVAREGDAGGA

SEQ ID NO: 50768 - protein, 198 aa, Burkholderia mallei
MSESIARAPAPNPKRTLRETLARRRLDAQRAPRAHDALAQRVLAILAQCAPRTVGFYWPLPGEFDARDAIASWLAGDASRQAALPVIGKPRTPLEFHAWTPDAPMREGRHRIAEPAAGARLVPELLLIPCVGFDHGCFRLGYGGGYYDRTLAAWPGATPPVTVGVAYDACGVRELPREAHDLPLDWIVTETRLYRSDD

SEQ ID NO: 50769 - protein, 465 aa, Burkholderia mallei
MESLRIYNTLARDKQDFVPRQPGEVRMYVCGITVYDYCHIGHARMVVVFDIVQRWLRARGYRVTYVRNITDIDDKIIRRAVENGETIQSLTRRFTDAMNADFDALGVERPDLEPRATEFIPQMLGMIEKLEANGYAYQAKDGDVNYSVRKFANYGRLSGKSLEDLRAGERVAANDAKEDPLDFVLWKRAKPQEPAGASWESKYGAGRPGWHIECSAMGCTLLGAHFDIHGGGQDLQFPHHENEIAQSEGATGQTFVNYWMHNGFVQVDSEKMSKSLGNFFTIREVLEKFDAEVVRFFIVRTHYRSPLNYSDVHLDDARASLTRLYTALKDATPDAQPLDWSEAHAQRFAAAMNDDFNTAVAVAVLFELATEVNRTREPALARQLRLLAGLLGLLGREPREFLQHAAGAARTGALEPHEIEARIAARVAAKQAKNYAEADRIRAELLEAGIALEDKPGGSTEWRRV

SEQ ID NO: 50770 - protein, 555 aa, Burkholderia mallei
MAQYVFTMNRVGKIVPPKRQILKDISLSFFPGAKIGVLGLNGSGKSTLIKIMAGIDKDIEGEATPMPNLNIGYLPQEPQLDPGKTVREAVEEGLGDLFQANKKLEEIYAAYAEPDADFDALAAEQAKYEAILASSDGGSPEQQLEVAADALRLPPWDAKIEHLSGGEKRRVALCKLLLEKPDMLLLDEPTNHLDAESVDWLEQFLVRFPGTVVAVTHDRYFLDNAAEWILELDRGHGIPWKGNYSSWLDQKEERLKQEEASESARQKAIKKELEWVRQNPKGRQAKSKARIARFEELNSQEYQKRNETQEIFIPVGDRLGNEVIEFKNVSKSFGDRLLIDNLNFKIPAGAIVGIIGPNGAGKSTLFKMLTGKEQPDSGEVVLGPTVKLAYVDQSRDALDGSKTVFEEISGGADVLTVGRYETPSRAYIGRFNFKGGDQQKIVGNLSGGERGRLHLAKTLISGGNVLLLDEPSNDLDVETLRALEDALLEFAGSVMVISHDRWFLDRIATHILAFEGDSQVTFFDGNYQEYEADKRARLGEEAAKPKRLRYKPISR

SEQ ID NO: 50771 - protein, 269 aa, Burkholderia mallei
MFVDSHCHINFEGLAERLPQVLENMREHGVTHALCVSVDLETLPAVLAIARDHDNVFASVGVHPDHEDAREPTVAELVELAAHPKVVAIGETGLDYYRLEGRSIADMQWQRERFRTHIRAAHATGKPLIVHTRASSEDTLRIMAEERASVPGGVMHCFTEPWPVAEAALAQNFHISLSGIVTFKSAADVQEVARRVPLERLLIETDSPYLAPVPYRGKRNEPAYVSYVGRFIAAQREMTDEALGAATSRNFFRLFKIARTGEASPVNQG

SEQ ID NO: 50772 - protein, 141 aa, Burkholderia mallei
MGTSMTKPARELRKTDFEQLSEFRYQMRRFERFSERAAQSEGITPLQYLLLLHIKGYPERDWATVGELAERLQAQHHGVVALVTRCEALGLVRRRPSDADRRQVKVHLQAAGERVLARLAELHRAELKSLRGAFQVPQIDY

SEQ ID NO: 50773 - protein, 302 aa, Burkholderia mallei
MARRALDGVLLLDKPVGLSSNDALMRAKRLYQAKKAGHTGTLDPLASGLLPLCFGEATKFSQDLLEADKTYEATMRLGVRTTTGDAEGDVLDTRDVSCDEAAVRAALARFVGEIVQVPPMYSALKRDGKPLYEYARAGQTVEREGRTVTIRALALVSCALPDVTFRVTCSKGTYVRTLAEDIGEALGCGAHLTMLRRTGVGPLTLEHAVTLDALDAATQDERDARLAPVDALLSTFPCVKLDAALATRFLHGQRLKLSELAARPDAAEGGRVRVYDADDRLLGVARASEGVLAPERLVVTGA

SEQ ID NO: 50774 - protein, 469 aa, Burkholderia mallei
MSSELPAISVQDVSKRFRVFAKPADRLKAAVRHRIGGLAKLVPARLLGTEGASEFHALQHVSFHVQKGETIGIIGRNGSGKSTLLQIICGTLTPSGGRVAINGRVAALLELGAGFNPEFTGRENVYMNAALLGLSKAQIEERLDAIFAFADIGGFVDQPVKTYSSGMYVRLAFAVIAHVDADVLVIDEALAVGDAFFTQKCMRFLRAFMERGTVLFVSHDTNAVVNLCTRVVWLDKGRVREIGPAKDVCDSYLEAFYEEQHCASGRSVRALERSSVVRAIAEGDMRDQRALLINASKLRNDVELFQFTADAKNFGLGGASIEHVGIEDGTGAPLNWVVGGEIVCIRIAVKALQNLERAIVGFIVRDRLGQNLFGDNTYLTTLNEPFAVAAGESFSVRFGFRMPVLPVGDYSVTVAVADGSQSDHVIHQWLHDAVLLKSHSTSVSTGLIGIPMHEIVLERDTLNEVGAAQ

SEQ ID NO: 50775 - protein, 81 aa, Burkholderia mallei
MAVRQASRQSGGTKARILDAAEDLFIEHGFEAMSMRQITSRAAVNLAAVNYHFGSKEALIHAMLSRRLDQLNEERLRILDR

SEQ ID NO: 50776 - protein, 303 aa, Burkholderia mallei
MDAAAPTSPRSADASRAAPQPTRVRTADRLELACYRWPSTAPSCAAPRATVALVHGLAEHAGRYQAFAERLNAAGIEVVAIDLRGHGRSPGERAWAERFDRYLDDADALVASAARENTPLFLMGHSMGGAIAALYAIERAAARHANLAGLILSSPALAPGRDVPQWMLAMSRFISRVWPRFPALKIDAALLSRDPAVVAANRADPLVHHGSVPARTGAEILDAMRRIAAGRAALRIPVLVYHGTADKLTEPDGSRDFGAHVGSPDRTLTLYEGNYHETMNDLERERVIGALIDWIAARVPARG

SEQ ID NO: 50777 - protein, 386 aa, Burkholderia mallei
MSIPLLQQVRVGAYIMRQHLSGNKRYPLALMLEPLFRCNLACNGCGKIDYPDPILNQRLSVEECLQAVDECGAPVVSIAGGEPLLHKEMPEIVKGIMKRKKFVYLCTNALLMEKKMDDYAPSPYFVWSVHLDGDREMHDHSVSQEGVYDKAVAAIREAKRRGFRVNINCTLFNDALPERVAKFFDTLGPIGVDGITVSPGYAYERAPDQQHFLNRDKTKNLFREVFKRGEGGKRWSFSQSSLFLDFLAGNQTYKCTPWGNPARTVFGWQKPCYLVGEGYVKTFKELMESTDWDNYGVGNYEKCADCMVHCGFEATAVMDTIAHPLKALKVSMSGIRTEGAFAPDIPIDNQRPAEYVFSRHVEIKLEEIQRAGKGKLQKAPKPAATA

SEQ ID NO: 50778 - protein, 121 aa, Burkholderia mallei
MARIAGVNIPNHQHTEIGLTAIFGIGRTRARSICVASGVAFSKKVKDLTDADLEKLREEVGKFVVEGDLRREVTMNIKRLMDLGCYRGVRHRKGLPLRGQRTRTNARTRKGPRRAAQALKK

SEQ ID NO: 50779 - protein, 436 aa, Burkholderia mallei
  MISC_FEATURE (5)..(5): X=any amino acid
MSDLXAVEPRRPLAEALRPKTLADVIGQTHLLGEGKPLRLAFESGKPHSMILWGPPGVGKTTLARLTALAFDCEFIALSAVLGGVKDIREAMEQARDTLNRTGRHTILFVDEIHRFNKAQQDALLPFVESGLVTFIGATTENPSFEVNSALLSRAQVYVLKSLAEDELRQLLKRAQDVALGGLAFDDKAVDTLVGYADGDARRFLNLLEQAQTAASSAGVTTIDAAFVESAMTMNARRFDKGGDNFYDQISALHKSVRGSSPDGALYWLCRMLDGGADPKYLARRVVRMAWEDIGLADPRAMQIANDAAQTYERLGSPEGELALAQAVLYLACAAKSNAGYNAYNEAMAFVRQDKSREVPVHLRNAPTKLMKELGYGHAYRYAHDEPNAYAAGETYLPDGMREPRWYRPVPRGLETKIADKLAWLRELDRDAGKND

SEQ ID NO: 50780 - protein, 858 aa, Burkholderia mallei
MSASVAEPPPALSRKAEFKAAKAELLARFKSANHVTPLMHALSRATDDALRSLWQECGLPATLALVAVGGFGRGELSPHSDVDILVLLPDAHASELDERIERFIGMAWDLGLEIGSSVRTVDQCIEEASHDVTVQTSLLEARRIVGSTALFERFMLRYREALDARAFFQAKVLEMRQRHAKFQNTPYSLEPNVKESPGGLRDLQTILWIARAAGFGSSWRELDTRGLITDREARELRRNEGFLKTLRARLHVIAGRRQDILVFDLQTQAAESFGYQPTSAKRASEQLMRRYYWAAKAVTQLATILIQNIEAQLFPATSGVTRVLSPGRFVEKQGMLEIAADDVFERHPDAILEAFLLYEATRGVKGLSARTLRALYNSRDVMNNAWRRDPRNRHTFMQILQQPEGITHAFRLMNQTSVLGRYLLNFRRIVGQMQHDLYHVYTVDQHILMVLRNIRRFAVAEHAHEYPFCSQLIVNFERPWVLYVAALFHDIAKGRGGDHSALGMADARRFCREHGIEGDDAALVVWLVQHHLTMSQVAQKQDTSDPVVIKRFAELVGSERRLTALYLLTVADIRGTSPKVWNTWKGKLLEDLYRATLAVLGGAQPDAHSELKTRQEEALALLRLETVPPDAHRALWDQLDVGYFLRHDAADIAWQTRVLYRHVAADTAIVRARPSPVGDALQVLVYVKDRSDLFAGICAYFDRNGLSVLDARVNTTRHGYALDNFIVTQTEHDVQYRDIANLVEQQLAARLAESAPLPEPSKGRLSRLSRTFPITPRVDLRADERGQYYILSVSANDRPGLLYSIARVLAEHRVGVHAARINTLGERVEDVFMLDGTGLSDNRLQIQVETELLRAIAV

SEQ ID NO: 50781 - protein, 467 aa, Burkholderia mallei
MSLFRKKNVDRMIAGAQAAGLKKALGAVDLTFLGIGAIIGTGIFVLSGTGAVQAGPALMLSFVIAAIACGLAALSYAEFASTIPVAGSIYTYSYATLGELVAWIIGWDLMLEYGLAASAVSVGWSGYLQSLLQGFGVSLPTALTAAPGALPGVVTYFNLPAFVVMLVITTLLSIGIRESTRVNNIMVFIKVAVVLLVIAVGVFHVTPVNWKPFMPHGWNGVFGAAAVMFFAFIGFDAVSSAAEEVKNPKRDLPVGIIASLGVCAFLYVAVAAIATGIVPWAQYANVSHPISYALQVAGEKWVAGFIDLGAVIGMLTVILVMSYGQTRIIFAMSRDGLLPAALSRVHPRFATPFLTTWLVGLFFGLIAALIPLNVLAELINIGTLAAFSMVSIAVLVLRRTHPDLPRAFRCPGVPLVPILAVAACLFLMLNLQPVTWIAFLTWLVIGLFVYFAYSRSRSKLAHGAQQH

SEQ ID NO: 50782 - protein, 451 aa, Bordetella pertussis
MSFKPVVALVGRPNVGKSTLFNRLTRSRAALVADFSGLTRDRHYGEGRVGDTPFLVIDTGGFEPVAKDGILAEMARQTRQAIAEADVVVFLVDARAGVNAHDHEIARLLRKSGQQRVLLAVNKAEGMGVGNATGDFHELGLGEPHPISAAHGDGIVDLIEIALSGLVAPPADTGEQLEQDVVDHRIKLAIVGRPNVGKSTLINTLLGEERVIAFDMPGTTRDAIEIDFERDGRKYTLIDTAGLRKRGKVFEAIEKFSVIKTLQAIEASNVVLLMIDAQAEVSEQDAHIAGFVLETGRAVVVAINKWDGLDSDQRERIEREFQRKLRFLGFARMHTISALKGQGVKPLLKSVNAAHAAAFAKLSTPRLTRELQAAVEQQPPPRKGIFRPKMRYAHQGGQNPPLIVIHGNALDAVPDSYRRYLETRFRNAFDLAGTPLRIEFKSSRNPYVQEN

SEQ ID NO: 50783 - protein, 385 aa, Bordetella pertussis
MRNSRPGRAWRGAVVLTGLLALSGCSMFSSDDDRYKPAELTQYAPGMSVRTAWTASVGSGSGLGFAPTVLGESIYAATPDGSVGKFDLLSGRAIWKSSADAKLSAGAGSDGQTTAVATPDGEVIAFDDTGKIKWRARATSDVAIPPVVGYGVVVVRSGDYRIQAFNAENGERMWSMQRPGPALALRSAAQMVLAEGLVISGLPGGKLLAINSATGNVQWEGTVATPRGASDLERLTDVVGAPRIAGRLMCAVAYQGRIVCFDVSAGGRPIWAKDFSSASGMVIDDRFAYAPDQGSVVSAFALDSGNNVWKQAELKNRLLTAPALLGEAVAVGDFEGYVHFLSRSDGRLLARLSVGGGAIVSPPQTTSQGVLVQTGNGSLVMVRAN

SEQ ID NO: 50784 - protein, 440 aa, Bordetella pertussis
MGLLEGICRYRGAILKREVYRARAARRRAGRDRAKGAKIAAFQPGRARFMSAQISPLNAGAAPESFGIASVPEIIAELRAGRIVILVDEEDRENEGDLVMAAEFVTPEAINFMVTHGRGLVCLTLTEERCRQLDLPLMASRNGTRYGTNFTQSIEAAEGVETGISAADRARTIQVAVARDAQPSDLVQPGHIFPVRAVPGGVLVRAGHTEAGCDLTAMGGLTPAAVICEILKPDGTMARLPDLVEFAREHKLKIGTIADLIQYRSEHESIIARMGERMMQTPWGDFRCIAYRDDATRSPHLALVHGNIDPERETLVRVHEPASLFDVLDTGASPHSWSVGQALHAIAASPAGVLVLMNCQSSTEHLFGQIANWAGPAERAAAQEGDRFGLRTYGIGAQILRDLNVGRMKLLARPRKMPSMAGFALTITGYDCVPPNLRND

SEQ ID NO: 50785 - protein, 173 aa, Bordetella pertussis
MNPYILTPDLNGEGLHIGIVRARFNEEIGQAQLQACLEELGKLGVDERDVMVVSVPGALELGVALARMAESYEFDALIALGAVIRGETYHFEVVSNESAAAISRIALETGIPVANGVLTVDTDEQAQARAAGKGADCAQVAVEMANLAAALEPEEDDEDDEDEDFDDEEDDGR

SEQ ID NO: 50786 - protein, 434 aa, Bordetella pertussis
MVGMTKMTQVFQKVSAIRGMNDVLPGPSARWEKFEEIVRGWLRSYGYRNVRTPVLEHTRLFARGIGEVTDIVEKEMYTFTDALNGDSLTMRPEMTAGIVRASIEHNMLYDRPHRVYAIGPVFRHERPQRGRYRQFHQIDVEALGFAGPDVDAEMIVMLARLWKLLGLQDVRLELNSLGQPAERAAHRAALIEHLERHQDVLDEDGRRRMYSNPLRVLDTKNPAMQEMADSAPRLFDFLGEASRSHFDGLCQRLADAGIEYRLNPRLVRGLDYYNLTVFEWVTDRLGAQGTVCGGGRYDGLVELLGGKPTPAVGFAIGMERLLDLWEQSVEIEQPAECEVYIVHQGEEGQRLAARVGEQLRDAGLDVIVHAGAAGFKAQFKRADASGARIAVILGGDEVASRTASIKHLRGPVGADAAQQQVPLAQLADVLKSKG

SEQ ID NO: 50787 - protein, 154 aa, Bordetella pertussis
MQARANARSARRRAREFALQGVYAWLLRGGEGTQDAGEIDAHLRDAEDFSEADAQWFKTLLHGVLREAPVLRERFLPYIDRPLAELSPVEHGILLIGSFELMHHVEVPYKVAINEAVELAKSFGGTDGFKFVNGVLDKLAADVRTAEVQAAPRR

SEQ ID NO: 50788 - protein, 423 aa, Bordetella pertussis
MPCQDASPPDVGAAPRRATRAVRVQWGGRTVTVGGNASVVVQSMTNTDTADAVATAIQVKELAQAGSEIVRITVNTPEAAREVATIREQLDRMGVEVPLVGDFHYNGHKLLTQFPECAQALSKYRINPGNMGGGKQRDDNFAQMIEVACRHDKPVRIGVNWGSLDHELMARKMDENSRRAQPWEAQAVIRDALVVSAISNARRAEELGLRSDAIVLSCKVSHVQDLIAVYRDLSARCDYPLHLGLTEAGMSSKGIVASTAALAVLLQEGIGDTIRISLTPEPGGDRTREVIVAQEILQTMGLRAFTPMVVACPGCGRTSSTFFQELADSIQSFLRRQMPLWRTRYPGVESMNVAVMGCVVNGPGESRHADIGISLPGTGEVPAAPVFIDGERTVTLKGDHIAEEFQAIVEDYVARRYGAGITH

SEQ ID NO: 50789 - protein, 338 aa, Bordetella pertussis
MLAGVALASEFDLIARYFTRPAPDGVLGVGDDCALFPVPPGQQVATSTDLLIEGRHFFPDVDPQALGHKALAVNLSDLAAMGARPVGCLLGLALPGVDEAWLAAFARGFQALADTHACPLIGGDTTRAPQGLLAISVTVFGAVAPGHALRRAAAQPGDDVWVSGELGAADIAYRLLDRQLPADPLRLAATRAALEWPRPRVELGMALAGLARAGIDISDGLLQDLGHILAASGVAAELRYDALPVAAALAGLPAETVRRAALGGGDVYELCFTADPAHRQAIRQAAHGAGAPVSRIGRILAGQGLRVLDADGAPLGELPGGFDHFSDATDQPAPDRRP

SEQ ID NO: 50790 - protein, 960 aa, Bordetella pertussis
MTDAAPNQPVNESQELSKSFEPAEIETRWYDEWAKRGYFDAGRHVETGTDPQPYVIQFPPPNVTGTLHMGHAFNQTIMDGLVRYHRMLGDDTVFVPGTDHAGIATQIVVERQLDAQKVSRHDLGREKFVEKVWEWKEQSGSTITGQVRRLGASADWPREYFTMDARMSRGVAETFVRLYQQGLIYRGKRLVNWDPKLLTAVSDLEVQSEEVDGHMWHILYPFVDGPQTITDQDGNTVTLRGMTIATTRPETMLADGALCVHPDDPRYKHLLGKLVELPLCDRNIPIIADDFVDPDFGTGCVKITGAHDFNDYACALRHDIPLIVIFTLDAHINENGPKQFQGLERYEARQAVVAELQAQQYLVKVEPHKMMQPKGDRTGVVLEPMLTDQWFVAMSKPAPAGTLNPGKSITEVALEAVADGRIAFYPENWTTIYNQWLNNIQDWCISRQLWWGHQIPAWYSEDGQVFVARSEEEAQEQARAAGVSGPLTRDPDILDTWFSSALVPFTTFGWPEDTPDLRRYLPSSVLVTGFDIIFFWVARMVMLTMHMTGSVPFKHVYVHGLIRDADGQKMSKSKGNTLDPVDLIDGIDLKGLVRKRTFGLMHPKQAGAIEKATRRQYPDGIPAFGTDALRFTMAAYATLGRNINFDLKRCEGYRNFCNKLWNATRFVLMNTEGHALDGDGGELSFADRWIVSQLQALEAEVERGFADYRFDNVANALYRYVWDEYCDWYLELAKVQIQQGTPAQQLGTRRTLIRVLEAVLRLAHPVIPFITEELWQKVALVAGKRTAGAVASVSVQPYPRANPQAVDAEAEAAVAELKSQVEAVRALRGEMNLSPAQRVPLVAEGPTDVLSRNTPYLAALAKLSEVEVVAALPDAGAPVQVVGDARLMLHVEIDVAAECARLDKEIARLEGEIAKANGKLGNASFVERAPAAVVEQEKARLAQFSETLEKVRGQRVKLGV

SEQ ID NO: 50791 - protein, 537 aa, Bordetella pertussis
MPMPIIESRIDTRSQDYADNARAMQAQLDDLNQKLARTAQGGSETARAKHVGRGKLLPRERVEQLVDPGSPFLELSPMAAHGMYGDEAPGAGMITGVGRIAGTECVIVCNDATVKGGTYYPMTVKKHLRAQEIAAQNRLPCVYLVDSGGANLPRQDEVFPDRDHFGRIFYNQAVMSSQGIAQIAVVMGSCTAGGAYVPAMCDESIIVRDQGTIFLGGPPLVKAATGEEVSAEDLGGGDVHTRLSGVADHLAANDMHALQLARNAVARLNRAKPAALALAPVREPRYDASELNGIIPADTRKPYDVREVIARIVDGSEFDEFKARYGTTLVTGFAHIHGMPVGIVANNGILFSESAQKGAHFIELCAQRKIPLVFLQNITGFMVGRKYENEGIARHGAKMVTAVATAAVPKFTILIGGSFGAGNYGMCGRAYSPRMLFMWPNARISVMGGEQAASVLATVKRDGIEARGAQWSGAEEDAFKQPIREQYEREGHPYYATARLWDDGIIAPADTRRVLGLALSAALNAPIEDTRFGVFRM

SEQ ID NO: 50792 - protein, 639 aa, Bordetella pertussis
MDFPREFDVIVVGGGHAGTEAALAAARAGAQTLLLTHNIETLGQMSCNPSIGGIGKGHLVKEVDALGGAMAIATDEAGIQFRILNSSKGPAVRATRAQADRVLYRNAIRAQLENQPNLWLFQQAVDDLMVQGDQVVGAVTQIGLRFRARTVVLTAGTFLNGLIHVGLQNYSGGRAGDPPANSLGQRLKELQLPQGRLKTGTPPRIDGRSINYSVLEEQPGDLDPVPVFSFLGKASMHPRQLPCWITHTNARTHEIIRGGLDRSPMYSGVIEGVGPRYCPSIEDKIHRFADKASHQVFLEPEGLNTHEIYPNGVSTSLPFDVQYELIHSLPGLENAHILRPGYAIEYDYFDPRALKSTLETKAISGLFFAGQINGTTGYEEAAAQGLLAGANAALQAQGKEPWVPRRDEAYLGVLVDDLVTRGVTEPYRMFTSRAEYRLSLREDNADLRLTEIGRRLGLVDDVRWDAFSRKRDAVAQEVERLKSTWVNPRVLPAHAAEALLGKAIEREYSLSDLLKRPNVSYEALMQARTDEGELLAGPGVLEDQVLAEQVETQVKYAGYIARQQDEVQKHLSHEQQPIPADIDYDAVTSLSFEVRQKLKTHRPETIGQAARVSGVTPAAISLLLIHLKRLHYGSRKQAA

SEQ ID NO: 50793 - protein, 132 aa, Bordetella pertussis
MAHTPHPSPFKSTGGLRRILNALRYSLQGLKAAIKYEAAFRQELVLAILLVPAAFFLGRTTDEVFILIASVILVLVAELLNSAIEALADALSVETHPLLGRAKDLGSAAVMLMLLFTLAVWVAVLISRFVLD

SEQ ID NO: 50794 - protein, 274 aa, Bordetella pertussis
MDATQSRKHMKNIPPSKSARVFCIANQKGGVGKTTTAINLAAGLATHKQRVLLVDLDPQGNATMGSGIDKSTLESNLYQVLIGEAGIEQTRVRSESGGYDVLPANRELSGAEIDLVQMDERERQLKAAIDKIAGEYDFVLIDCPPTLSLLTLNGLAAAHGVIIPMQCEYFALEGLSDLVNTIKRVHRNINNELRVIGLLRVMFDPRMTLQQQVSAQLESHFGDKVFTTVVPRNVRLAEAPSYGMPGVVYDRASRGAQAYIAFGAEMIERVKELD

SEQ ID NO: 50795 - protein, 998 aa, Bordetella pertussis
MQIPRSAWRLHALAAALALAGMARLAPAAAQAPQPPVAGAPHAQDAGQEGEFDHRDNTLIAVFDDGVGINLDDDPDELGETAPPTLKDIHISVEHKNPMSKPAIGVRVSGAGRALTLAGSTIDATEGGIPAVVRRGGTLELDGVTVAGGEGMEPMTVSDAGSRLSVRGGVLGGEAPGVGLVRAAQGGQASIIDATLQSILGPALIADGGSISVAGGSIDMDMGPGFPPPPPPLPGAPLAAHPPLDRVAAVHAGQDGKVTLREVALRAHGPQATGVYAYMPGSEITLQGGTVSVQGDDGAGVVAGAGLLDALPPGGTVRLDGTTVSTDGANTDAVLVRGDAARAEVVNTVLRTAKSLAAGVSAQHGGRVTLRQTRIETAGAGAEGISVLGFEPQSGSGPASVDMQGGSITTTGNRAAGIALTHGSARLEGVAVRAEGSGSSAAQLANGTLVVSAGSLASAQSGAISVTDTPLKLMPGALASSTVSVRLTDGATAQGGNGVFLQQHSTIPVAVALESGALARGDIVADGNKPLDAGISLSVASGAAWHGATQVLQSATLGKGGTWVVNADSRVQDMSMRGGRVEFQAPAPEASYKTLTLQTLDGNGVFVLNTNVAAGQNDQLRVTGRADGQHRVLVRNAGGEADSRGARLGLVHTQGQGNATFRLANVGKAVDLGTWRYSLAEDPKTHVWSLQRAGQALSGAANAAVNAADLSSIALAESNALDKRLGELRLRADAGGPWARTFSERQQISNRHARAYDQTVSGLEIGLDRGWSASGGRWYAGGLLGYTYADRTYPGDGGGKVKGLHVGGYAAYVGDGGYYLDTVLRLGRYDQQYNIAGTDGGRVTADYRTSGAAWSLEGGRRFELPNDWFAEPQAEVMLWRTSGKRYRASNGLRVKVDANTATLGRLGLRFGRRIALAGGNIVQPYARLGWTQEFKSTGDVRTNGIGHAGAGRHGRVELGAGVDAALGKGHNLYASYEYAAGDRINIPWSFHAGYRYSF

SEQ ID NO: 50796 - protein, 547 aa, Bordetella pertussis
MAAKQVLFADEARVRIVRGVNVLANAVKTTLGPKGRNVVLERSFGAPTVTKDGVSVAKEIELKDKFENIGAQLVKDVASKTSDNAGDGTTTATVLAQAVVQEGLKYVAAGFNPIDLKRGIDKAVAAAVEELKKLSKPVTTSKEIAQVGSISANSDASIGQIIADAMDKVGKEGVITVEDGKSLENELDVVEGMQFDRGYLSPYFINSPEKQVAALDDPYVLIYDKKVSNIRDLLPVLEQVAKSSRPLLIIAEDVEGEALATLVVNNIRGILKTTAVKAPGFGDRRKAMLEDIAILTGGTVISEETGMSLEKATLQDLGQAKRIEVAKENTTIIDGAGDGKSIEARVKQIRAQIEEATSDYDREKLQERVAKLAGGVAVIRVGAATEVEMKEKKARVEDALHATRAAVEEGVVPGGGVALLRAKQAITGLKGDTADQNAGIKLILRAVEEPLRTIVTNAGDEASVVVNTVLNGKGNYGYNAATGEYGDLVEQGVLDPTKVTRTALQNAASVASLLLTAEAAVVELMENKPAAAPAMPGGMGGMGGMDF

SEQ ID NO: 50797 - protein, 396 aa, Bordetella pertussis
MAKGKFERTKPHVNVGTIGHVDHGKTTLTAAITTVLSNKFGGEARGYDQIDAAPEEKARGITINTSHVEYETETRHYAHVDCPGHADYVKNMITGAAQMDGAILVVSAADGPMPQTREHILLSRQVGVPYIIVFLNKADMVDDAELLELVEMEVRELLSKYDFPGDDTPIVKGSAKLALEGDKGELGEQAILSLAQALDTYIPTPERAVDGAFLMPVEDVFSISGRGTVVTGRIERGVVKVGEEIEIVGIKPTVKTTCTGVEMFRKLLDQGQAGDNVGILLRGTKREDVERGQVLAKPGSINPHTDFTAEVYILSKEEGGRHTPFFNGYRPQFYFRTTDVTGTIDLPADKEMVLPGDNVSMTVKLLAPIAMEEGLRFAIREGGRTVGAGVVAKIIK

SEQ ID NO: 50798 - protein, 177 aa, Bordetella pertussis
MSKRWYVVHVYSGMEKSVQKALNERIERAELQTSFGRILVPSEEVVEVKGGQKSITERRIFPGYVLVEMDLTDETWHLVKNTNRVTGFLGGSGNRPTPISEREVEKILNQMEEGVEKPRPKILFEVGEMVRVKEGPFADFNGNVEEVNYEKSKVRVSVTIFGRATPVELDFSQVEKT

SEQ ID NO: 50799 - protein, 143 aa, Bordetella pertussis
MAKKIVGFIKLQVPAGKANPSPPIGPALGQRGLNIMEFCKAFNAKTQGMELGLPIPVVITAFADKSFTFIMKTPPATVLIKKASGVQKGSAKPHTDKVGTLTRAQAEEIAKTKQPDLTAADLDAAVRTIAGSARSMGITVEGG

SEQ ID NO: 50800 - protein, 232 aa, Bordetella pertussis
MAKLSKRAAAIAQKIDRTKLYPVGEALNLVKETATAKFDESIDVAVQLGIDPKKSDQLVRGSVVLPAGTGKTVRVAVFAQGEKADAARAAGADIVGLDDLAEQIKAGQMDFDVVIASPDTMRVVGALGQVLGPRGLMPNPKVGTVTPDVATAVKNAKAGQIQYRTDKAGIIHATIGRASFGVEQLQNNLAALVDALQKARPAAAKGIYLRKLAVSSTMGGGARVEIASLSAN

SEQ ID NO: 50801 - protein, 1378 aa, Bordetella pertussis
MQPRVGVLMPYSYTEKKRIRKSFAKREDVQNVPFLLATQLQSYLTFLQADTATSDRVNEGLQAAFSSIFPIVSHNGMARLEFVSYALGEPVFDVKECQQRGLTYASPLRAKVRLVLLDREVSKPTIKEVKEQEVYMGEIPLMTGTGSFVINGTERVIVSQLHRSPGVFFEHDRGKTHSSGKLLFSARVIPYRGSWLDFEFDPKDVLFFRVDRRRKMPVTILLKAIGMTPESILAHFFDFDNFELKSEGGMMEFVAERWKGEMARFDIADRDGKVIVEKDKRINAKHLRDLAAGGIQRVSVPEDFLYGRVLAKNIVDPDTGEVVAHANDEITESVLNAMRAANVRDIQTLYTNDLDRGPYISQTLRADETADQMAARVAIYRMMRPGEPPTEEAVEALFQRLFYSEETYDLSRVGRMKVNSRLGRGDDSTGPMTLTNEDILETIKVLVELRNGRGQIDDIDHLGNRRVRCVGELAENQFRAGLVRVERAVKERLGQAETENLMPHDLINSKPISAAIKEFFGSSQLSQFMDQTNPLSEITHKRRVSALGPGGLTRERAGFEVRDVHPTHYGRVCPIETPEGPNIGLINSMALYARLNEYGFLETPYRKIIDGKVSDQIDYLSAIEESHYVIAQANAALDDEGRFVDDLVACREAGETMLTAPGNVHYMDVAPSQIVSVAASLIPFLEHDDANRALMGANMQRQAVPCLRPEKPLVGTGVERTVAVDSGTTVQALRGGVVDHVDADRVVIRVNDEENVAGEVGVDIYNLIKYTRSNQNTNINQRPIVARGDKVAKGDVLADGASTDLGELALGQNMLIAFMPWNGYNFEDSILISERVVADDRYTSIHIEELTVVARDTKLGPEEITRDISNLAETQLNRLDDSGIVYIGAEVSADDVLVGKVTPKGETQLTPEEKLLRAIFGEKASDVKDTSLRVPSGMTGTVIDVQVFTREGIVRDKRAQSIIDDELRRYRQDLNDQLRIVENDQFDRIEKMLVGKTVNGGPRKLAKGATLTKAYLADLDRWQWFDIRLADEQHAVVLEQAKESLEQKRHQFDLAFEEKRKKLTQGDELPPGVLKMIKVYLAVKRRLQPGDKMAGRHGNKGVVSRITPVEDMPHMADGTPADIVLNPLGVPSRMNVGQVLEVHLGWAAKGVGYRIADMLRDERTAQAKSVRGYLEKVYNTTGSSAHIDSLTDEEVLELANNLKKGVPFATPVFDGATEEEIGKMLELAYPDDVAARMRLTASRSQAWLYDGRTGEQFERPVTIGYMHYLKLHHLVDDKMHARSTGPYSLVTQQPLGGKAQFGGQRFGEMEVWALEAYGASYTLQEMLTVKSDDITGRTKVYENIVKGDHVIDAGMPESFNVLVKEIRSLALDMDLERN

SEQ ID NO: 50802 - protein, 279 aa, Bordetella pertussis
YIGRFAPSPSGPLHAGSLVAALASWLDARAHHGLWRLRIEDVDTPRTVPGAAGVIMDQLRALHLHWDGEIMWQSRRGAAYQQAFDALAARGLIYGCGCTRREIADSALRGTAGVDGERPYPGRAWRVRVPPGVETFVDRWLGPQQQDVAAAVGDFALRRADGLWAYQLAVVVDDADQGVTDVVRGADLLGSTARQRVLGRLLGLAPPRVMHVPLIVDPATGLKLSKQNGAPALDCSQPLRMLQQAWSGLGFAPLAAATPEAFLQAATAQWAQRFGMRHA

SEQ ID NO: 50803 - protein, 875 aa, Bordetella pertussis
MNKTLIIAEKPSVALDISRALGGFAREGDYFESDRYVLASSIGHLLSLVAPNDPVKGKWSFTHLPVIPPAFELGPTDKKSAERLKLLVRLAKRKDVDAIINACDAGREGELIFRYIVQFAGVKKPIQRLWLQSMTQQAIRDAFANLRDDEQLKPLEAAARSRAEADWLVGINGTRAMTAFNSKDGGFFKTPVGRVQTPTLAIVNERENRIRSFVSRDYWEVHATFVAAAGLYEGRWIDPAFRKDERDPEKRESRLWSLAAAQSVVAACRAQSGSVTEESKPSTQMSPALYDLTSLQREANGRFGFSAKTTLALAQTLYERHKALTYPRTDSRYLPEDYINTVRQTMQVLAQGDSNAVGALSRHADTVLAQNWVKPNRRIFDNKKVSDHFAIIPTLQVPRDLSEAEGKLYDLVLKRFLAVFFPAAEYRVTTRLTEVQGHRFKTEGKVLVTPGWLAVYGKEAQGEDANLVPVADGETVRAEDVEAVGLATKPPARYNEATLLSAMEGAGKLVDDEELREAMSERGLGTPATRAAIIEGLLNEAYLRRDGRDLVPTAKARQLMALLSGLDVSELTSPELTGEWEHKLKQIEQGALDRAAFMREIAQMTQVIVKRAKEYERDTVPGDYATLQTPCPKCGGVVKENYRRFACTQCDFSIGKHPGGRTFELPEVEELLAKREIGPLQGCISKMGRPFAAILRISGEYKLEFDFGQNDEEDNEAVDFSGHTPVGACPKCSARVFEHGMSYVCEKLVGLQKSCDFRSGKVILQQEISREQMEKLLTAGRTDLLDGFVSSRTNRKFKAFLVRQPDGKVGFEFEPRGDKPGRPGAAAKKAAGKTATKTAAKAPAKTAAKKAVKKAAPKKAATKTAAKKAAKKSAA

SEQ ID NO: 50804 - protein, 1151 aa, Bordetella pertussis
MPDLTPPAVPIPATATTLSALKPGARFTQPRPPGSGDGWLLADLARQAGKPLVVLTADPLEAQRLADEIPQFAPELRVRQLPDWETLPYDAFSPHQDLISQRLRTLHALMNQGVDILTVPVTTALYRLAPPAFLAAYTFSFKQKDRLDEAALRAQLTLANYSHVTQVTAPGEFCLRGGLIDLFPMGSVVPYRLDLFDDEIESIRSFDVDTQRSLYPVGEVQLLPGREFPMDEEARNRFRARFREVFEGDPSRALPYKDIGNGIAFAGIEYYLPLFFEQTATLFDYLAADTITVTVGDIDDAMQRFAHDTRSRYDFLKVDRERPVLPPDTLFLDHEALFARLKDFPRLALMAERPHPDFAAAPDVAVARRADDPVARLRALLAQTGDRVLLCADSAGRRETLAQMLGEHGLAPEAQADSIQAFLDDGARFGLAVAPLSAGFCVPGGALLFLTENDLYPGHAGVTRRGKRTQERTSNVEAMVRDLAELRAGDPVVHAQHGIGRYHGLVNMDMGEGEMEFLHLEYASGSTLYVPVSQLHVIARYSGADPDAAPLHQLGSGQWDKARRKAARQVRDTAAELLALYAQRAAREGYAFKLPMSDYEAFAEGFGFEETPDQAAAIQAVIMDMTSGRPMDRLVCGDVGFGKTEVALRAAFLAVANGKQVALLCPTTLLAEQHAQTFSDRFADWPVRVVELSRFRSAKEVAAAVEGINDGRVDIVIGTHKILSKDVRFKRLGLVIIDEEHRFGVRQKETLKALRAEVDVLTLTATPIPRTLGMSLEGIRDFSVIATAPQKRLAIKTFVRREDGSTIREALLRELKRGGQVYFLHNEVETIHNRRARLEELVPEARIAVAHGQMPERELEQVMKGFYQQRHNVLLCTTIIETGIDIPTANTIVIHRADRFGLAQLHQLRGRVGRSHHQAYAYLLTPGEDAITNNAKKRLEAIQAMEELGSGFYLAMHDLEIRGTGEILGDSQSGNIQEVGFSMYNEMLNEAVRALKAGEEPDLDAPFNLACEVNLHAPALLPSDYCPDVHGRLAIYKRLSHADGEDDLIRIQEELIDRFGKLPEAAQTLLATHRLRLAAQPLGIVKIDASETQALLQFGAKTTVDPLRIIELVQRQRHIKLSGQDKLRVEIKAPQIAARADAVRAVLRALK

SEQ ID NO: 50805 - protein, 384 aa, Bordetella pertussis
  MISC_FEATURE (221)..(221): X=any amino acid
  MISC_FEATURE (383)..(383): X=any amino acid
IVPAAGIGARASLPGEAAVPKQYRPLAGQPMLRHAVRALLADPRIVQVRVAVSAGDGWVEQALAGLPRTVWRPCGGPNRADTVAAALADSGAAADDWILVHDAARPGLPAAALARLIDACLDDAVGGLLALPVADTVKAGRQRVSRTVDRDGLWLAQTPQMFRAGLLRDALARARAAGLAVTDEASAVEAAGHAPRLVAGALRNFKVTWPDDFELMEKWLXISRFRVGQGFDVHALVEGRPLIIGGVTIAHTHGLLGHSDADVLLHAVTDALLGGAGLGDIGRHFPDTDPAYRGADSRVLLRAAFDKVRAAGWAPVNVDATIHAQAPKIGPHAAAMVANIAADLALDAGAVNIKAKTNEGLGYLGRKEGIAANVVVLLARAGXV

SEQ ID NO: 50806 - protein, 306 aa, Bordetella pertussis
MIVRPRPTAWGLLFILRGSVIPHIAAKVAVIVALSCVVAWLHARQWFAPGHLNAVPFSLFGLALSVFLGFRNNVCYDRWWEARKQWAELSAQCRSLARETAAVLSGAADAPRQARIVRRLIGFNHALVARLRGGDPLTAARPWLPDAESMALAGHRNVPDAILRAVTGDLHEGGPQRRYGEVVYQGLQQRVLACAQVQAACERIKTTPTPFAYSLLLHRTAWLFCLLLPFGLVGTLGPLTPLAVAFVAYTFFGLDALGDELEEPFGLAENDLPLAALARDLEIDLLEGLGAHPLPAPLLPRGYVLT

SEQ ID NO: 50807 - protein, 902 aa, Bordetella pertussis
MRTDTPVTVYRKDYQPYPYTIADVALEFDLDPASTTVRCLMQVARKADARDDAPLVLDGEALELVSIRVDGRDWARDGYVLDDATLTLRGLPPSAAVEIVSRCRPAANSTLMGLYVSGGNFFTQCEAEGFRRIAWFADRPDVMSRYRVTLRAAPDYPVLLSNGNLLATATLPDGRLQAEWEDPFPKPSYLFALVAGRLTHREERVRTQSGRDVLLQVYSDPGSENRTEWALESLRHALRWDESRFGLELDLDRFMVVAVRDFNMGAMENKGLNIFNAAYVLADPATATDANYEGIESVIGHEYFHNWTGNRVTCRDWFQLSLKEGLTVFRDQEFSADMMARGLDEQAAASARAVKRIDDVVTLRAAQFPEDAGPMAHPIRPDSYQEIGNFYTATVYEKGAEVIRMQHTLLGEPGFRAGMDEYFRRHDGQAVTCDDFVAAMESVYAARNPGRDLSVFRRWYSQAGTPRVSVKLDHDAQSGRCTVTLTQRCAPVGVEKRAGRDFAKQAFHIPFAIGLLDAQGRALPLHLNGQPARDTVLLELTEARASWTFEQVPDMPVPSLLRGFSAPVIVEYDWSDADLALLSAHDTDPFARWEAGQELATREILALTASHQAGQPLAVRPAFIAAWRALLTDPTLDAAYRARALALPSEKTLAERMEQIDPPALAVARDFLRAEVGRQLAAPWRAAFDANQTPGAYSPAAGPAGRRALKNQALSHLMAAESADAQALAQAQYDQADNMTDSMAALSALVNFGAPDSAAAALAAFYERWRDDPLVVDKWFTLQATARSTDIDAVRALMAHPAFTLRNPNRARALVFQFCLNNARGMHRADGRGYDFWAEQVLALDALNPEIAARLARGLDNWARFAEPLRGAMQAALAHVRAHAGLSRNVQEIVSKALDLAA

SEQ ID NO: 50808 - protein, 355 aa, Bordetella pertussis
MIFRRSRPGTIGAVTLLCASLLAMPASSACTRFVYHGANDEVITARSMDWKVDVGTNLWAFPRGMQRSGQAGPNSIQWTSKHGSVIASGYDISTTDGMNEAGLVANVLWLAESSYPEYDGKTPGLTLAAWAQYVLDNFASVREAVDTLASEPFTVVTDNVPGEQRPATLHLSLSDASGDSAIIEYIDGKQVIHHNRAYQVMTNSPTFDKQLALNEYWKQIGGTVMLPGTNRASDRYARAYFYVNAIPKSEDPVEAIASVFSVIRNVSVPYGITTPDQPNISSTRWRTVADHKRKRYFFESALTPNIFWIDLGALDFSAESGKVMKLDLGPDQAHIYSGQANAHFEQAAPFKFLGL

SEQ ID NO: 50809 - protein, 565 aa, Bordetella pertussis
MVASITAPRRWSMNWIAGRYTTFALMLIGAALTSALAVHSSRAWLWAAVPFVLLSLLGVYDLLQTRHAIRRNYPVLGNLRFLFELIRPEIRQYFLEDDTHASPFSRAQRSIVYQRAKQDIDKRPFGTQEDVYGDRYEWINHSMTPAHVADADFRVTVGGPECRQPYSMSAFNISAMSFGALSANAVLALNEGARIGDFAHDTGEGGISRYHRERGGSLVWNIGSGYFGCRDAHGAFSEEAFVKNACTPQVKMIEIKLSQGAKPGHGGILPAGKVTPEIAEARGVPAWQDCNSPSSHSAFDSPVGLLHFVARLRELSGGKPVGFKFCVGHPWEWFAIVKAMLQTNITPDFIVVDGAEGGTGAAPVEFVDHVGTPLREALRLVHNTLIGVNLRDRIKLGASGKIITAFDMARAMAMGADWCNAARGFMFAIGCIQAQACHTGKCPTGVTTQDPLRQRALVVPDKAQRVANFHGNTLHALAELLGAAGLTHPGQLRPHHIARRISSSEVRLLSALFPELAPGELLRGEFRHHVFQVGWGMAQADSFQPAMDISAALAALRPAGAPAHA

SEQ ID NO: 50810 - protein, 220 aa, Bordetella pertussis
MADDAIKASAAARAVPAAPLTARAIGRIKPLLFVAGLLPFARWFWLGANDGLSANPVEFLTRSSGTWTLVCLLVTLAITPLRRLTGQPALVRLRRMCGLFAFFYGSLHFLAWVWWDRGLDPVSMLQDVGERPFITVGFAAFVLMAALAATSTQWAMRKLGKRWQTLHRAVYAIGLLAILHFWWHKAGKNDLQQPLLYGSVLALLLGWRVAAWWRRRGAAR

SEQ ID NO: 50811 - protein, 484 aa, Bordetella pertussis
MSRRIGIIDTTLRDAQQCLWATRMTAGMMDPIAQALDEAGFDMIDFMAPVQFDVCVRYLREDPFEKARHFRKRFRNTPMRSYCRSKSLVGFSMVPDDMVELWIDCLAANGFSAVGTLDSLLDVDNMKVSVRRAKKIGIKSIGALVFCESPLHTDALYAGTAAELVRCGVDGIMLKDSGALLTIERIRTLIPALRAAVGDIPIEVHSHSNTGLVQRVYLDAADLGIDQLHTSIAPLAGGVAQPSIQNMTRNLAQRGYRTDVDMARVEEISAYLHRLAARYDFPLGKPMEYDEFHYRHQMPGGMTENWRFQLRQAGLENRFEEILEEIGRVREDLAWPIMVTPFSQIIGVQAMLNVVNGERYRAVPDEVKMYALGHFGRLLGPVEPNALDRIVANGSPDVGLTPQPKDPALPGLRKANPGMTDEELLLRYMFPADDVEATLGCKPLKLTVPAGGPIVRLIEEILPRAGIRHFELRSQSEHISFTRP

SEQ ID NO: 50812 - protein, 387 aa, Bordetella pertussis
MTQNLSTITCIEDLRVIAQKRVPRMFYDYADSGAWTESTYRANESDFQRIKLRQRVAVDMEGRSLRTTMAGSDAVMPVAIAPTGLTGMQHADGEILAARAAAEFGVPFTLSTMSICSIEDVAQGSGKPFWFQLYVMRDREFVGNLIDRAKAAGCSALVLTLDLQILGQRHKDIKNGLSAPPRPTLRNLIDLAFKPRWCLGMLGTRRRTFGNIVGHAKGVTDLSSLSSWTAEQFDPRLSWDDVEWIKRRWGGKLILKGILDAEDARLAAESGADALIVSNHGGRQLDGAVSSISALPAIAEAVGSRIEVWMDGGIRSGQDVLKAVALGARGTMIGRAFLYGLGAYGQAGVTRALGILYKEMDVTMALCGHKHINQIDRGILMPGTYPQ

SEQ ID NO: 50813 - protein, 611 aa, Bordetella pertussis
MSDQQNTTPENTGYGADSIKMLKGLEAVRKRPGMYIGDTSDGTGLHHMVFEVVDNAIDEALAGHCDDIVVTIHTDNSISVTDNGRGIPTDIHKDDEFGRSAAEIVMTELHAGGKFDQNSYKVSGGLHGVGVSCVNALSEWLRLTIRRNGQVHQMEFRQGQRVAPLTATGPTDKRGTEVRFLADPAIFTNIEYHYEILSKRLRELSFLNNGVKVRLVDQRQGKEENFAFSGGVKGFVEYINRSKSVLHLNVFAVSAESSAGGVLVGVEVAMQWNDSYSESVLCFTNNIPQRDGGTHLTGLRAAMTRVLNKYIADNELAKKAKVETTGDDMREGLACVLSVKVPEPKFSSQTKDKLVSSEVRPAVEDAVARTLETWLLEHPNDAKALCGKIVEAARAREAARKAREMTRRKSVLEGAGLPGKLADCQEKDPALCELYIVEGDSAGGSAKQGRDRKFQAILPLRGKVLNVEKARFDRLIASEQIATLITALGTSIGPDFNIDKLRYHRLIIMTDADVDGAHIRTLLLTLLYRQMPELVARGHVYIAQPPLYKVKVGRDERYLKDDQEEAQFMLQLALKDAELIPSQGAAPIRGEALNELAASTCWPTRSFPACR

SEQ ID NO: 50814 - protein, 371 aa, Bordetella pertussis
MTMQLVQTTRDALLKPLSTVAGIVERRHTLPILANILMRKEGNKVAFIATDLEVQITTHADFGVGPENESTTVAARKLLDILKALPDTGEVKLGLASNKLSVQSAKSRFALQTLAASEFPTVAQPEQWDVSLSMPQRMLRHLFNMVHFAMAQQDIRYYLNGMLLVFEPGRVRAVATDGHRLAHCATEADGIAERHEVIVPRKTVLEMQRLLEDSDEPVALDVAPGQIRFRFGDVELVSKLVEGKFPDFTRVIPTNYTRQFSVSREALQGSLQRAAILTTDKFKGVRLQLAQHQMKISSSNAEQEEAQEEIDIDYSFEPLDVGFNVSYLLDVLSNIKAENVQWSVMPDANASALITLPDDEQFKYVVMPMRI

SEQ ID NO: 50815 - protein, 90 aa, Bordetella pertussis
MNKTELIDHIASKADISKAAAGRSLDALIGAVKTTLKKGGTVTLVGFGTFAVSARAARTGRNPRTGETIKIKKAKVPKFRPGKALKDAVN

SEQ ID NO: 50816 - protein, 636 aa, Bordetella pertussis
MTHTAAGAPRDAKTAIHAPSSRMALMLGALGVVYGDIGTSPLYTLRACLNTIDDLQPAHVLGVLSILFWLLMIVVSLKYVTLVLRADNRGEGGTLALLELAVRGREGRARWLLIVLGIFGAALFYGDSMITPAISVLSALEGISIVSHTLEPWVVPVALVVLVALFAIQSHGTGAVGKLFGPIMALWFATLAVLGGYQIWLTPEVLAALNPVWALRFIAEFPVMSFLLLGAVVLALTGAEALYADMGHFGRPAIRRAWFAMVLPALTLCYFGQGALLLRDPAAIRNPFFLMAPEWGLAALVGLATVATVVASQAVISGAFSVTRQAVQLGFWPRMQILHTSAVEKGQIYLPQVNALLLCAVLVLVLLFRNSENLAAAYGFAVTGTMLTTSVLAFAVLPRDSTGGKRVLWMVLLGALLVIDILLFGANIFKIHEGGWLPLLVGVVVFTLMMTWRRGRRLLADMQARDRQPLREFMTQLEAFPPARVQGTAIFMTMNAGNVPPALLHNLKHNKVLHDHVLFLSIRVADVPYVSEDERFEMHKISASSWQASINYGFKEDPDVPDALRQVAEAYPEIDLEPMRTSFYLSRQTVVAARRPAMARWRRALFAFMARNSTRSTRFFKIPPNRVVEMGMQVEL

SEQ ID NO: 50817 - protein, 456 aa, Bordetella pertussis
MKLKKVLIANRGEIALRIIRACREMDIRTVQVYSSADEDSLPVRLADEAAPIGGPEPSASYLNIAALIAAAREHGCDAIHPGYGFLSENEDFAQACIDAGIVFIGPDPGAIRMMGDKAQARKIAKEAGVPIVPGSPEPVSDVEEAIRVAREVGYPLLVKAAAGGGGRGMRVIQGEAQLREGLERASMEAKSAFGDGSVYIERYISPVRHVEIQVFGDGEDVIHLGERECSIQRRHQKLLEESPSPVLSDETRQRMGEAACALARAVKYRGAGTLEFVMDGKSGEFFFIEMNTRIQVEHPVTETVTGVDLVRLQLAVAAGGRLGLRQQDIVMKGHAIECRINAEDPQKAFMPSPGTVNDIRLPSGPGVRMDSHVYRGYKLPPYYDSLLGKLIVWDESREKAIARMLRALGELEIVGVKTTKEFHERLMRDEDFIAGNVSTQFVKEKLYADHPMCHLL

SEQ ID NO: 50818 - protein, 305 aa, Bordetella pertussis
MGHGVIIRENVLQECQIFHPVRFVNTREGFMAQVPVLKLNDGNAMPQLGLGVWQVPNDQAAASVKAALAAGYRSIDTAAIYGNEAGVGEGLRAAGVARKDLFVTTKLWNDRHGYDEAQRAMDESLRKLGLAYVDLFLIHWPVAGSDKFVDAWRAMVAMKEDGRARSIGVSNFTIANLRRLVDETGVVPAVNQVELHPGFAQRELRAFHAEQGIATESWSPLGQGAVMHDATLAGIAARHGKSAAQVTLRWHLQNGLIVIPKSVTPARIQANIDVFDFELSADEMADIDALPEGPRLGPDPATFTG

SEQ ID NO: 50819 - protein, 313 aa, Bordetella pertussis
MTPPTTQNGPLRHFLQFKDFSPAEIAYVLERTRIIKDKFKRYEPHMPLHDRTLAMVFEKASTRTRVSFEAGMYQMGGSVINLTSNDSQLGRSEPIEDTARVISRMVDIVMIRTFEQTRIERFASHSRVPVINGLTNEYHPCQILADIFTYIEHRGPIAGKTVAWIGDANNMSYTWLQAAEMLGFTLHVSTPAGYELDPARIGAPAAGVLKQFKDPMQACQGAHLVTTDVWTSMGYEAENEERRAAFADWCVDAEMMAAADPQAVFMHCLPAHRGEEVTGEVIDGAQSVVWDEAENRLHVQKALMEFLLLGQLA

SEQ ID NO: 50820 - protein, 329 aa, Bordetella pertussis
MQKSAARGLGHIRIKHLRLLELVVQYGSLRKAAEGLHLSEPAASQMLREVESTFGVTLFERGRRGMRPNPFADVLVGRVWVILRELHEMQADVAELEHRQGVSSDLGALPRCLHTLVPTTLVRLFGAGFRSRVRIAEGTSRQLLDALDQGAIDIAVTRLLESHAGLAGARNFDSAVLYEEAIAIVCSTDHPLSAVDTVTLDMLTQYDWVLPPSTSITGKLIEEEFVSAGLRPPVPKVEWLTSASRLTLVQKSNFLGICPASVAAELQQGGRLHVLPVNPRVPLPPISVVWRRTKGDIAEIMDMKNALIECAAAMPGAMETGAAVRAGEF

SEQ ID NO: 50821 - protein, 393 aa, Bordetella pertussis
MLLPIILLSAAGFTILTTEFLIVGLLPPLARDLQVTVSQAGLLVSLFAFTVAAAGPVLTALLANLERKRLFVWVLVLFGLANALAAVSPNIWVMAFARFVPALALPVFWSLASATAVELVGPAYAGRAISIIGFGIVAATVLGIPIGVLVSDAFGWRAAFAVLTAVAWAKALLLAYFPKPRTGRQNQRLSTQLRILRDPRLLGHVMLSLLVFTGMFTAYTYLADMLEHLAGFDGKVVGWTMMAFGGAGILGNWLGGRLVDRSPLGATILFSLIMTAGLLFVAQVMQAPYWLALALALWGVAQAALLTVCHVRVIKAAPQAPAFAASLNISGANIGIGLGAAVGGHFIDSRGLASLGTVAAVIVLAAVGLAIALVLSRRPSTPRPAAPAPGIEP

SEQ ID NO: 50822 - protein, 893 aa, Bordetella pertussis
MDSFAKETLPVSLEEEMRRSYLDYAMSVIVGRALPDVRDGLKPVHRRVLYAMHELNNDWNRAYKKSARIVGDVIGKYHPHGDQSVYDTIVRMAQDFSMRYMLVDGQGNFGSIDGDNAAAMRYTEIRLAKIAHELLADIDQETVDFGPNYDGSEQEPLLLPSRLPNLLVNGSSGIAVGMATNIPPHNLQEVVDGCLYCLRNPECSIDELIELIPAPDFPTGGVIYGITGVREGYRTGRGRVIMRAKTHFEDMEKGNRQAIVVDAIPYQVNKKTLQERIAELVNDKKIEGISDIRDESDKDGMRLVIELKRGEVPEVVLNNLYKNTQLQDTFGMNLVALVDGQPRLLNLKQLIEYFLQHRREVVTRRTVFQLRKARERGHVLEGLAVALANIDDFIAIIKAAPTPPVARQELMARSWDSSLVREMLARVDGDAAGGVAAFRPDDLAPEYGLQGDGNYRLSETQAQEILNMRLQRLTGLEQDKIIGEYKDVMATIADLLDILARPDRITTIISEELQAIKAEFSTSAKDTRRAEIEVNATELDTEDLITPMDMVVTLSHGGYIKSQPLSEYRSQKRGGRGKQATAMKENDWVDQLFIANTHDYLLCFSNRGRVYWLKVWEVPQGTRNSRGKPIVNMFPLADGEKVTVVLPVKEFSEDHYVFMATSRGTVKKTPLSDFSNPRKAGIIAVDLDDGDYLIGADLTDGKHDVMLFSDAGKAVRFDENDVRPMGRNARGVRGMMLEEGQTVIALLVAGDETQSVLTATENGYGKRTPITEYTRHGRGTKGMIAIQTSSRNGRVVGAVLVMPSDEIMLITTGGVLVRTRVAEIREMGRATQGVTLISVDDGSSLSGVRRVVESDADADDEDGGEEGGEEGGDQGGDDTGAQGKDSEPTEPTE

SEQ ID NO: 50823 - protein, 349 aa, Bordetella pertussis
MNLIKASFSSWLAVFQSVSRASRAHVVDTDRIVAMSSNPVSASCAPVLQVHGLTKRYGERVIVDGLSFALRRGECYGLLGPNGAGKTTTLRALLGLTPFDDGAVEVLGHAVPAQARQARARLGVVPQLDNLDPDFTVAENLLVFGRYFGLSDAQVRARLPQLLAFAALAAKADARIGELSGGMKRRLTLARALINDPDLIIMDEPTTGLDPQARHLIWERLKALLARGKTILLTTHFMDEAERLCHRLGVIDHGRLITEGAPRALIERCLEPQVVEVYGDDLHAWLAAHRAALPARVEVSGETAFCHTDDATPVVQALQGWPDLRYLHRPANLEDLFLRLTGRGMREDA

SEQ ID NO: 50824 - protein, 223 aa, Bordetella pertussis
MAIFASAGAAPVITIDGPTASGKGTIAHRVAKQLGWDVLDSGALYRLTALAALRRGLPATDEPAVAAVAQALDVRFDGPHVYLEGRDAGHEIRQEEVGNYASRIAAYPGVRQALLERQRAFRQPPGLVADGRDMGAVVFPDASLKIFLVADVEARAQRRCKQLIEKGISANLDDLLRDMRERDARDTQRAVAPLAPAADAHVLDSSGLTIEQTVQAVLDFWCA

SEQ ID NO: 50825 - protein, 576 aa, Bordetella pertussis
MDSNLMSSVSTSAILGGENFADLFAESLKSQDMKSGEVISAEVVRVDHNFVVVNAGLKSEALIPLEEFLNDQGELEVQPGDFVSVAIDSLENGYGDTILSRDRAKRLSAWLQLEQALENGELVTGTITGKVKGGLTVMTNGIRAFLPGSLVDLRPVKDTTPYEGKTLEFKVIKLDRKRNNVVLSRRQVLEASMGEERQKLLETLHEGAVVKGVVKNITDYGAFVDLGGIDGLLHITDMAWRRVRHPSEVLQVGQEVEAKVLKFDQEKSRVSLGVKQLGEDPWVGLARRYPQGTRLFGKVTNLTDYGAFVEVEAGIEGLVHVSEMDWTNKNVDPRKVVTLGEEVEVMVLEIDEDRRRISLGMKQCRQNPWEEFATNFKRGDKVRGAIKSITDFGVFVGLPGGIDGLVHLSDLSWTESGEEAVRNFKKGDELEAVVLGIDTEKERISLGIKQLEGDPFNNFVATHDKGAVVPGTIKSVEPKGAVITLSVDVEGYLRASEISSGRVEDATTVLKAGENIEAMIVNIDRKARSIQLSIKARDNAETAETIQRMSEASASSGTTNLGALLKAKLDQQRNDG

SEQ ID NO: 50826 - protein, 375 aa, Bordetella pertussis
MPRPIFASISQSALRHNLATVRRHLDDVAAKADGTPPSIWAVIKANAYGHGIEQAVAGFSAAQGLAMLDLQEAVRCREAGWGGPILLLEGFFQPSDLEIVDRYHLATTVHTREQFDMLAHARLSRRVDIMVKLNSGMNRLGFAPDAYGSAYARAQQLHEYGVVGGIGKMTHFACADGPQGVTQQMNVFNGATAHLAGATSVCNSAATLRYADLAVGHDGQTHWVRPGICLYGASPFADAQAGAFGLIPAMTLRSELIAIQDIPAGAAVGYGAIFRADRPMRIGVVACGYADGYPRHAGTGTPLTVGGVRTRLVGRVSMDMLMVDLDPVPAAGIGTPVVLWGEDGPSVDEVAEAAGTIGYELLCALAPRVPVRHEG

SEQ ID NO: 50827 - protein, 313 aa, Bordetella pertussis
MNQYPAERIARARVLVVGDVMLDRYWFGEVDRISPEAPVPVVRVARREDRLGGAANVARNVAALGAQVTLIGVVGADEVGLRIERMAAEEGVRTDLVSDTEHPTTLKMRVLGRQQQLLRVDFEQHPEPAALDGISAAVARQLAQHDIVVLSDYAKGVLDRVESIIAAAVGHSLPVLVDPKGDHYERYRGATLVTPNRAEMREAVGRWKTEDELAERAQRLRLDLDLEALLVTRSEQGMTLFTDAGRDHADAAAHEVYDVSGAGDTVLATLAVMRAVGLSWGDAMRWANRAGGIVVGKLGTSVVTAAELAGEST

SEQ ID NO: 50828 - protein, 303 aa, Bordetella pertussis
MSTPTYPTIEQTVGNTPLVRLQRIPGAAGQARGNVILAKLEGNNPAGSVKDRPALSMILRAEERGEIHPGDTLIEATSGNTGIALAMTAAMRGYRMVLIMPDNLSLERRAAMTAYGAELILTPAAKGGMEYARDLATAMQAEGKGKVLDQFGNPDNPRAHIEGTGPEIWNQTDGRVTHFVSAMGTTGTIMGVSTYLKSRNAAVQVVGAQPAEGSQIPGIRKWPEAYMPKIFDRALVDAYESIAQAEGETMARRLAAEEGIFAGISSAGALVAALRVAERVENATIVFIVCDRGDRYLSTGVFN

SEQ ID NO: 50829 - protein, 381 aa, Bordetella pertussis
MFNCRRFLQIGTLSALLAGCATSSQTPQAQHLPAQAATGQADRVRIGPDKPVSSDEGPATLTPTGELRPDVRAFAEQLAAQRELPLPQVLASLESTRYNATVARLIAPSGASGKKIWRSWLTYRGRFVEPKRIAWGVEFWNANQDLLNRAAQRYGVPASIIASIIGVETLYGRNVGNFRVVDALATLAFDYLDPAKPERADMFRGQLGDFITLALQDKLDPETRGSYAGAIGMPQFMPGSIMRYAVDGDDDGHIDLTNSVADAVMSVGNFLVEHGWQRGLPVFAPVALPADPAPLVAGGLTPTLDWNGLQAAGARPAAGAGRGAWQEHPMGIVDLVEEARGTVQYRTATPNFFALTQYNRSYFYATAVADLAAELQARTGY

SEQ ID NO: 50830 - protein, 453 aa, Bordetella pertussis
MAKSRTIYVCAECGGTSLKWQGKCPHCSAWNTLEETVESAAPSAGGHRYAPLAAASPVRSLSEIEARETPRQPTGLDEFDRVLGGGLVAGAVVLIGGDPGIGKSTLLLQALASLSATTKVLYVTGEESAEQVALRARRLGLQTGNVDLLAEIRLEAIQAAVSEQKPTVAVIDSIQTLYSGELTAAPGSVSQVRECAAQLTRLAKQTGIAIVMIGHVTKDGALAGPRVLEHIVDTVLYFEGDTHSSFRLVRAFKNRFGAVNELGVFAMTDRGLRGVANPSALFLSQHQQQVAGSCVLATQEGTRPLLVEVQALVDTSHAPNPRRLTVGLEGNRLAMLLAVMHRHAGVSTYDQDVFVNAVGGVRITEPAADLPVLLAIMSSLRDKPLPAGLVAFGEIGLAGEIRPAPRGQERLREAAKLGFSVALIPKANAPRQPIEGLEIWAVDRLDAALDKLR

SEQ ID NO: 50831 - protein, 125 aa, Bordetella pertussis
MDTLPDGASWLPPRKTRGRAPGCLPGLAGDPLTWEIIMKEGIHPEYREVVFMDVQTGNKFVTRSTIHTRETVEIDGKTYPLFKCDVTSESHPFYTGAQTRIVETGRVEKFRARFARTAGTVKSAS

SEQ ID NO: 50832 - protein, 225 aa, Bordetella pertussis
MSLPEPLLRADWPRERLLRHGAATLSDPELLALALRTGVAGCNAVQLGHDLLRRFGGLRGLLGTSPAELQVVPGLGTAKACVLAAVLELARRTLEEDLVRQDALANPDLVRRYCQAALGHRKVEHCIALYLDARLKLIICAEVARGTLTQAQIYPREIVREALRHHAAALILTHNHPGGTAAASAADIAMTRQIRQALALIDVRLIDHVIVAGAATVSMAAQGHL

SEQ ID NO: 50833 - protein, 126 aa, Bordetella pertussis
MNLIAILEQEEIARLTGGNAVTEFAPGDTVVVSVNVVEGTRKRVQAFEGVVIAKRNRGLNSSFIVRKISSGEAVERTFQLYSPQIAGIEVKRRGDVRRAKLYYLRSRSGKSARIKEKLVLKKAKSA

SEQ ID NO: 50834 - protein, 241 aa, Bordetella pertussis
MSDSAPSRPRRTPVRPLFDPMAQPWETANQGLARVDERLLTPPELRSSLRPADHWRLDPLCAAEPRAPGREGSLVAAAVLIPLVMRADGVRVMLTQRAAHLHDHAGQVSFPGGRIEVSDATPVAAALREAQEETGLPVQQVEVLGSMPQYFTATGFAITPVVSLVQPDFELAPDAFEVAEVFEVPLSFLMDPANHRLYRAALPDGYVRQYYAMPWQRYFIWGATAGMLRNLYQTVREALPG

SEQ ID NO: 50835 - protein, 492 aa, Bordetella pertussis
MSREILLLVDALAREKNVTREVVFGALESALASAMKKRFKDDADIRVSIDRETGGHEGFRRWLVVPDEAGLQEPDKQELLSEAREMAPDIEVGEYIEEALEPVEFGRIGAQAAKQAILQKIRDAEREQVLNDFLDRGETIISGSIKRMDKGDVIIETGKIEARLPRSEMIPKENLRVGDRVRAFVLRVDHAARGQQVILSRTSPEFIRQLFENEVPEIEQGLLEIKAAARDPGVRAKIAVVAYDKRIDPIGTCVGMRGSRVTAVRNELGGEQVDIVLWSEDPAQFVIGALAPANVESIVVDEDKHAMDVVVDEENLPKAIGAKGQNVRLASELTGWQINIMTPEESLNRQETERAALRATFMSKLDVDEEVADILIDEGFTGIEEIAYVPMQELLEIEAFDEDTINELRARARNALLTEAIAQEERLETAQDLLELEGITPELAAKLAERQVHTRDDLAELSTDELAEIAGLQEEEASDLIMRARAHWFDEE

SEQ ID NO: 50836 - protein, 876 aa, Bordetella pertussis
RRRPRRPNRCAPSRAVETAAKPVEPPVAEAPAEPVAAPAAEPQPEQPAQAEAQPEPTPAAQAEPEPQPEPQPEAAPAQAVAEPVEPAKNVSVTETEAEQARPEPVVHAQTELTSQTPTPVAQPSAPAESPKSVKAEPAAAPKTTAKPGEIRRAAAPAAPDRAREEARRAAEAEAAALREDAQPSAQGAARARARAAGRRPVGHAAQAGRQAGHHGRAQEGRQAGRAGCQKTIKTAEVSSTWSDDSARKKPADNKPAVATRDGWRAGGKGGRGGRNSRNQHQDRRHEQVQQEFIAREIHVPETISVADLAHKMSVKAAEVIKQLMKLGQMVTINQVLDQETAMIVVQEFGHTAIAAKLDDPEAFLDETAAVTEAEAEPRAPVVTVMGHVDHGKTSLLDYIRRAKVASGEAGGITQHIGAYHVETGRGVVTFLDTPGHEAFTAMRARGAKATDIVILVVAADDGVMPQTREAIHHAKAGGVPLVVAVNKIDKPEANPERVKQELVAEEVVPEEYGGDVPFVPVSAKTGAGIDDLLENVLLQAEILELKAPIEAPAKGLVIEARLDKGRGPVATILVQSGTLKRGDVVLAGASFGRVRAMLDENGKQIQTAGPSIPVEIQGLTEVPAAGDELMVLSDERKAREIALFRQGKFRDVKLARQQAANLESMFDNLGEGTQTLALIVKTDVQGSQEALVSSLTKLSTDEVRVQVVHAAVGGISESDVNLAIASNAVVIGFNVRAEQSAKKLAETNGIDLRYYNIIYDAVDEVKAAMSGMLAPEKREEVIGLVEVREVYTISRIGTVAGCMVLDGVVRRDSQVRLLRNNVVQWTGHLDSLRRFKDDVKEVKSGFDCGLTLRGNNDLQLGDQLEVFEIKEIARTL

SEQ ID NO: 50837 - protein, 244 aa, Bordetella pertussis
MAKRRGLALDGVLLLDKPVGLSSNHALQRAKRTVDAAKAGHTGTLDPFATGLLVCCMGRATKISGRMLEADKTYQATLQFGEETDSGDLTGHIVARAPDGFAGVEEAALRDVLSRFVGTIEQIPPMYSALKRDGKPLYEYARAGIELDRPPRQVTIRHIELLSFSGMQAQIDVACSKGTYIRTLAQDIGRALGCHAHLAALRRTHVGPFSLDRAVTLEALQAMPDAKQALLAMNELPAGLLPAT

SEQ ID NO: 50838 - protein, 623 aa, Bordetella pertussis
MNCRRACCPPPELKGPAMTRALRNVAIIAHVDHGKTTLVDQLLRQSGTFRENQSVAERVMDSNDIEKERGITILAKNCAVEYEGTHINIVDTPGHADFGGEVERVLSMVDGVLLLVDAVEGPMPQTIFVTRKALALGLKPIVVVNKIDRPGARPDFVINATFELFDKLGATEEQLDFPVVYASGLSGYAGLTDDVRSGDMRPLFEAIMKYVPQRDDDANGPLQMQIISLDYNSYVGKIGVGRINRGRMRGNMDVAFRFGPDGEVQRGRINQVMKFSGLERVVVDEAEAGDIVLVNGIEDLHIGSTITDPSTPEGLPVLRIDEPTLTMNFMVNTSPLAGREGKFVTSRQIRDRLERELKSNVALRVRDTGDDTVFEVSGRGELHLTILLENMRREGYELAVSRPRVVFKEIDGVKCEPFEALTVDVEDAHQGGVMEELGRRKGDLQDMQPDGRGRTRLEYIIPARGLIGFQNEFLTLTRGTGLMSHIFHEYAPLREGSIGERRNGVLISQDNGDAVAYALWKLQDRGRMFVSPGEPLYEGMIIGIHSRDNDLVVNPIKGKQLTNVRASGTDEAVRLVPPIQMSLEYAVEFIDDDELVEITPKSIRLRKRYLQEHERRRASRENA

SEQ ID NO: 50839 - protein, 904 aa, Bordetella pertussis
MKKTLLLVDGSSYLYRAFHAMPDLRNAQGEPTGALYGVVNMLRKLVQDHKAEYAVCVFDARGKTFRDDLFPDYKSHRPPMPEDLAAQIEPIHEAVRALGWPLLAIEGVEADDIIGTLARQASAQGIDTIVSTGDKDLAQLVDPHVTLVNTMSGEVLDVAGVNSKFGVPPERIVDYLMLVGDTVDNVPGVNKVGPKTAVKWLAEHGSIDALVAAADSVKGVAGNNLREAIPNFPLTRTLLTVKCDCDLTGHVSDWEDLAWRERDAATLTALFDRYGFRTWLRELTGDQERLPTGDARAVPQAVAPAELDYRIITDWAAFDAWMALVEDAPLVALDTETTSLDEMQARLVGLSMAVKPGVACYIPVAHRGPEAGDQLPRDEVIARLRGWLEDAGRAKLLHHAKYDTHVFANEGVSLAGVAEDTMLQAYVLESHRGVGLNDLAQRFLGRSGVNYEDLCGKGAKQIGFDEVAVPLAGHYSCEDSDFTLQLHEVLRPRVAEDEGLERTYLLELQVSRVLTVVERNGVKVDAQELGRQSHKLGQEMLALEQRAYELAGQPFNLNSPKQLGEILFGRMGLPVVRKTAGGAPSTDEEVLSKLAQDYPLPQVLLEYRGLSKLKSTYTDKLPRMISPATGRVHTHYSQAAVITGRLASSDPNLQNIPVRTEAGRRVREAFIAEQGKLLSADYSQIELRIMAHVSDDANLQRAFAAGEDIHRATASEVFGVPLAEVGAEQRRAAKAINFGLIYGMGVFGLASNLGITRDAAQAYIDRYFTRYPGVARYMDDTRRLARDQGYVETVFGRRLQLPDIRAASGPRRQGAERAAINAPMQGTAADLIKMAMVAVQDWLDAERLRTRMIMQVHDELVLEVPDEELAAVAEALPRLMCDVATLRVPLVAEVGMGTNWEQAH

SEQ ID NO: 50840 - protein, 1059 aa, Bordetella pertussis
MAKFFIDRPVFAWVIAIVLMMAGALSILSLPVAQYPNIAPPAISINVTYPGASAQTVQDTVVQVIEQQMNGIDNLQYISSESNSDGSMSITLTFSQGTNPDTAQVQVQNKLAVAQPLLPLEVQQQGIRVTKATKNFLIVAGFVSTDGTMDKSDLADYVASYIQDPISRTPGVGNFQLFGAPYAMRIWISPEKLVNFGLTASDVTTAIREQNVQVSSGQLGGQPAVRGQQLNATVIGPSRLQTPEAFGRILLKVNRDGSQVRLKDVASIELGAQTYAIDSYYNGKPASGLAIKLASGANALDTAQAVRETINGLKPYFPPGMDVVYPYDTTPFVSLSIEGVVKTLFEAVLLVFLVMYLFLQNVRATLIPTLAVPVVLLGTFGVLAAFGYSINTLTMFGMVLAIGLLVDDAIVVVENVERVMAEEGLSPRQATRKSMGQITGALIGIAMVLAAVFVPMAFFGGSTGVIYRQFSITIVSSMVLSVVVAIVFTPALCATMLKPIPKGHHGSKKGFFGWFNRTFERSSQAYANNVARSMGRTKRLLLIYVVILLGMAWMFMRIPTAFLPDEDQGILFAQVQAPAGATSERTQATIDAAVKYLLEDEKESVASVFAVNGFSFGGRGQNAAILFIKLRDWNERKGAEHRAAAVAARANAKFRAELRDAQAAVFAPPAVMELGNATGFDFQLQDRAGVGHEKLLAARNQLLQEAGASPMLVAVRPNGIEDAPQYQLDIDREKARALGVSITEINNTLATAWGSSYVNDFIDRGRVKKVFVQGEASSRMLPQDLDKWYVRNNAGDMVPFSAFSSAQWTFGPQKLNRYNGVPSYNIQGQAAPGYSSGDAMAEMERLADKLPLGIGYDWTGLSFEERLSGAQAPALYAISLIVVFLCLAALYESWSIPTAVMLVVPLGVVGALLATMTRGLSNDVYFQVGLLTTIGLAAKNAILIVEFAKEHYEEGASLTEAAVHAARQRLRPILMTSLAFILGVVPLAISTGAGSGSQNAIGTGVIGGMLTGTFLAIFFVPLFFVLTLRLFKVKRASENREDDDPHGGAQPATHGGQPQ

SEQ ID NO: 50841 - protein, 553 aa, Bordetella pertussis
MSGLLPLLDFAGYVALLLWGVHMVQTGVQRAFGAALSIALGRALGTRLRAFASGLGITAALQSSTATGLMITGFAAGGVVALVPALAAMLGANVGTTLIVQLLSFDLTSLAPILILAGVWMFRRAAPGRTRDLGRVFIGLGLLLLSLHQLVQLFQPFETAPLLGVLLDALASQPVAAVLLAAALTWAAHSSVAVVVLVMSLASHGMVNPALAFALVLGANLGTAINPMIEGVTGDDPAARRLPLGNLLTRVAGVLAGIILLPWLQPWLSGLAGDPAHAVANFHTLFNVVIALVFLPILTPYAALLTRWLPKRADPNDPARPQYLDEWAHDVPAVALGNAAREALRMADMLQTLLLYARAGFKRDNRHRMVQARQLDSALDKLETAITTYLATLDQENMTREDHQRLDTILAFCSNIGHAGDIAYHGLLNHIGRLRKQGLLLSADQRASLDATLGELIANQRQAAALFVTDDLRQARALAGEKARFRALEAEAAETQLQQIKSGKVDAAEVGALYLDILRDLKGINSHVVGASAYPLLARHGELLPSRLRDAGN

SEQ ID NO: 50842 - protein, 465 aa, Bordetella pertussis
MRVAVSVFDLFKIGIGPSSSHTVGPMRAALLFVQGLERDGLLARVASVRAELYGSLGATGKGHGTDKGVLLGFMGQAPDTVDPAAIAGMLQAVRANRRVLLLGRHDVPFVEKEHMLFYRREALAEHPNGMKFHAFDADGQPLRESRYLSVGGGFVVTAGAANAQVIGAHDQLPYPFRTGRELLDMCRASGHSVAGLMMRNELTWRGAAEIEQGLDRIWEVMQECVARGCGIGHPEADGDLPGPLKVRRRAPELYRALTQRAERTLSDPLSVMDWVNLYAMAVNEENAAGGRVVTAPTNGAAGIIPAVLHYYDRFVPAANRAGVHDFLLTAAAIGLLYKYNASLSGAEVGCQGEVGVACSMAAGALAAVQGGSVEQVENAAEIGMEHNLGLTCDPVGGLVQIPCIERNAMASVKAVNAARMALRGDGHHYVSLDSVIKTMRETGADMKTKYKETARGGLAVNIVEC

SEQ ID NO: 50843 - protein, 418 aa, Bordetella pertussis
MHLNELKALHVSQLLEMAAGLEIENANRLRKQELMFAIMKRRAKQGEQIFGDGVLEVLPDGFGFLRSPDTSYLASTDDIYISPSQIRRFNLHTGDSIEGEVRTPKDGERYFALVKVDKVNGSPPEAIKHRIMFENLTPLHPNQVMRLERDIKSEENLTGRILDIFAPIGKGQRGLIVAPPKSGKTVMMQHVAHAITTNYPDAVLIVLLVDERPEEVTEMQRTVRGEVVASTFDEPATRHVQVAEMVIEKAKRLVEMKKDVVILLDSITRLARAYNTVVPASGKVLTGGVDANALQRPKRFFGAARNLEEGGSLTILGTALIETGSRMDEVIYEEFKGTGNSEVHLERRLAEKRVYPSINLNKSGTRREELLIKPELLQKVWVLRKFIHDMDEIQSMEFILDKMRATKTNAEFFDMMKK

SEQ ID NO: 50844 - protein, 257 aa, Bordetella pertussis
MAHAIHLQCCAMKYAVVLAALLSLPLAAQAELVTRPNAVGHRDFRHAKKVLPRVYQNLERDFYCGCPYQDKRIDLQACGYEPRKQLRRAQQLEWEHVVPAWTLGHQRQCWQQRVNGKPGGRKHCSRTDPSFARAEGDLVNLMPSVGEVNGDRQNFRYAVWADRPAPMYGQCETIVDFKTRRIQPRKYVRGRIARIQFYMVERYRLKLSREDRRVLCVWARAYPVDDWERARDQRIRTLQGNGNHYVTDPAAIQRQCG

SEQ ID NO: 50845 - protein, 412 aa, Bordetella pertussis
MTQQSPLKNATIAAVMTAVIVTPIFGLQLVRQGARTLMEPRWDLVALACALVFAFQLLRPWISKPFKALKTGLPTLPSALARGHKWLVVLLIAVSVIWPFFSGRSSVDIATLVLIYVMLGLGLNIVVGFAGLLDLGFVGFYAVGAYTYALLYHWGGWSFWEALPFSGAVAALFGFVLGFPVLRLRGDYLAIVTLGFGEIIRLLLINLNMLTGGPDGISGLPKPSVLGMEMARRASTEGGQTFHEIMGWTFQNQHMVIYLYLMALALALATLFVSTRLIRMPVGRAWEALREDEIACRSLGLNPTRIKLSAFTLGAMFAGFGGAFFAARQGMVNPESFTFIESALILAIVVLGGMGSQIGVILAAILLTVLPELAREFAEYRMLMFGLVMVLMMMWRPQGLLPMKRPHVELRK

SEQ ID NO: 50846 - protein, 308 aa, Bordetella pertussis
MSDLIPQLTQQFFNGLSLGAIYALIAIGYTMVYGIIGMINFAHGEIYMIGAYVGLVTLTAIGTNSGLPLPFIIAAMLVVAIFVTGVYGYSVERVAYRPVRGSPRLVALISAIGMSIFLQNWVALGQGARDMAVPALVSGAVQFHMGSSFDVTVPYSRIMIIVVTVVLMVALTLFIKYSRMGRASRACSQDMHMANLLGIDTNRVISFTFVLGAMLAAVGGVLIAITIGKLNPFIGFLAGIKAFTAAVLGGIGSIPGAMLGGVLLGLAETFAAAYISSQYKDIVAFALLVLILLFRPTGLLGKPEVEKV

SEQ ID NO: 50847 - protein, 193 aa, Bordetella pertussis
MSSASRRYEPLRSGPFLLAVFCMGLVVVGSNILVQVPLNDWLTWGGLSYPVAFLVTDVLNRRYGPDAARRVAWFGFAAALAVSVWVASPRIALASGLAYLCAQLIDIRVFDRLRDQRWWRAPLISGVIGAVADTAVFFSVAFAGSDTPWVTWMLGDLAIKLAVNISMLALFRALMWNLARPAEARPAQASTGR

SEQ ID NO: 50848 - protein, 805 aa, Bordetella pertussis
MQFPESWLRSLVNPSIGTDELAHRLTMAGLEVEETEPAAPPFTGVVVTRIVDIAPHPDADKLRVCQVDDGSGALLQIVCGAPNAAAGLTVPLARVGAELPGGMKIGVAKMRGVQSSGMLCSARELGLSQDHAGLLELPAALRPGTDIRAALDLDDTLFTLKLTPNRADCLSILGVAREVAALTGTPLTAPAAEPVPVTIDHRLPVAIQAPDLCGRFAGRVIQGVNARAATPEWMKTRLERAGQRSVSALVDISNYVMLEVGRPSHVFDLDKIGGDLSVRWAREGETLELLNGQAVALDPKVGVVVAGEQVESLAGIMGGEATSVTLDTRNIYLEAAFWWPGAIAGRARRYKFSSEASHRFERGVDYASIPEHIELITRLILDICGGQAGPVDDQCVNLPVREPVRMRLARCHRVLGVAVERAEVAQIFTRLGLPFQEQGDDFVVTPPSYRFDIEIEEDLIEEVARVYGFERIPDVPPVARAKMHAQPEARRGAHAVRRLVAARDYQEVVNYSFVEAAWERDYAGNDNPVRLVNPIASHLSVMRSSLIAGLVAIVRHNANRKQSRMRLFELGRVFHRDPQLADGPLEVAGVRQPLMLAGVAWGGAVEEQWGVPHRQVDFYDVKQDIEALFGARADALRFVADRYPALHPGRSARIELDGQPIGWLGELHPQWTQQADLHHAPVVFELDFEALAERRLPAVRKLSRQPVVVRDLALWVDAKLPAQAMLDTVAAAIARDPQLSVVQDAQVFDVWREKPVAGQTVTEKSLAFRFWLQDTEVTLDEARVADCIARIKDALVAAHNARQRA

SEQ ID NO: 50849 - protein, 340 aa, Bordetella pertussis
MTLLVDDLVSQAQERFAAASDAAALENAKARFLGKEGALTVLLKALGKLDPEQKREMGARINQAKQQIEALLNARRAALAQAELDARLASETIDVTLPGRGKAAGGIHPVIRTWERVEEIFRSIGFDVADGPEVENDWTNFTALNNPLDHPARSMQDTFYVDMHDADGLPLLLRTHTSPMQVRYARMHKPPIKVIAPGRTYRVDSDATHSPMFHQVEGLWIAEDISFADLKGVYTDFLRCFFESDDLVVRFRPSFFPFTEPSAEIDMMFTSGPNRGRWLEISGSGQVHPQVVRNFGLDPERYIGFAFGSGLERLTMLRYGVNDLRQFYEGDLRFLRQFNE

SEQ ID NO: 50850 - protein, 437 aa, Bordetella pertussis
MRSQRLALTFAAVMAAFAGASAHAATEIQFWHSMEGALGDRVNGLVEEFNKQNADYQIKAVYKGNYGESMNAGIAAFRAGNAPDILQVFEVGTATMMYAKGAIKPVQQMSEEVGDPIDPKQFIGAVAGYYSSPEGKLVSMPFNSSTVVFYYNKDAFKKAGLDADKPPKTWEELAAVGQKLKAAGQECGYTTSWPSWVQLETFSAWHNVPYATKDNGFAGLDARLAVDTPLHVRHLDNLAKLAKEGIFMYGGRGDEPNSLFISGKCAMITGSSGLRANIAKNAKFEFGTSTLPYYSDVQGAPQNTIIGGASLWVFANKKPETYKGVTKFFKFLASPEIAARWHQQTGYVPVTKAAYELTQKQGFYDKNPGTDVGVKQLNVETTAQSRGLRLGYLPQIREIEDAEIERIVAGKVPAKDGLQSIVKRGNELLEKFEKSVK

SEQ ID NO: 50851 - protein, 119 aa, Bordetella pertussis
MPRVKRGVTARARHKKVIAAAKGYRGRRGNVFRIAKQAVMRAGQYAYRDRRNKKRTFRALWITRINAAVREQGMSYSVFIAGLKKAAIELDRKVLADLAVRDKAGFAAIVQQAKAALAA

SEQ ID NO: 50852 - protein, 65 aa, Bordetella pertussis
MPKMKTKKSAAKRFKVRGSGSIKRGQAFKRHILTKKTTKNKRQLRGSAAVHETNVASVKAMMPFA

SEQ ID NO: 50853 - protein, 513 aa, Bordetella pertussis
MNWGVGDFQFLKSGSDEPCIQPIESSQRALPMHHRAMNTQPLYLRLADHYRRAIQTGVLAPAQRMPSVRNLVRAHHVSLSTALQACRQLEDDGLIEARPRSGYFVLRPRRPALAPVPEPDIKGALDPAQYVGIHDRVSDFIASCQQHPLSADFALAAAPPQAYPMRALQLALTRAARHTPELLTAPVPPYGHPEFRAVLARRAMECGISATPDEVLVTHGCIEALNLALRAVARPGDTIAVESPTYFGLLQILESLGLRALEIPTSPQRGISIEALELALQTHANVRAVVVVPNFQNPLSCVMDDSDKARLVTLCERTGIALIEDDTYGALGDHGTPLALKSWDDSGNVIYCASLHKTLAPGMRLGWMLGRRWSRRIGMLKFAQSRPNPPLPQAAAADYMGTKAYDRHLARLRQTLRVQREAMAAAVARHFPDDTRLSVPTGGMLLWVELPAGMPAMRVFEQALRAGIRITPGPMFSNSNRYDHFLRISCGVPYTADIAAAMQRLADIVAAGL

SEQ ID NO: 50854 - protein, 488 aa, Bordetella pertussis
PERRCLRAPRPHTTQGECMMSKTGKMAAALAALCLSVGLAGAARAESTLQVALSTSLNSLDPNVTTLGEEYVFNGLVFGGLTRIDANSKVVPDLAVSWTPSADLREWTFKLRPGVKFHHGKPLTASDVVFSFQRIVDPATGSPGRTQLEVMKSVDAPDDATVHFTLTQPYADFPGLLTGRQLRVVAQDRIDTIKTQPSGTGPFRFVRYTPGDQLELERNPDYYDKDRIKIDRVVMRVMPEAAARVAALRSGSIDMIWKLPLETIPDLKKDAAVVVDSVPSASWDGIVLNNSKPPFNDVRVRRAVFLALDKKELVNFALFGEGSPTHSPIAPTDPAFNKDIGFAPDLAQAKQLLAEAGYAKGFAVDIFVPAGRPSRERLGVAAQQLLRPLGIKLNVQRVPYNRYSAGVAGIAPMYVDGFFASPVIDAATSPWFYSTGSWNARMWHFSSKRVDQALDAARASTDRAEQIRHYQDFQRALTEEVPGIIGYV

SEQ ID NO: 50855 - protein, 590 aa, Bordetella pertussis
MALADNLPNVGNNPSTCTDISAAAPAACRRGERRNLVHCQIYLHCALAARQARTYTVISTANLTIQFGPKPLFENVSVKFGEGNRYGLIGANGSGKSTFMKIIGGDLEPSAGNVSLEPGVRLGKLRQDQFAFEEVRVLDVVMMGHTEMWAAMSERDAIYANPEATEDDYMRAADLEAKFAEYDGYTAEARAGELLLGLEIAVDQHNLLMREIAPGWKLRVLLAQALFSNPDVLLLDEPTNNLDINTIRWLENVLNGYQSTMIIISHDRHFLNQVCTHMADVDYGEIRVYPGNYDDYMLASTQARERLTANNAKAKERIVELQDFVRRFAANKSKSRQATSRLKQIDRIKADQVEVKPSSRQNPYIRFEQNKVMHRLAVTIEKLSKSYDQPVIRDFSAMVDAGEKVAIIGANGVGKTTLLRMLATDLAPDSGTVKWSENADIGYMAQDVSDQFQQGDINLFDWMAEHRQPGDDDQSIRSALGRLLFSGDDLPKAPKVLSGGEKNRMTFGRLMLGRHNVMLLDEPTNHLDMESIESLQFALEKYEGALIFVSHDREFVSGLATRIIEILPDGELVDYRGGYEDYLASRGIEA

SEQ ID NO: 50856 - protein, 343 aa, Bordetella pertussis
MKETYRAMQASRPGVLELVERRTPRPAAAEVLIRVEACGMCGADIADIEKAGPTVPPRVPGHEVVGRIVALGGQVPPIWRLGQRVGVGRLGGHCNECDQCRQGRFQLCESQPIVGASCDGGYAEMMLARATGLVSIPDELDAQEAAPILCAGVATFNALRKCGAQPGDLVAVVGIGGLGHMALQYARRMGFRVVAIGRGADIATDAMALGAHAYIDNLEQNVVATLRRMGGAQAVLTTIDQAEAVSALLGALAPEGRLVVLNPGKSALQVSAGLLVGGQRSIVGSLTGTPHDNEKALNFSVLVDARPSIEVWPLARADEAYRQLQSGAPRFRLVLAMGNTDQD

SEQ ID NO: 50857 - protein, 271 aa, Bordetella pertussis
MHADTAQDAPDAAARYPRADSVADFEHNLAAVRARMAAACQRAGRDPAGVRLLPVSKTVDEARIRMSYAAGCRELGENKVQEAYRKWEAMADLADLRWSVIGHLQTNKAKLVARFAAEFQALDSVRLAEALERRLQAEGRALDVYVQVNTSGEASKYGLHPDEAAAFIRQLPSYGALRVRGLMTLAVLSADAARVRQCFVLLRTLRDRLRQEAPAGVSLDELSMGMSGDYEIAIEEGATVVRVGQAIYGARALPNDYYWPDSGAADRAEDE

SEQ ID NO: 50858 - protein, 382 aa, Bordetella pertussis
MLCACAGAACRAGDNVSAKPVFLHPGPRTLVVNSAPMIILGFESSCDETGVAAVCTERGLLAHALHTQIAMHQEYGGVVPELASRDHIRRVVPLTRQVLAEAGLTLADVGAVAYTAGPGLAGALLVGASVAQALAWSRALPAIGIHHLEGHLLSPLLAEPRPEFPFVALLVSGGHTQLMLVDGVGRYELLGETLDDAAGEAFDKSAKLMGLGYPGGPALARLAEQGDASRYDLPRPMLHSGDLDFSFSGLKTAVLTRVKAATRDGGELGEQDRADLAAATQAAIVEVLAAKAIRALKQTGLRRLVVAGGVGANALLRAHLARALKPLRAEAYFPPLSLCTDNGAMIAFAAAERVKAGLADLREGDHAFTVRPRWDLADIQAG

SEQ ID NO: 50859 - protein, 215 aa, Bordetella pertussis
MPATMVLTAPSLLSSSALIVLAYLIGSIPFAVVVSKLMGLQDPRSYGSGNPGATNVLRTGNKTAAALTLLGDAAKGWFALWLARALVPELSWGAYALVALAVFLGHLYPLFLRFKGGKGVATALGVLMAIEPWLAVATIATWLIVAVFSRYSSLAALVAAFFAPVYYVFGSGAAWHARLEVGLAIAVISALLFYRHRANIARLLKGTESRIGKKK

SEQ ID NO: 50860 - protein, 523 aa, Bordetella pertussis
MNPTTLADVDTVIINANILTLDRDCPHAQAIAFAAGRILALGTTQELSPLAGRAATVVDARGSTLLPGFIDSHSHLMFGGVVAQALDLTEAACLSDLLDMVRSRAQSTPEGEWIRGYGVAAGRLKEKRYPTRQELDQVSGGRPVWLAEDSFHASLVNSKAFRMLEIPLSTPGVELAADGSPTGAFLNDAANVPARQRVFGFISDDEARQMLQHVTQLGATRGVTTVHAFEGSRMSADRDIELLMRFRHELPIHVVPYYETFDVERAMQLGVSGVGGCGRNCLDGMPNIQTAAMVDPYCCSEERGSLFQESIKLHNFVIAAFERGMQVGMHAMGDAAIEQLLATYERAIEETGRTDLRPRIEHFHVPSRDHVRRAADLGVGLAVQPIFTHLWGGRDGIFFERLGERRYKRIDTYREILDSGAIASCGADLPVHPADPLRWIQLLVDNQIDRDQSVSMTEAIRMCTYNGAWLGFQESETGTLAVSKAADAVMLGRDPHQCMPHEIAAIPILKTLGGKLVFESSRP

SEQ ID NO: 50861 - protein, 222 aa, Bordetella pertussis
MMKNPICAITPNPAMTQLAPSPTVDGRRLRGERARARVLDEAVKLLSVEGLDGITFGQVAERAEVGKSNLQVLFGDKERLQLAALDHAIGLYQAQVIEPAMRKRTPLARLRALMNGWFDFVETRQLPGGCVITAASSEYRARPGPLRDAIRQYRDGARARLRELIRQAKAQGQLAADTNEARLAMDLLAYQAFANVAASMDDAAEFKRAKAAVAQMLAGGAG

SEQ ID NO: 50862 - protein, 530 aa, Bordetella pertussis
MHQRILILDYGSQVTQLIARRVREAGVYSEIHAGDVDDAFVRDQVAQGLKGIILSGSHASAYEEGSMRVPAAVFDVGVPVLGICYGMQSMAQQLGGTVSFSDHREFGYAEVRAHGHTKLLDGLADFTTDEGHGMLKVWMSHGDKVTELPPGFKLMASTASCPIAGMADESRGFYAVQFHPEVTHTVQGKAMLARFVKDICGCEGDWNMPDYISEAVARIREQVGSDEVILGLSGGVDSSVAAALIHRAIGDQLTCVFVDHGLLRLDEGKQVMQTFTENMGVKIVHVDATSQFMGKLTGVADPEAKRKIIGREFVEVFQDEAGKLQGAKWLAQGTIYPDVIESAGAKTGKATSIKSHHNVGGLPDTLNLQLLEPLRELFKDEVRELGVALGLPPQMVYRHPFPGPGLGVRILGEVKHEYAELLRRADAIFIEELRNAKDPASGLTWYELTSQAFAVFLPVKSVGVMGDGRTYEYVVALRAVQTFDFMTADWAPLPHPLLARVSSRIINEVRGINRVVYDVSSKPPATIEWE

SEQ ID NO: 50863 - protein, 287 aa, Bordetella pertussis
MFSYRHAFHAGNHADVLKHAILVHVLDYMNRKEAPYWVVDTHAGAGLYALGSDWASKNAEHADGVARLWELSGLPPLLADYVARIRDYNTDGVLRHYPGSPWLTLDVLRERDRLRLFEMHPSESDVLVRNLERRNERTALRQTTVFAADGFEGVKALLPPPTRRGLVLIDPSYEDKQDYRRTLTAVREGVKRFATGTFVVWYPLVQRREASEMARQLERLPVKSWLHATLTVRKPAADGFGLHGSGMFLVNPPWTLHDALKPAMPLLARELAQDDRAGFTLQYRENP

SEQ ID NO: 50864 - protein, 249 aa, Bordetella pertussis
MTAPLPAWPYSPYIAHRGGGRLAPENTLAAMRVGAAHGFTMFEFDVKLSRDNVEVLLHDDDVDRTSNGHGPAASKTYAELAQLDAGSWYAPQYAGEPVPTFSAVARYALANGIACNVEIKPCPGREAETGAAVARAAAALWQDALPAPLLSSFAEPALHAARGAAPQLPRALLVDRVPADWLERLRKYDCIALNINQRDASRELVDAVHQAGYRIAAWTVNDPARARLLLDWGMDAIFTDELATIRPAV

SEQ ID NO: 50865 - protein, 222 aa, Bordetella pertussis
MRIVFRLLAPCLAAIALAATLPAQAQTASAPTGSAPHAVLVVGDSLSAEYGLRRGSGWVPMLAQRVSQQSPNYRVVNASISGDTTSGGLARLPALLRQHAPAVVVLELGSNDALRGLALDMTERNLRAMAQASRQAGASVLVVGMQIPPNYGRDYTQRFAQVFPAVAEQEKARLVPFLMEGIATNRAMFQADGIHPNENAQPALLDNVWPLLEPMLAQPAAD

SEQ ID NO: 50866 - protein, 374 aa, Bordetella pertussis
MTRFIHTADWQIGRQYGQFDSDDAAVLAEARLEPVARIAAQASELAVDAVLVAGDVFDTQSVSDRTIRRLFGAMQAYEGPWVLIAGNHDAALADSVWSRARRLECIGTNVHVPQDTAAVELPLAGLAVLAAPLTQRHTYDDVTAAFDTMDSAAGLVRVGLAHGSVADRLPEQADAANPIAPDRAQRARLDYLALGDWHGCLRIDERTWYAGTPEPDRFRGNAPGYALLVEVAAPGAPPQVRQLEVGKYRWSHWVERLDLASDAEDLGHRLAGLQAGDVLRLELHGALSLARRWDALRRDVERAAARVRALVADSAGLVLEPDAADLAALSVDGYVGAAAARLQAMQGDGAQAAAARVALRLLLQYQRELAEGAS

SEQ ID NO: 50867 - protein, 217 aa, Bordetella pertussis
MKILMVLTSHDQLGDTGRKTGFWLEEFAAPYYVFVDAGARVTLASPAGGQPPLDPKSDEPDAQTEATRRFAADTQAQQALAHTAKLADMRAADFDALFYPGGHGPLWDLAESAHSTALIETFLAGGKPVAAVCHAPGVLGTPLVAGRQVTGFSNTEEAVVQLTEVVPFLVEDELVDLGARYSKAEDWHAYVVNDGLLITGQNPASSERAARAMLTAL

SEQ ID NO: 50868 - protein, 953 aa, Bordetella pertussis
MDYKKSLNLPDTPFPMRGDLAKREPGWVAEWEETQVYQAIRAASRGRPRFVLHDGPPYANGDIHIGHAVNKILKDIIVKSRNMAGYDAHYVPGWDCHGMPIEIQIEKKYGKHLPVTEVQSKARAYALEQIDRQRKDFKRLGVLGDWHNPYLTMNFSNEADEIRVLGRILEKGYVFRGLKPVNWCFDCGSALAEAEVEYADRVDPAIDVAFPFTDRGALARAFGLDEVDAGAIVIWTTTPWTIPSNQALNVHPEIDYALVRVTPAPVHGPLLLLAQERVEPSLKAWGLEGEIIATAKGEALEGLRFRHPLAAAAQGYDRTSPIYLGDYVTLDTGTGVVHSAPAYGIEDFVSCKAHGLADSDILGPVMGDGKFVDSLPLFGGLSIWDANPRIVEALKLADSLMLVQKLSHSYMHCWRHKTPVIYRATSQWFAGMDVKPRDGGPSLRESALAGIDATAFYPAWGRARLHAMIANRPDWTLSRQRQWGVPMAFFVHKETGELHPRTVELLEQIAQRVEKGGIEAWQSLDPRELLGDEAELYEKNRDTLDVWFDSGSTHATVLGGKDGVLGGSHGAELAWPADLYLEGSDQHRGWFHSSLLTGCMLYGHPPYKGLLTHGFVVDGQGRKMSKSVGNVIAPQKVSDSLGAEILRLWVASTDYSGELSISDEILKRVVESYRRIRNTLRFLLANVADFDAVGQAVPYGELFEIDRYALAMTAQMQAEVQGHYERYDFHPAVSRLQTFCSEDLGAFYLDILKDRLYTTAAGSAARRSAQTALLDITQTLLKLMAPILSFTAEEAWKILAGSALAKQADAPRVTIFTEVYHALPPFADGEALTAKWTRLRAIRAEVQRKLEEVRSAGAIGSSLQAEVDLYANAADHDILASLGDDLRFVLIVSRATVHADADDLRIEIAASGHKKCERCWHWRPDVGQDADHPEICGRCVSNLFGAGEPRTRA

SEQ ID NO: 50869 - protein, 321 aa, Bordetella pertussis
MKPSLRIYRYPPPPSQRTPCALTIGNFDGVHLGHQAILARVRQEARARGLVPAVMTFEPHPREYFATLNRRPELAPTRISGLRDKLQALAAAGIEQVVVERFDARLAEMSANAFIEDLLVAGLQTRWLLVGEDFRYGHKRSGDIDLLREAGLTHGFEVCTLADITDRQGHRISSSEVRTALAVGDLDRAAQLLGQPFHISGHVIHGQKLGRELGFPTMNLRVAPRCATRSGIYVVRVLGLQDRPLPAVASLGVRPTVEDRGRVLLEAHLLDESLDAYGKLVRVEFLHKLRDEEKFADLPSLTAAIAQDAQNARAYFAVHGL

SEQ ID NO: 50870 - protein, 790 aa, Bordetella pertussis
MPARPAKRHRRARAICSASAPLRGMMLEKLNPEQRAAVTLEPQHALVLAGAGSGKTRVLTTRMAWLIQTGQASPFALLAVTFTNKAAREMLTRMSTLLPIDTRGLWIGTFHGLCNRMLRAHHRDAGLPQAFQILDTTDQLAAIKRLLKAGNIDDEKYPPRDVQRFINGAKEEGLRPGDVEAYDPHRRKLIEIYQLYEAQCQREGVVDFAELLLRAYELLSRNAPVREHYQRRFRHILVDEFQDTNTLQYKWLRLLAGTGAAIFAVGDDDQSIYAFRGANVGNMADFERDYAHGRVIRLEQNYRSYGHILDSANALIGHNTGRLGKNLWTEQGEGEPVRVIEQPSDGMEAQWLVDEIRALINDGRMRSEIAVLYRSNAQSRVLEHALFSVGIPYKVYGGLRFFERQEIKHALAYLRLIANPNDDTSWMRVVNFPTRGIGARTLEQLSDAARAHDTSLFGAVARVGGKGGSNLAQFAQLIGQMAHDTRELPLPELVDHVIEASGLKAHYQTEREGAERLENLNELITAATVFAAEENFEGLPAGVVPDHDVSGALMPGVVDAPQPDTLGGLTPLAAFLSHAALEAGDNQAQVGQDAVQLMTVHAAKGLEFDAVFITGLEEGLFPHENSIMEPAGLEEERRLMYVAITRARERLYLSLAQSRMLHGQTRYAMRSRFLEEIPEQHLKWLSPRAGLHQGGGFGGAAPAWSSRGDAFGRKPTGTAAPRQPRGMASGVTVGEQQFRVGQGVRHARFGDGTIIGLSGSGQDAQAQIQFRDVGAKTLALGIAKLDIITA

SEQ ID NO: 50871 - protein, 147 aa, Bordetella pertussis
MISVTRRLEFDAGHRIPDHNSQCRNLHGHRYVLEVTLSGDVVQAPGASDNGMLMDFSEIKRIARAHIVDVWDHAFLVYEGDHAVRGFLDTLPDHKTVVLDRIPTAENLASIIFATLAPHYHGHYGADLRLTRVRLYETPNCWADCGS

SEQ ID NO: 50872 - protein, 277 aa, Bordetella pertussis
MGLPMAGHLARAGHQVTVYNRTAAKAQAWAAEFGGKAAATPREAAAGAQIVFCCVGNDDDLRSVVLGADGAFAGMQAGAVFVDHTTASADVARELYAAARELNLQFIDAPVSGGQAGAVNGALTIMCGGDSATFEDIKPVAHAFGRAVTLVGPPGAGQLAKMVNQVCIAGVVQGLSEAIAFGQTAGLDMKLVLDVISKGAAQSWQMENRGATMVDDQFDFGFAVDWMRKDLGLVLAEARNNGARLPLTALVDQFYGDVQKMGGNRWDTSSLIKRLRD

SEQ ID NO: 50873 - protein, 574 aa, Bordetella pertussis
MHMRRYMRQGKAMSFEDLGLAPTILSALSEAGFTEPTSVQAAAIPQAMAGADLMVSSQTGSGKTAAFMLPALNRIAHQPGNKGVGVQVLVLTPTRELALQVADATASYGRNLPGLRTATVVGGMPYGAQLKALSRRVDVLVATPGRLIDHLKAGRVKLNTVHTLVLDEADRMLDMGFIEDIETIIERLPKERQTLLFSATLDGSVARLAERMMREPQRIEIAGHRQKHANITQSLLYADDAAHKMRLLDHVLRDARLDQAIVFTATKRGADDLADRLADQGFAAAALHGDMNQRQRTRTLGQLQRGQLRVLVATDVAARGIDVQGISHAVNFDLPLQAEDYVHRIGRTGRAGRDGQAFTLATHAERHKVRRIEHYIGQSINAEVIAGLEPQRTPRPSTGGPRRGGKPMGGKRPGGYGAPREFGDRPQRPYGDRPQRDFGDRPQRDASDRPQRSFGDRPQRDFGDRPQRPYGDRPQRDFGDRPQRDFGDRPQRPYGDRPQRDFGDRPQRSFGDRPQRDVGDRPQRDFGDRPQRSFGDHPQREGGWHGAPREGRSFDKRPGGPAKRFAKPAAPRRG

SEQ ID NO: 50874 - protein, 273 aa, Bordetella pertussis
MTLDLQTTIEQAWENRANLSPVDASAEVRDAVEHTIDGLDLGRLRVAEKIDDQWIVHQWIKKAVLLSFRLHDNAVMGQGPLQFYDKVPTKFAGYGEAAFKAGGYRVVPPAVARRGAFIARNVVLMPSYVNIGAYVDEGTMVDTWATVGSCAQIGKNVHLSGGVGIGGVLEPLQANPTIIEDNCFIGARSEVVEGVVVEENSVLAMGVFLSQSTKIYDRATGKVSYGRVPSGSVVVPGSLPSEDGSHSLACAVIVKRVDAQTRAKTSINDLLRA

SEQ ID NO: 50875 - protein, 364 aa, Bordetella pertussis
MSRTDDPGVAGLRVYIVGGAVRDDLLGLPAGDRDWVVVGATPEDMARRGFIPVGGDFPVFLHPRTKEEYALARTERKSGRGYKGFTFYTGADVTLEQDLQRRDLTVNAIARTPQGELVDPLDGVADVRARVLRHVGEAFAEDPVRILRLGRFAARFGDFSIAPETMQLCRRMVEAGEADALVPERVWKEVSRGLMAQAPSRMLDVLARAGALARVMPELHDDTAVRAEIDRAAAAGLPLAGRYALLCRHTPERDALGRRLRAPVECMDQARLLPLAVDALAASATPAAQLDLIERCDALRKPERFDALLQAAAIVAPVDLSAWRARVQAVRAIDAGAIARQCAGDPARIKPALRQARLQALGGA

SEQ ID NO: 50876 - protein, 353 aa, Bordetella pertussis
MKLPTADEAVFSIKCYLGAMLALYLAYSIGLPRPFWAMTTAYVVAQPWSGAVRSKAVYRLGGTFFGSAMTIYTVPRLANYPVLMTLAMVLWVGLCLYIAVLDRTPRSYLFMLAGYTAAMIGFPSVTDPALVFDTALARVEEISLGIICATLVHSVVLPRGIGRAMMGRLDATVRDARSWIQDVLNQRGAAQHARDRRALANDITQLRLLSTHVPFDTGNIRWTANALRAMQEHITALTPAVSAVEDRLQALQAQGRALPPPAARVLADISAWMDDSAHATREQAVQLRAALTRLAPAIDRQSGWHDALLASLVARLRELVDSYDACLVLRQDIHAGLGGAPTGRTRRLTVKIQ

SEQ ID NO: 50877 - protein, 471 aa, Bordetella pertussis
MQWWPYNNGGHRAIVPAIRQSYERNMQGNHQTATHQPVRASIAAFVGTMIEWYDFYIYATAAALVFGKLFFPSVDGFYGTLAAFGTFAVGFLARPLGGAVFGHIGDRIGRKKSLVITLLLMGTVTVLIGLLPTYASIGIWAPILLVALRFIQGIAVGGEWGGAVLMAGEHSPDRSKRTFFASFAQLGSPAGLILSMLMFKLVTSLDDAAFMDWGWRVPFLFSAALLVVGFAIRLSVNESPDFLAEQAEKARLKDAAAKQAADKAPIVEVLRGASGLLALAVGANVLGIAGFYFTNTFMLAYTTQYVGLSRGVILDCLLVVSVMQFIITPLSAYIATRIGSRRFLLITSFLSIFTPYVMFNMVDQGTLTSLTLGVGLAVVCLGAYYAVIAGYVSDSFPTRIRYTGISMAYQLSGAIFGGLTPILGTILAEKFQGHWWPLALLFSGISLLSMISVIFLANHRTDAVTAPLRSA

SEQ ID NO: 50878 - protein, 1348 aa, Bordetella pertussis
MSLVQHLPGSSVLSAFRRERLLAQLKKAGLPVADISARYEHFIHTDSALPAEQQARLAQLLDYGTPAAETPAKSLELLVIPRLGTMSPWASKATDIAHNCGLDAVRRIERGVRYALTPERGLLGAKSFDADMLARAADCLHDRMTETVVDGAFDGQALFETLAGKPMRTVAVQAEGRAALEQANVALGLALSEDEIDYLAQSFGDLGRDPTDVELMMFAQANSEHCRHKIFNAQWVIDGQEQSNTLFGMIRATHKAQPAGTVVAYSDNAAIMEGGPAQRFQAGVPGVAGEGAQAARYVRRDTTVHTLMKVETHNHPTAIAPFPGAATGAGGEIRDEGATGRGSKPKAGLTGFTVSHLRFDDALQPWENDHHGLPERIASPLSIMIDGPIGGAAFNNEFGRSNLLGYFRAFEQTAGGTRWGYHKPIMIAGGLGSIDAGLTHKEVIPPGALLIQLGGPGLRIGMGGGAASSISMGSNSAELDFDSVQRGNPELERRAQEVIDRCWQQGERNPIVAIHDVGAGGLSNAFPELVNDAGRGAIFDLKRVPLEESGMSPAEIWSNESQERYVLSILPQDLERFDAIARRERCPYAVVGVATEERQLRVVDGEGLPGLDTIRAQGENEVRPVDVPIDVILGKPPRMTRDVQRLPGVSEPLDLAGLDLTEAAYRVLRHPTVANKSFLITIGDRTVGGLSSRDQMVGPWQVPVADCAVTLADFEGTRGEAMSMGERTPLAMLDAPASGRMAVAEALTNLAAADVARLEDIKLSANWMAACGVPGQDAALYDTVSAVSELCQSVGLSIPVGKDSLSMKTSWDEVGEQRQVVAPVSLVVTAFAPVGDVRASLTPQLRTDAGDTVLILIDLGRGRHRMAGSILAQAYNQVGETVPDIDAPQDLRAFFVTIRTLAEAGTILAYHDRSDGGLFATLAEMAFAGRTGVSVNLDMLTFDPQSADWGDYKIRPEQVAVQREELTLKALFSEEAGAVIQVPASQRDAVMQVLRGAGLSAHSHVIGGLNGADEVEFYRDGRKVWSQPRADLGRAWSEVSYRIMARRDNPACAQAELDVWNDAKDPGLAPRVAFDPQEDVAAPFIGTGKRPRVAILREQGCNSQVEMGWAFDTAGFEAIDVHMTDLLSGRIDLAGMQGLVAVGGFSYGDVLGAGEGWARTIRYNDKLSDQFAAYFARPDTFALGVCNGCQMMAALAPMIPGAEHWPRFTRNQSEKYEARLSLVEVTASPSIFFAGMEGARIPVAVAHGEGYADFSQQGDAARALMAVRYIDNHGAATETYPFNPNGSPGGLTAVTTADGRFTVMMPHPERVTRNVMMSWAPAQWGERDAGGAFSPWMRIFRNARVWLK

SEQ ID NO: 50879 - protein, 342 aa, Bordetella pertussis
MKFRNIVGAALCAAFALGVAPAQAQNYKSEYKLSIVVGTTFPWGQGAVIWSDLVRERTEGRINIKVYPGTSLVQGDQTREFTAIRQGVIDMAVSSTINWSPQVKQLNLFSLPFLMPDYAAIDALVQGEVGKEVFKLIEKAGVVPLAWGENGYRQLSNSKHEIKTPADMKGLKLRVVGSPLYIDTFTALGANPTQMSWADAQPALASGAVNGQENPLSIYTGSKLYTVGQKYLTLWNYVADPLIYVVNREVWNSWSEKDREIVRQAALDAGKQQIVIARKGVTPEDPSLLKEIAGHGVTVSSLDAGQHAEFVAATKPVYEKWKKQIGAELVDLAEKSIAARKK

SEQ ID NO: 50880 - protein, 453 aa, Bordetella pertussis
MIAPALIRLARLHQRYETLMPEKKGSADAKVLHCSFCNKSQHEVRKLIAGPSVFICDECIDLCNDIIREEAQATARAAIRSELPTPAEIKTFLDQYVIGQTSPKRMLAVAVYNHYKRIRHGEIKGDEVELSKSNIMLIGPTGSGKTLLAQTLARMLNVPFVMADATTLTEAGYVGEDVENIIQKLLQNCNYDVEKAQRAIIYIDEIDKISRKSDNPSITRDVSGEGVQQALLKLIEGTVASVPPQGGRKHPNQDFVQVDTTNILFIVGGAFDGLEKVIRDRTEKSGIGFSAAVRAKSERGVGELFSEAEPEDLIKFGLIPELVGRLPVVATLDELDEAVLVQILTEPKNALVKQFQKLFAMEGAELDVRPDALKAISRKALKRKTGARGLRSILEGALLDTMYDLPSQGNVSRVVLEANAVEGVGKPLLIYADESEAASGEKAGRGEVRDAAA

SEQ ID NO: 50881 - protein, 817 aa, Bordetella pertussis
MSASQTLSSDPIDLPLLPLRDVVVFPHMVIPLFVGRPRSIRALEVAMEAGKSIMLVAQKSAGKDDPTPEDVYEIGCVASILQMLKLPDGTVKVLVEGTQRARIDSIEDVDSHFTCQVTPIEPDTLQGSETEALRRAIVAQFEQYVKLNKKIPPEILTSLAGIDDAGRLADTIAAHLPLKLEQKQKMLEVVVTAERLEGLLTQLETEIDILQVEKRIRGRVKKQMEKSQRDYYLNEQVKAIQKELGEGEEGADIEELEKKIIAAHMPKEARKKADGELKKLKLMSPMSAEATVVRNYIDTLINLPWKRKSKINNSIGNAERVLDDDHYGLEKVKERILEYLAVQQRVDKVKAPILCLVGPPGVGKTSLGQSIAKATNRKFVRMALGGVRDEAEIRGHRRTYIGSMPGKILQNMSKVGVRNPLFLLDEIDKLGMDFCGDPSSALLEVLDPEQNHTFQDHYIEVDFDLSDVMFVATSNTLNIPPALLDRMEVIRLSGYTEEEKIHIARDHLLPKLMKNNGVKDNELTVDDSALRDIVRYYTREAGVRALEREVGKICRKVVKQLLIKSDEAKAAGNKTAEAQTVLVNGDNLNDFLGVRRYTFGMAEKENQIGQVTGLAWTEVGGDLLTIEVADMPGKGNIQRTGSLGDVMKESVEAARTVVRSRARRLGFADSVFEKHDMHVHVPEGATPKDGPSAGIAITTAMVSALSRIPVRADVAMTGEITLRGEVLPIGGLKEKLLAAHRGGIKTVLIPEENVKDLAEIPDNVKNFLEIVPVRWIDKVLELALERMPEPLSEEEAVKEAIVAKPAEAGAADPVMKH

SEQ ID NO: 50882 - protein, 387 aa, Bordetella pertussis
MANNDFLFTSESVSEGHPDKVADQISDAILDAIFTQDPNARVAAETLCNTGLVVLAGEITTTANVDYIQVARDTIRHIGYDNTEYGIDYKGCAVLVAYDKQSPDIAQGVDRSSEDYLNQGAGDQGLMFGYACDETPDLMPAPIWYAHRLVQRQSELRKDGRLPWLRPDAKSQVTFRYVDGRPAEVDTVVLSTQHSPEISQASIREAVIEDIIKPSFPEGLITPKTKFLVNPTGRFVIGGPQGDCGLTGRKIIVDTYGGACPHGGGAFSGKDPSKVDRSAAYAARYVAKNVVAAGLARQCQVQVSYAIGVAEPINITVYTEGTGVIPDEQIAKLVREHFDLRPKGIVNMLDLLRPIYTKTAAYGHFGRSEPEFSWEATDKAAALKQGA

SEQ ID NO: 50883 - protein, 437 aa, Bordetella pertussis
MSTTMSKPGLDPIEHASRDEIAALQLERLKWTLSHAYQNVPHYKKAFDAAGVHPEDLQQLSDIARFPFTTKQDLRDNYPFGMFAVPRERVSRVHASSGTTGKPTVVGYTARDLDNWANLVARSIRAAGGKPGDIVHVSYGYGLFTGGLGAHYGAERLGCTVVPMSGGQTEKQVQLINDFRPDIIMVTPSYYCNILEEQRRQGMDPRQSSLRIGIFGAEPWTGQMRADIEAEGGIDAVDIYGLSEVMGPGVASECVETKDGPVVWEDHFYAEIVNPDTGEPVADGEPGELVFTSLTKEAMPIIRYRTRDLTRLLPPTSRSMRRIGKITGRSDDMLIVRGVNLFPTQVEELVLKIAQLAPHYQLVLSRSGNLDELEILTEVRAEFSTLTEAERAGLGKQLQHAVKSYIGVSARVQVADTGFVERTLTGKARRVIDKRPR

SEQ ID NO: 50884 - protein, 262 aa, Bordetella pertussis
MTYQDILFELAGGVARLTLNRPDKLNSFTARMHCEVADALGRIEREGARVLVLTGAGRGFCAGQDLSERRPTADGAPLDLGETVEKFYGPLVRRLAALPLPVVVGVNGVAAGAGANLALAGDIVIARESASFIQSFCRLGLIPDTGGTFALPRLVGRARAAGLALLGNKLSARQAQDWGLIWQCVADDEFDSALDGLAAHFAQAPTKGLAFTKRALQASLGNDLSTQLDLERDMMRELGRSADYAEGVAAFLDKREPQFKGK

SEQ ID NO: 50885 - protein, 326 aa, Bordetella pertussis
MSAAPAASPLPQPMADWLRHLQAHRRYSAHTLDGYTRDLRQLAQQAAAAGLPLERVANGHIRHFVARLHAQGLGPRSLARALAAWRGFYQWWAPAAGLPGNPATGVRAPKAPRGLPKALSVEQTQVLLDHAPARLATEPAALRDHAMFELLYSSGLRLAELVSLDLRYERTPEYESRSWLNRDDAEVIVVGKGGKRRSVPVGQSALAALDKWLQARPQLAAAGAGAQDAAALFVGARGRRIAPRVVQLQLARLAQAAGLPAHVHPHVLRHSFASHVLQSAQDLRAVQEMLGHANISTTQVYTRLDFQHLARAYDQAHPRAGRKTSR

SEQ ID NO: 50886 - protein, 322 aa, Bordetella pertussis
MSVVRAGALAVLVLGCLAALPAAAQGAHPFGVPEATGAPGWLAGWFGQVAMWQAHFYRQLTGAVRAWQAEGGAAWMLIGLSFAYGVFHALGPGHGKAVIASYVLANRQTARNGAWLALLSALAQALVAVALVTVLAVALGATAAAMNRATQWLETAAYAVVSLLGAWLVWQKALRPWWGSKGGHGHGHHAHHHAPGCACGHAHAPSARQAAGPLNARKAWAAILAVGLRPCSGALIVLVFALAQGFFLAGVVATLAMGLGTGLTVATLVALAAGARDAATRLGARLSTRRAAMLRQAIEALAAVAVLLLGLSLLGGQLAALR

SEQ ID NO: 50887 - protein, 414 aa, Bordetella pertussis
MLRGLPLAPVCAVILRPAANGGPSQPQHPSRGLRDSTLAFASPMNTARSLDKMVPVTILTGFLGAGKTTLLKRILTEYHGRRVAVIENEFGPESIDNDLLVQDRDEEIIELSNGCVCCTVRGDLMRTLSDLRARREAGELSFERVIIETTGMANPGPVCQTFFMDDDIAEYYRLDAVVTVVDAKHGMATLDAQEEAQKQVGFADRILVSKKDLVNDVDYAALHQRLVRINPRAPITPVHFGEADLKSIIDISGFNLNSILDIDPAFLADEHPDAAHDHHDHDHGHGHDHDHDHDHEGECGAHCNHHHHHHHAHHDDEIGAFVFRSNKPFDPARLEEFLGGVVQVYGPDLLRYKGILYMKGINRRMLFQGVHMMMGAEPGKAWTAAEKPSTKMVFIGRKLPQEIFTRGLEQCLVG

SEQ ID NO: 50888 - protein, 163 aa, Bordetella pertussis
MMTKVLFVCMGNICRSPSAEGVFRYLVNDAGMGDVVRVDSAGTHAFHIGEAPDARAQAAARKRGYDLTHCAARQVTADDFREFDLILAMDWDNLAALQQQCPKAYQHKLMLLMRFANEFEEATVPDPYYGGPEGFGKVLDYLEDACQGVLELVRKRATQYQAA

SEQ ID NO: 50889 - protein, 170 aa, Bordetella pertussis
MRLTTKGRFAVTAMIDLAMRQHSGPVTLAAISQRQNISLSYLEQLFGKLRRHELVDSVRGPGGGYSLARLARNVTVADIIFAVDEPLDATSCGGKRDCTSGNDGKPGKCMTHELWTTLNRKMVDYLDSVSLQDLVDQQRVRQLQEAANQAQGCSAVRVNRSTPVAANATA

SEQ ID NO: 50890 - protein, 154 aa, Bordetella pertussis
MATKAATKKSSKSTSDTAIDLPSEQELLAMPEADYMNDRQLAFFKERLKQLEQDILANAGETTEHLRETQFVPDPADRATIEEEHALELRTRDRERKLLKKVQQAIARIDSGEYGWCEETGEPIGVPRLLARPTATLSLEAQERREMRQKLYGD

SEQ ID NO: 50891 - protein, 179 aa, Bordetella pertussis
MEQFHATTIVCVRRGNHVALGGDGQVTLGNIVIKGTVRKIRRLYHDKVLAGFAGATADAFTLQERFEAKLEKHQGHLMRAAVELTRDWRTDRVLRRLEAMLIVADTEHTLVLTGNGDVLEPEHGLAAIGSGGAYAQSAALALLRNTELPPEAIVKQSLEIAGDLCIYTNQNHVIETLGA

SEQ ID NO: 50892 - protein, 136 aa, Bordetella pertussis
MAYSSKVLDHYENPRNVGSFDKGDDSVGTGMVGAPACGDVMKLQIKVNEAGVIEDARFKTYGCGSAIASSSLVTEWVKGKTLDEAMNIRNTQIAEELALPPVKIHCSILAEDAIKAAVQDYKTKHGAETPEAVAAN

SEQ ID NO: 50893 - protein, 154 aa, Bordetella pertussis
MSHDTLKARLSDSVKDAMRAKATDRLATLRFLLAAIKQREVDERRELSDAEITAVIEKQVKQRRESIAAFEQAGRTETAEHEKAELAVLQEFLPQAAAPEEVAAAVDAALAEVSAQGVTGAPAMGKVMAILKQKLAGRADMAALSQQVKARLLP

SEQ ID NO: 50894 - protein, 369 aa, Bordetella pertussis
MPSDFPPGQAGIHARFRVDYPEFSLDVDLRLPGRGVTALFGQSGSGKTTCLRCMAGLAPVSDGYLDINGEVWLDSAARRAVPTHKRALGYVFQEASLFEHLDVLANLRYGMKRVPPALRRVDLEQATGLLGIGHLLARMPAGLSGGERQRVGIARALLTSPRLLLMDEPLAALDVQRKREILPYLERLHDELDIPVIYVSHSPDEVARLADHLVLLEQGRAVASGPLDALLTRLDLPMAMTDDASVVVTGEAAGFDPGYALLTLQLPGGRARLRFVHQAAPAGQRLRVVVHARDVSLALQQPREGSILNVLAVRVLEMAPAANPAHVMVRLDADGTPLLARITRYSRDRLALAPEMQAWAQIKAVSLLA

SEQ ID NO: 50895 - protein, 251 aa, Bordetella pertussis
MKIRAIPTLWALAATLLAAPALAGEVQVAVAANFTAPMQAIAKAFEEDTGNRAVASFGATGQFYAQIKNGAPFEVFLAADDSTPAKLDAEQETVPGSRFTYATGALALWSARAGYVDDQGAVLKQGDFKHLSIANPKTAPYGLAATQVLAKLGLADKLAPRIVEGQSISQAYQFVASSNAELGFVALSQIYKDGKLTGGSAWIVPASMHEPIRQDAVILKKGQDNATARAFVEYLKSPRSAAIIKSFGYQL

SEQ ID NO: 50896 - protein, 300 aa, Bordetella pertussis
MALSAIEPFALDRSGATPLHAQVADAIRNHIRDHRLTAGTVLPSEAALCHSFGVARSVVRQALGALVAEGLIRRDPGRAPVVAPPREHRRMVQRSAGLYEQFAGLGVALRTRVLACRPAEPPPEVAAFFGTTETLLLERLRSVDAQPLAYVRTWLPRAAIAGLAADHLQDASLHRVLAQRFGLRPGRGRNRIRAVAAEAALAQALDVAPGSPLLMLEGQGLDQDGHPLEWFTTWHRPENLVFDVDVGQERESVQPALTCGTAAVAPPAVAAPPSGALDAVEQSLLQALQAVRRAREDQQE

SEQ ID NO: 50897 - protein, 348 aa, Bordetella pertussis
MSFQVTIEPSKHQFQAEAGQTVLDAALAAGIVLPYSCRTGACSTCKGKVVAGEVDAGPYPAQILSPEDLAQGYTLFCQAKPQSDLVVESTEVRLASDIQIRKLPSRVQTIERVAPDVAVLKLQLPASEQFRYYAGQYIEVILKDGKRRSYSMAGAPHTGSPLELHIRHMPGGLFTDHVFGAGDTQMKEREILRLEGPFGSFFLREDSDKPIVLLASGTGFAPVKAIVEHMIHNQIQRPVVLYWGGRRPRDLYHDALAQSWAGRLPGFRYVPVVSDALDEDGWSGRTGYVHEAVMQDLPDLSGYEVYACGTPLMVDAARREFSAQCGLPAEAFYADAFTSEADLAKATP

SEQ ID NO: 50898 - protein, 479 aa, Bordetella pertussis
MRASTNQTLQLDRRAALPALARSYWFKQAVPQESAPQGLRGRHSVDIAIVGGGFVGLWTALAAKAMQPTARVIVLERDLCGGGASGRNGGFAMSWWPKISTLLSMAGRDEALRLALASERAIGELERFCLARGVDAHFVRGGWFWTATTEAQRGAWASTLQACERVGHQPFTAVAPDELARRTGSPVHLEGIFDTATATVQPALLARGLRQAALDDGIEVYEGSAVRTLHTGAPAVLGLDEAEVRAGTVVLANNVWAAAIPELAPLITPVNSALVVTEPIGERLQELGWRGNEAITDSQLLVGYYRKTRDGRLVFGKGSGALSSGGRIGQVFSRDPGTEALTEADFRRTYPELRDVAIAQAWAGPIDRTYDSLPVFGRLRGADHICYGIGWSGNGVAPSWVGGQILASLALGRKNEWSESALVGRECRKFPPEPIRFMGGTLVRNAVLRKERDEALGRKPAWLDTRLATLAPAGLEDKS

SEQ ID NO: 50899 - protein, 318 aa, Bordetella pertussis
MRPQADLSTRQLRAFVMLADLRHFTKAAQACHLSQPAFSALIQSLEATLAMQLFDRSTRRVVLTQEGELFEPLARRLLADLGHAMTHIASFVELRRGRVHVAALPSLAAGWLPKVLHEFHAEHPDIELMLSDVLSDECIELVRSGQADFALASRGIRASDPAVLHARELCSDTFHLICRKDHPLAREPRLTLKHLAPWPFIHLTRNSSVRQTVEAALRPQVAKTILEVAQLATVAGMIEAGLGISVVPTFTLYQFERPGLLIRPISLPGLTRQIYIVRRQEERLSIAAQALYDLVVAKLGTPAASPARPRRRRTEKRD

SEQ ID NO: 50900 - protein, 363 aa, Bordetella pertussis
MALQCGIVGLPNVGKSTLFNALTRAGIAAENYPFCTIEPNVGVVEVPDPRLDKLAEIVKPERILPATVEFVDIAGLVAGASQGEGLGNQFLSHIRETNAIVNVVRCFEDPNVVHVAGKVDPIADIEVIETELALADLQTAEKALHRHSKTARSGDKDAQRLVTVLEKCIAQLNQAKPVRGLDLSDEEQTLIAQLCFITAKPAMYVGNVSDDGFTDNPLLERLAEFAKSRNAPMVAICAAIESEIVDLPEEDRQAFLSDMGMEEPGLNRLIRGAFTLLGLQTYFTAGVKEVRAWTIPIGATAPQAAGVIHTDFERGFIRAQTIAYEDFIACKGEQGAKEAGKMRAEGKEYVVKDGDVMNFLFNV

SEQ ID NO: 50901 - protein, 204 aa, Bordetella pertussis
MKFNATARSVQGSSASRRLRRAGRVPAIVYGGTAAPLNIELDHNEIYHALRKEEFHALILNMVIEGGKTEEVLLRSVQWHAYKPQVMHVDFQRVEANQALHTKVPLHFINAEVSPAVKLSGAIISHVLTELDITCLPALLPQFIEVNLGDLLGGGSIHLADIKLPKGVTFNAHGGDTNPLIAAAVVKGGGAADEGDAAAEQPAA

SEQ ID NO: 50902 - protein, 316 aa, Bordetella pertussis
MANDSFMIFTGTANTRLAVDVVNHLDMSLGKMTVGRYSDGEVMVEINENVRGKDVFVLQPTCAPTNDNLMEIMVMVDALRRASAGRITAAIPYFGYARQDRRPRSARVAISAKVVANMLQVAGVDRVLTMDLHADQIQGFFDIPVDNIYAGPILLGDIWRRNFSNLVVVSPDIGGVVRARALAKQLEADLAIIDKRRPRANVSEVMNIIGEVDGRTCIIMDDMVDTAGTLCKAAQALKDRGAGAVYAYCTHPVLSGGAIERIETSSLDELVVTDTIPLSEQAQACGKIRQLSCAALLGETILRISNAESVSSLFAD

SEQ ID NO: 50903 - protein, 619 aa, Bordetella pertussis
MYEDCAINRTGRVKLSLKHINFGVAALALALAGLQSLPAQAAEVRPRDATGPRLIQPSKQPETEVIRLRPGQLPYVSLTADIFYRIVGAELAAQRGMYGTAAATLVTLARETGDPRLARRGLEFQLAGGNLPGALDAARAWSSLAPNDIEASSTELALAAANGETSGLATALRKRIDTARDKPAAIVQAMGVLSRLNDRRLALRILDESLSDSARKLPAAHLALADVAQAAGDYPRAANEAYAALAADPKSEAAAQRVLEYGAKVDATRAQHQARAFINRNPDARKLRLMLAGQIADGGDYDGALAELQAMSRRSPEDFDLMFMQAQLAYKAGRLDQARGYLQQYLDVQNQRQMATAPGATDAGAAAADAHVLLSRIAEDQGRYDEAIRELGRIDDPAMRYSAHMRQATLRARQGRIDGALAMVDRADPQDDEERTLGVLTKAQILRDADQVDRAVAILVAADKAMPDTVEIKYELAMLYERQGRIDQLERLLREVIALDPDHAHAYNALGYTLADRNQRLPEALDLITQALELSPEDPFILDSMGWVKFRMGEPSAAIEYLKRAYALRPEADIAAHLAEVLWVQGERDSATELLRTAYAKDPKNRALLDTMRRLEVRP

SEQ ID NO: 50904 - protein, 281 aa, Bordetella pertussis
MILHWLMPELPEVETTRRGIDTVITGRTLRRLVVREARMRWPIPPALPDLLAGRTVLECGRRGKYLLLRFDHGVQIVHLGMSGSLRRVPEQEAPRKHDHVDWVFDHAVLRLHDPRRFGAVLWHPDEAGPIAAHPLLARLGIEPFDPRFDGRWLHAYFRGRRVAIKQALLAGDAVVGVGNIYASESLFRAGIDPRTAAQRVSAARCDRLAAAIRATLSDALDSGGSTLRDYVGASGEPGAYFAIHAAVYERAGLPCRVCGTPIRRLVQGQRATYFCPSCQKR

SEQ ID NO: 50905 - protein, 469 aa, Bordetella pertussis
MKEFWQTCVSRLEQELPPQQISAWIRPLVPLAYDEAQAVLRVAAPNRFKLDWVRKNFSHQIEALAAEWYQRPVQVTFELPGTSSAPRIPMAVPRPVAVSVPAVVAAVQQASEPAPPAPASADAANIVYERSRLNTDLTFENFVTGKANQLARAAALQVAENPGTSYNPLFLYGGVGLGKTHLIHAIGNAMVAAGTGVRVRYVHADQYVSDVVKAYQRKAFDDFKRYYHSLDLLLIDDIQFFSGKNRTQEEFFYAFEAMVAQRKQIIITSDTYPKELSGIDSRLISRFDSGLTVAIEPPELEMRVAILLRKAESEGVPMPEEVAFFIAKHLRSNVRELEGALRKVLAYARFHGRDVLTVDVCKEALKDLLSVSNGQITVENIQKTVADFYKIKVADMYSKRRPANIALPRQVAMYLAKELTQKSLPEIGDLFGGRDHTTVLHAVRKISDARAKQAELNHTLHVLEQTLKG

SEQ ID NO: 50906 - protein, 44 aa, Bordetella pertussis
MKRTYQPSVTRRKRTHGFRVRMKTRAGRAILNARRAKGRKRLAV

SEQ ID NO: 50907 - protein, 563 aa, Bordetella pertussis
MDIRRTVLWMIFSFSLLLLWNNWQIHNGKPSLFGGPAPEAAATQQPKADANGTAASSTASIPSSPAAAPAAASVPGAAAPAAAKSEQVVITTDVLRLTFDSNGAQLIRAELLKYPSSSQSDKPTVLMDRSADLVYVAQTGVVGAPQGESFPTHQTPFHLVSSERSLTGDTLDVVFEAESGGLKVTKTYTLHRGRYDVDVRHAMANTGGAPLNPALYLQLERDGTDPAGTSSFYHTFTGVAVYSEQDKFQKVTFSDIEKKKGTYIKQADNGWIGIVQHYFATAWIPAQGKQRTNELLQVQQNLYAARTIEAVGTIAPGSSANVDAHLWVGPQDQKAMAAVAPGLELVVDYGWLTIIAKPLFTLMTWLHGLLGNWGWTIVALTVIIKAVFFPLAAASYRSMARMKQVAPRLQALKEKYGDDRQKLNQAMMEMYRTEKINPLGGCLPMVVQIPVFIALYWVLLASVEMRGAPWILWVHDLSVRDPFFILPAIMMATMFLQIKLNPTPPDPVQAKVMMIMPLVFGGMMFFFPAGLVLYWCVNNTLSIAQQWTITRNLERQAAAAANR

SEQ ID NO: 50908 - protein, 313 aa, Bordetella pertussis
MSVSPTSPGSFGAGPVFDSELQAPAPSAQRRGGAAPVPPPVDRRGVEPGDPTLGMLPAPDLLAGGAVSRTRAALDDLDAARLGEDIYALMAVLQQASQQMRDAARIARDAEATRQTQALGDAASQMRQAASERMAGAIVAGAMQIAGGFVQLGAGLAAGLQAMGGAAAQAKGAAFSEQASTSRKVAAGLHDAPELQATVQARATQLEAQAASFGADAARSSAKSQRVSSVAQAGAAAAGGIGGLTSAAQERRAAEHEARRAELDVEAKVHETASRRADEAMQQMLDIIRGIREKLAGMEQSRSETARSVARNI

SEQ ID NO: 50909 - protein, 653 aa, Bordetella pertussis
MRVFFCNEADEALALPPPTRNPVRRLTIRFAIAILVLLTLSRLGLSAWQWERVQAAGGLGPIMLGGLRMDLRLLALVLALPAVLAPWFGHRAWAASATAWWYRVWWMLFVLLEVSTPQFIAEYDTRPNRLYFEYLVHPREVASMLWEGYKGVLLASFVVLVLAAWLAVRLFPTGRQDGFMKWWKRPFVTLAVLAVVVLAARGTLQHRPINASMVAFSSDAMVNTLPLNSLGNVLDAAYRMQDERSSAALYPPMKTEEMNRIVRAAAGLEDPPLDARYPSLHKQTATVRRDKPLNLVIILQESLGAQYVGSLGGRDLTPQLDRLAKDGWMFNRAYATGTRSVRGLEAVTAGFLPTVAEAVLKLPRSQTGFFTLADLLGRHGFHSRFIYGGEAHFDNMRGFFLGNGFNEVIDRQSFVDPVFVGSWGASDEDMFNQLDRLLRADDGKSTFTLAFSVSNHSPWEYPAGRIEPVGDPASVDNTVRYADWAMGQFFDKARKAPYWDNTVFLVIADHDSRVYGANLVPVRHFQIPALILGGTVPPRSDDRIVSQIDMGPTLLSLIGLDNVNPMLGSDLTQRDPNRAIMQYGDNFGYLKGDSLLVIEPGKDPREYRYTAAASMRDEKYVPIDLDPALRDEALAFALWPSWAYREERYKLPK

SEQ ID NO: 50910 - protein, 386 aa, Bordetella pertussis
MTARATLTAPVGKWFLLRGLPMTRIDAAPNPFHAAMQGRHDASANTSSGWLQGQRIAPAPTGISLADAAEELSLHMAQAAEEKHHSERKVTAERPMLWLDAAQLAELFSHTHDPDAQAKLEALTAELLRGRGAPMQLAAQAFPGVTQQYLALQHALQRGEHEDAAPHALEALRDALADLELAHGPEIRAGINTLPTAGAFARSADELAGFQHAYRDIALGQLSLARTLDLVLERYGNDDIHGALGALIQALGHDLAAATPSTDGVRLQVLASDLYQVEVAATVLEECNALKQRLGNAGSQECADAQGLMRDLVGISEDKWIAPARFEKLAERHGANALSERIAFLGGVRQILKDLPTQIYADMDVRATVLAAAQDALDNAIAMENA

SEQ ID NO: 50911 - protein, 521 aa, Bordetella pertussis
MPTPLPSSSAWLAFADAARHSSRRGARLRVIEAAGLRVDLTAQAHSDDLDSAAEDLLAQQDFDNARAQLFDGGPANWTEHRPAWHTALRAARPPTPVAGAILGERDRLRRFVQDADMRGAYRHVLHLGIGGSDWGPRMVTRALRHNGLKREVRFASNVDSHAVADALHHLDPHDTLIIVASKSFTTTEPLANAEVAMNWLRNAGVADPVRQVVAITANVDAALDFGISPQHIFRFWDWVGGRYSLWSAIGLPVALALGCDALDELLAGAAAMDQHFLHTPMRRNAPLQMALAGVANRSVLGYGSLAITPYDSRLTHLVPWAQQLEMESLGKVAGHDGSPAGVPTGPVVWGMTGTDCQHTFFQWLHQDTAGAPVDFIVCEQADHPYDHFHKLLIANCLAQRAALLRGKPFDEALKEARLVESDPQQAEILAHHRVHPGGRPSTLIMLPRLSAHALGALLAMYEHKVFAQGVLWGINPFDQWGVEYGKALARNIIRELENPSSEVNQQDPSTRYWIDALRKQP

SEQ ID NO: 50912 - protein, 2056 aa, Bordetella pertussis
ILDGGSTITGSLNGGSGNNSLTLKAGDGTLGRAIRNFGTITKQEAGTWTLNGQVGRNDNNLKSTVKVEGGTLVLRGDNSGATQGGVLQVSAGATADVTAASAMQSISNAGTVQFTQDSNAAYAGVLSGTGSIVKRGGGDLTLTGNNTHTGKVVVEAGSLSVSAANNLGGAGSSVQLKGGALALKKTIVVNRGLTLDSGAQTLIIEPGTTTTWQGQVSGAGKLVTQGGTLVLEHASNTYSGGTEINNGTLRAAHDASLGSGTLALKNSQLAATDSFTATRALTLAGNESIDVAATKILSWNGEISGAGTLVKEGQGTLLLRGTNQQNGGTTVNAGTLQISRDANLGRGALALNDGTLQSTGSFATSRAATLRGQATMEVDASHTVTWNGELSGGGMLRKSGQGTLVLAGANTYSGGTVVEAGALRAGHEDNLGRGAITLQGGDLLAGGSFSSNRDLTLVRGSLDVARDATLTWSGAISGAGDLVKKGDGRLTLTGVNEYAGQTVLRGGKLRVARDENLGRGALVLEDNTVFESMGSHAATRQVTLKGAPKVETLDGTTLEWRGTVDGDGKLYKQGGGTLVLSGNNTYAKGVEVWGGVVQVSRDQNLGAANGAVTLNGGGLAANGDFTSNRQLELTAGAKAIDVAAGKDVTWRGVVNGAGALTKAGDGTLALAGANTYTGGTRLQGGTVQVSRDNNLGQAAGAVTFDGGRLANTGSFATARTATLNKAGQIDTDRGTTLTWNGAIGGKGELRKQGAGTLVLGGANTYQGDTRVEAGTLQVSADANLGQGAVHLHDSRLATTGTFATSRRLELTGRGAVQAAAAATLDWRGTVAGAGTLVKEGAGTLVLAGDNQHAGGTEVRAGTLQVSRATNLGPGALALENAALATTASFTATQAATLTGNAAIDTAAGTTLGWEGAIGGTGSLHKKGEGKLVLVKDNHHDGGTTIHAGTLQVSRDANLGSGQSAVTLDGGALAVSAGFSSGREIVVGAGHGALSVTGGHTLQWQGQVGGAGALTKTGDGTLVLEHDNTHAGGTRITGGVLRVSRDENLGEAHGMLTLDGGTLSTTAGFASRRNATVGNGGGRIVVADAATLDLQGDVAGAGRLVKEGAGTLALGGTNTYAGGTVVEAGTLRVARDANLGGGALTLNNSRLHATAGFATGRDATLSGRASIDTDDRATLQWRGTVNGAGRLVKQGLGTLVLDGDNRYAGGTEVNAGTLQVARDANLGAGDVALNGSSLAATASFATARTATLSGAAAIDTADGATLDWNGLLDGDGALVKQGNGTLALAAANRYGGGTIVKAGAVRIARDANLGRAGTGVTLDGGALATTADLATGRAATLGAANGTLDVAAGTRLDWNGAIGGAGALTKTGAGTLALNHDNQHAGGTLVHGGTLRIARDANLGAAGTAVTLDGGTLATTASLAPERALRVGARNGVLLPDAGTTLDWRGVVAGAGKLTKAGPGTLVLSADNRHGGGTAVTGGTLQVSRDANLGAAAGALTLDGGTLLSTASFASARVATLDAAGGTFVTRDGTRLDWDGAIGGAGGLVKEGAGELRLGNANTYQGPTRIAAGRLAVNGSIASPVTVEQAGVLGGTGRIVGDVANRGVVAPGNSIGALTVAGNYAGTGGSLEVEAVLGGDAAPADRLVLDGGAASGVTPVVVKPQGGVGGLTLRGIPVVVAQGGATTAPGAFRLAQPLVAGAYEYQLLRGAGDGAAAQAQDWYLRTSRVERDQGGQDRQGRALLPARGGAVCRHAHADAHGRHGSAGQLPRTRGPARRGRARGRRRSPAWVWARTFGRRFERSAGSEAAPSFNGSLAGMQLGADLYTRRSATRHADAFGVFGGYATARGDVRGLARGEIQAVGTSTLRAAQLGAYWTHTGPSGWYVDTVLAGTRYKQQTSSSAHVGATSRGWGMMASVEAGYPWQLNPRWQIEPQAQLVYQQLGIANGADRVSSVSYKTPDALTGRLGTRLAGQYAYGKAQLRPFMGVSLLHDFTGADTVTFAGVHSVRASRQNTAVDLKAGVDTQLGKSVGLWGQVGYGKSVGSGDGSDRGWSANL

SEQ ID NO: 50913 - protein, 182 aa, Bordetella pertussis
MKTVGDKLEPFKVTGVKPGFNQHEENGVSAFEDITESSFPGKWKVIYFYPKDFTFVCPTEIVGFNKLAKDFEDRDAVLLGGSTDNEFVKLAWRREHPDLNKLGHYQFGDTTGALIDQLGVREKGAGVALRATFIVDPDNTIQHVSVNNLNVGRNPEEVLRLLDGLQTDELCPCNRSVGGATL

SEQ ID NO: 50914 - protein, 474 aa, Bordetella pertussis
MARPGQERRLVPRMRRLFRNLTSRLRLGLFGRTFLLLAALMLVSLGAWLQVFFSMELGPRANQMAQRVITAVNITRTALVYSHTDERSKLLLDLATNEGIQVYPRELTDFTEALPDDDYWQRVAQHIRVRFGPETQIAWGVNQVPGFWVSFQIDQDLYWLVFEREQIGLTGGIEWLGWGATALLLSLVGAAVSVGFVNRPLSRLARAAQVLSRGETPAPLPEQGPLEIRDLNASFNRMAKDLRQAEADRELMLAGISHDLCTPLARMRLEIEMSGVSEDARQAIDEDLGQIDHSIGQLMEYARPAGTLPQLATDISSVLAELYERERSHTASLGGELEASIDPGLRARITALDLKRIVSNLIENARRYGRSSDGLAHLAISVHSEGNILAIEVADRGPGIAPEEVDRLLRPFSRGEAARTGVSGAGLGLAIVERLLKHVGGSLRMLPRQGGGLIARIELPKAKFRNYQLDSENQ

SEQ ID NO: 50915 - protein, 641 aa, Bordetella pertussis
MCGIVGIWGPLRDKANVLAESCRRIRHRGPDSNGYWEDAEADLALAHVRLAILDLTEAGHQPMVSACGRYVIVLNGEIYNHMELRERLQQDGLAPAWRGHSDTETVLACFAGWGIEQTLQAAVGMFAIVLWDRAERKLALMRDRMGEKPLYYGYSQANLLFGSELKAFMPVPGFGRELDRNALASFMRHNYIPAPQSIYAGIRKLPPGAWVEIDAAQMRRGELPEPQVYWSARRAADQGLGDRRRFESDAQAIDALEQVVSQAVRGQMLSDVSLGAFLSGGIDSSTVVALMQAQSAQPVRTFAIGFHEKGYNEAEHAKAVAAHLGTEHTELYVTAEDGLAVVPSLADMYDEPFADSSQIPTSLVTRMARQHVTVALSGDGGDELFGGYSRYFRVDNWWRKCAAMPGPLRHLAGAALRGSAALPGAGAWRGKVGKLGELLGADTRGEFYRLFVSYWADPGRVVIGGTEPLSPFEQPMEGSTFDAMMKLDTVTYLPDDILVKVDRAAMAVSLETRVPLIDHRVYEFAWQLPFEYKVRGGTGKWLLRQLLYRHVPQAMVDRPKRGFAVPLAAWLRGPLRDWAEALLDPARLRQEGWFEPEPILRKWREHLSGHRNWDSHLWGVLMMQAWLDRYRAGAGDEAGRR

SEQ ID NO: 50916 - protein, 1175 aa, Bordetella pertussis
MRLTQLKLAGFKSFVDPTVIPVPSQLVGVVGPNGCGKSNIIDAVRWVLGEAKASELRGESMQDVIFNGSGNRKPAARASVEMVFDNTEGRAAGQWSAYSEIAVRRVLTRDGTSSYYVNNQQVRRRDIHDIFLGTGLGARGYAIIGQGMINRLIEARPEELRVFLEEAAGVSRYKERRRETENRLSDTRENLTRVEDILRELGSQLDKLEAQAEVARKYRELQADGEKKQFALWLLKETGARDERERKNQDMARAQNDLEAAIAGLRAGEAELESRRQAHYAASDAVHAAQGQLYEANAQVSRLEAEIRHVVDSRNRLQARREQLQAQIAEWNTQQEHCTEQIALAEEDLATGAARTEEARAAAEDAQAGLPAIEARVRDAAAGRDDMRAALARVEQNLALVAQTQRDADRQLQTLEQRRERLQQELRELHTPDPERLEQLAGDRLAGEDQLEAAQAELATLEGRVPEADAERSRAQAAAQQDAQGLARLEARLAALVKLQEDVQKQGALEPWLAKHELAGLGRLWQKLHIEPGWETALEAALRERMAALEVRSLDWARAFADDAPPARLAFYQVPVAAPAPAAPQGQTPLASLLRVTDPDLRTLLNQWLAGLYTAADLTQALGGRASLPAGAAYVVKAGHLVDAHSVRFYAPDSEQAGLLARQQEIENLQREIKAQQLIADQARAAVARAEAAWQQVSQAIAPARQRVVEVTRRVHDIQLEHSRLQQQAEQSGERAARLRQDLEELAAHEEDLRATREEAEVRFEALDGELAEHQSRFSDAEIDGETLSAQADAARTRLRELERAAQEAEFAERGVQVRITDLQRNRQLAADQSQRAATELQQLETDLVDLDASASQAGLQDALELRAEREEALTRARLELDNLSALMRGADEERMQQERGLEPLRARITELQLQEQAARLAEEQFTEQLNAREVDRETLARELAEMPDEWRKASWLQSEVGRISRQVDALGPVNLAALDELNTSRERKTFLDAQQQDLLTAMETLEDAIRKIDRETRELLQETFNTVNRHFGELFPKLFGGGEARLTMTGDEILDAGVQVMAQPPGKRNSTIHLLSGGEKALTATALVFALFKLNPAPFCLLDEVDAPLDDANTERYANLVSNMSEQTQFLFISHNKIAMQMAKQLIGVTMQEQGVSRIVAVDIDSAVQMAAEA

SEQ ID NO: 50917 - protein, 696 aa, Bordetella pertussis
MAQAGPTPQQAIARLRAEIEQHNIRYYVHDDPSVPDAEYDALMRDLQALEAEHPELVTPDSPTQRVGAAPLAEFGSVRHAVPMLSLGNAFDEEDVRAFDKRVADTLRGAGLLGLDQQVEYFCELKLDGLAISLRYEEGRLAQAATRGDGQTGEDVTANIRTIKGVPLRLHGAPRVLEVRGEVLMNRAEFERLNRTQAARGEKVFVNPRNAAAGSLRQLDPRITAQRPLRFFAYSWGEVHGLPEGMPTRFDEPAPGVRVASTLPRDTHGGMLDWLAELGLPVNLRHNHRERGADGLLAFYERIGKLRADLPYDIDGVVYKVDALPSQRVLGFVARAPRFALAHKFPAEEAVTQLLGIEVQVGRTGAITPVARLAPVFVGGVTVTNATLHNEDEIRRKDVRIGDTVIVRRAGDVIPEVVGPVLEKRPADAREFVMLTACPICGSAIERPESEAIARCTGGLFCAAQRKQTLLHAAGRKALDIEGLGEKLIDQLVDADRVKSLADIYSLTAFELAALERMGKKSAENLVAAIDQARRPALGRLLFALGIRHVGETTARDVARHFGSMERIMDASEEALLAVPDVGGVVAGSIRRFFAEPHNREIVEQLTQQGVHPQAEAEPEGTSLAGKTFVLTGTMPNWTRDEATRRILAAGGKVSGSVSKKTAYLVTGEDAGSKLTKAQELGVPVLDEDGLKALLGL

SEQ ID NO: 50918 - protein, 367 aa, Bordetella pertussis
MTWLYICVVAFMVGGLIVASERWHGAFTGDSDLNKPQASHTRATPRVGGLAVLAGSLAGLLVLGPSNMTLTWLWPALFVAALPVFVAGLLEDITKDIGASKRLLAAFASAAIAWWLLGGVSRVGIAPVDWVLSFWPVSLIFTMFAVGGCTHALNIVDGMNGLAGMIATLMAVSISLVALQVGDMPIFMIAAALASATLGFLVWNFPFGRVFLGDGGAYFLGFMLAELAVLLVVRNPSVSPFYALAVLFYPVFETGFSIWRRRFKRGVPVDQPDALHLHQLVFRRLVRVTFSRGRRHAVPALCNALASPYMWVLALIGLVPATIWWDNAWFLCASLVVFAAVYTWLYMRLVSWRRPGWLLLPSVIRTH

SEQ ID NO: 50919 - protein, 222 aa, Bordetella pertussis
MSTSSSASALGRRAGPLDGLIGEIDRALRVLSGAATAARPYPAQAPEAPDALSEREKRHAAGLMRVNHVGEVCAQALYRGQAAACREPAARALLREAAAEEVDHLAWCHERLRELGSRPSLLNPFWYTGSFALGVLASYAGVPRNLGFMAETERQVEAHLDGHLRTLPVQDQRSRDIVQKMKEDEAQHRASAERAGGVPLPAPVRGAMRAMSKVMTSTAYWL

SEQ ID NO: 50920 - protein, 437 aa, Bordetella pertussis
MSNTYFPRWRLADDTVPGAVIAPDERLSWPKNIAMGAQHVVAMFGSTVLAPLLMGFDPNVAILMSGIGTLIFFLFVGGRVPSYLGSSFAFIGGVVAVTGYVAPGANANIGVALGAIIACGLVYALIGLVVWAASARGNGARWIEAMMPPVVTGAVVAVIGLNLAPIAAKGAMGSSGFEASMALMTILCVGGIAVYTRGMVQRLLILVGLVLACVIYAVCANGLGLGAPMDFAKVAAAPWFGLPSFAAPVFEPQAMGLIVPVAIILVAENLGHVKAVAAMTGQDLDRYVGRAFVGDGVATMVSGAVGGTGVTTYAENIGVMAVTRIYSTLVFVVAAVIALVLGFSPKFGALIQTIPGPVLGGMSVVVFGLIAIAGARIWVVNQVDFSDNRNLIVAAVTLVLGAGDFSVKLGDFSMNGIGTATFGAIILYALLGLARRR

SEQ ID NO: 50921 - protein, 323 aa, Bordetella pertussis
MKQYLDLVQSILDQGAWQENRTGVRTLSLPGAALRFDLQQGFPAVTTKKLAFKSAIGEMVGFLRATRSAAQFRALGCKVWDQNANENEQWLANPYREGPDDLGPVYGVQWRHWPAYKLLPSSAGGQVADALARGYRQVAEVDENGAPHVLLYKAVDQLRQCLDTIRQSPGDRRILFHGWNWAQIEEMALPPCHLLYQFLPNAGTREISLCLYIRSNDVGLGTPFNLTEGAALLHLVGRLTGYKPRWFSYFIGDAHVYENHLPMLREQLAREPYPAPQLVLSDRIPDFAVTGKYEPQWLEQVEPGDFTLSGYQHHAPLTAPMAV

SEQ ID NO: 50922 - protein, 524 aa, Bordetella pertussis
MSSLEQHMQPPGHTWWDIIEEHARRFPERDALAHGDGAITYGELAARVRRCAAGLSARGIGAGDCVALLAPPTPDAMVCLLAAARLGALWVGLNPRYQPREMAYVIGHAQPKLVLSVREFEARRYADDLDAALATLAPQARRPDLLFYDSRASCDEAMLHALCDAPDAPCPAPFEDAAQPCMLVYTSGTTGIPKGVLLSQTALIYRSTVQARTFATQSHPVVINFAPINHIGGMHFRGLSQILAGGTIIYQERYRPAEVMGLIEKHRVNMLMLGSTMLQMLIREPSFDMSIMRGMEWFIFSGAAIPMPILQRVKEHCPRIGSTYGLTESCGSVSYIVASDSLEAAAYTVGRAIPEGQLRVADEQGQPLPAGTQGELQVRGQYCMNGYLRDAAATAGAFTRDGWLKTGDMAQRDDDGNFRLVGRIKEMYKSGGYNVYPREIEVVLEQHPNVLMSAVIAVDDELYQQVGHAHLILRPDTEVSEPELVQWCRERMANYKVPKRIFVRNSLPMLSIGKVDKIALRQQH

SEQ ID NO: 50923 - protein, 165 aa, Bordetella pertussis
MSATPLLSLVVAYSTNRVIGRDNALPWKLPGDLAHFKRTTLGHPIIMGRNTWESLGRPLPGRTNIVITRNPAYDAAGAVVVGSLAAAIQACGDAAVACVIGGAQIYAQALPLAQRVVATEVHAEIEGDAFFPPLPAGQWRETQRAAQPAENGLRYDFVEYERVAG

SEQ ID NO: 50924 - protein, 413 aa, Bordetella pertussis
MNMPAPAATRRDRIEDELGAHNYQPLDVVLARGSGVWLYDTAGRRYLDCLSAYSAVNQGHCHPRILAAMVEQAQRLTLTSRAFRHDQLAPLYEDLARLTGAHKVLPMNSGAEAVETALKAVRKWGYEARGVPAGQAEIIVCANNFHGRTLGIVGFSTDPDARGGYGPFAPGFTVVPFGDFAALQAAVTPRTVAFLVEPIQGEAGVILPPPGYFRQVRKLCSERDIVLILDEIQTGLGRTGAFLAEAHEGIEADVTLIGKALSGGFYPVSAVLSNQAVLGIFQPGQHGSTFGGNPLACAVARAALRVLHDEGMIDNAREQGAYFMQRLRALPGPVREVRGRGLMLALELEPDAGPARAYCERLMARGMLVKDTHGQTLRLSPPLIVTREQIDWACAQLAHVLAHSAPGSSGGPS

SEQ ID NO: 50925 - protein, 189 aa, Bordetella pertussis
MKKFLFDLFPLILFFVAYRYADIYAATAVAITASIAQILWLRLTGKAIEGMHWINLSVIVIFGGATLWLHSDVFIKWKPTVLYWLFGGALLGARYLFGRNLVRRLLGKQIALPDPVWERLNLSWALFFVAAGAVNLYVAFSGHFTESQWVNFKVFGLMGLLVAFVIAQSLWLGKHLQASDTPDQDRNED

SEQ ID NO: 50926 - protein, 340 aa, Bordetella pertussis
MKRIPSILLATVLAAATGVAAANTTLTVYTALEADQIKAYQAAFEKAHPDIRIQWVRDSTGIVAAKLLAEKNNPKADVIWGLAGTALGLMDKEGMLLPYAPKGLDQIAANMRDGKDVPAWVGMDAYAAAVCVNTIEASKQNLPMPTSWQDLTKPEYAGKIVMPNPASSGTGFLDVSAWLQMFGEEKGWAFMDALHKNMGSYTHSGSKPCNMAAAGEYPIGISFDYRAAKLKADGAPVEAVFPSEGLGWEVEATAIVKGTKHLEAARKLADFSASRQANELYKSNFAVLAIPSVATVNPHLPANLSERMIKNDFVWAATNRDRIIAEWSKRYDGKSEPKKK

SEQ ID NO: 50927 - protein, 214 aa, Bordetella pertussis
MHDISSLTTRTKALPPLRVGVGGPVGSGKTTLLEMVCKAMYPQFDLIAITNDIYTKEDQRLLTLSGALPPERILGVETGGCPHTAIREDASINLIAIDQMLEQFPDADIVFVESGGDNLAATFSPELSDLTLYIIDVASGEKIPRKGGPGITKSDLFIINKTDLAPYVGADLAVMEADTRRMRGDKPFVMCNLKTGDGLDQVIAFLKTEGLFRG

SEQ ID NO: 50928 - protein, 439 aa, Bordetella pertussis
MSSPKVGFVSLGCPKALVDSERILTQLRTEGYEVTPEYNDADVVVVNTCGFIDSAKAESLEAIGEAIAENGKVIVTGCMGVEESVIRQVHPSVLAVTGPQQYEEVVRAVHGVAPPRQDHNPYLDLVPPQGVKLTPRHYAYLKISEGCNHRCSFCIIPSMRGDLVSRPVGDVLSEAERLVRAGVKELLVISQDTSAYGVDIKYRSGFWNGRPVKTRMTELCAALSELGVWTRLHYVYPYPHVDEVIGLMADGKVLPYLDIPFQHASPRILRAMKRPAFEDKTLARIKRWREECPDLTLRSTFIVGFPGETEEDFQYLLDWMSEAQLDRVGCFQYSPVEGAPANTLDNPVPDEVKQERWERFMEHQQAISTARLSTRVGREIDVLIDSVDEEGAVGRSSADAPEIDGCVYVDSEQPLKAGDMVRVRVTDSDEYDLWGERIA

SEQ ID NO: 50929 - protein, 208 aa, Bordetella pertussis
MQLVTSAWTLERVMKIQNICVYCGSNSGRQPEYIEHAQGFARELVKRGLGLVYGGASVGIMGAVADTVMAEGGRVIGIIPEALMKKELAHRGLTELHVVQSMHERKTLMAQKADGFVALPGGAGTLEEIFEIWTWAQLGMHQKPCGLLNIAGYYDLLGQFLNHTVDEAFMRPQHRAMLAIDHDPAALLDHFASYVAPTVSKWIAPGEH

SEQ ID NO: 50930 - protein, 329 aa, Bordetella pertussis
MASNIVKAVRIEQHGGPEVLQVVDVEVPPPAANEVTIRQHAAGLNFIDIYFRTGLYPHPLPHGLGFEGAGVVEAVGADVRHLKKGDRVAYGQSPLGAYAQARNVPAAQVVKLPKGIGFDEAAALMLKGLTVQYLFRQTYRLQGNETILFHAAAGGVGLIACQWAKALGVKLIGTVSSPEKAELARAHGAWATIDYSRENVVERLLELTGGKKVPVVYDGVGKDTWEISLDCIEPRGLMVSFGNASGPVAGVNLGILNQKGSLYVTRPSLGVHVNTHEKLAAAADELFGLVLKKKIKVRIDQRYSLAQAGDAQTALAGRKTTGATVLTLD

SEQ ID NO: 50931 - protein, 316 aa, Bordetella pertussis
MNRNRQLSDPSRFSGMAAGFFMATLGAVLFSGKAIVVKFTYRYGIDAVTLIAFRMLFAMPFFAAVAWWQARRAARGELPVLSWRERGQLCALGLLGYYLSSFLDFLGLRHITAGLERLILFLSPSLVVLLSAWWLKRPVTRRQWGAMLLSYVGVALVLSHDLSQSGAGADVLTGSFFVFCSALSYSVYLICSGELVERVGATRLVTYAMLVSCVASLIQFFLIHPASVLVQPAAVYGYSVIHATVNTVLPVFMLMWAVALVGAPTASLLGMVGPVSVLFLAAWFLDEPITVWQLAGTALVLAGVFVLAGRRRPARP

SEQ ID NO: 50932 - protein, 391 aa, Bordetella pertussis
MIITSLLDTDLYKFSMMQVVLHHFPAAQVEYRYKCRTPGINLRPYLDEIRAEVHELCQLRFTSEELDYLRGLRFIKSDFVDFLGLFHLPERCIFIGEGEQPGEISITVKGPWLHTILFEIPVLAIVNEVYFRNTRRNPDWEEGRKRLQSKMNLVLDDPALADFRVAEYGTRRRFSKVWHEEIVSTMKARMGVHFAGTSNVLLAMRHGVLPLGTMGHEYLQACQALGPRLRDSQVFALEVWAKEYRGDLGIALSDVYGMDAFLRDFDMYFCKLFDGARHDSGDPFVWGERLLEHYRTNRADPRAKTLVFSDSLTFPRAIELARQFAGRCKVSFGIGTNLTNDLGHEPLQIVMKMVRCNGQPVAKVSDAPEKTMCDDPAYLAYLRQVFQLPPA

SEQ ID NO: 50933 - protein, 299 aa, Bordetella pertussis
MKLDHGNLRALAAVVREGSFERAAAALSVTPSAVSQRVKALEDRMGRLLVQRTVPARATDDGQVLVQLAEQAALLEHDALNRLGVAEDEVPHASIPVAVNHDSLETWFVDAAVRFAARSRATLDLQSEDQDHTAALLRKGAVLGAVTTLADPVQGCRIHALGSMRYVACCTPAFHQRYFAQGVSARTLASAPVLVFNRKDALQARYAHRIIGRAAWEPPVWWLPSSRAFVQATLGGLGWTMNPLPLVQAELDAGQLVPLRARAWEDVPLYWQHWRVNSQAMEALTDAVLAAARALVRRR

SEQ ID NO: 50934 - protein, 277 aa, Bordetella pertussis
MLRWLRGRGAKAGEVAAMQARIPPDLWRRTLHAYPFLAALSEAEQQALQARAAWLLASKNINGAHGLEITDFMRLSVAAQAALPVLNLSPTLYEGWDEIIIYPAGFSIQRERMDEDGVMHEYIEEAVGEAWEGGPVILSWSDAAGSDGAFNVVIHEFAHKLDLLAGQADGMPALAAHPDIDPRQWRRVLEDSLDRFAAAVEAVERAIPAHVDPESPQADPWYARLPLDPYAATDEAEFFAVSSEHFFVEPEPLADALPQWYALLRAYYRQDPLARLA

SEQ ID NO: 50935 - protein, 737 aa, Bordetella pertussis
MSATSAPDTPTPFDDAWRQLAAAGLDDAGQRQLAHAAAWAWPRFEAQKALTGEPLASHAAGAVRILASLHTDQATRVAAVLASLPADLNAPAPTLRNDPVASEFGVEVARLVQGARALLRLGIVARHASDSEAESGSQKEMQRKMLLAMAADLRIVLMRLASRLQSLRWHAETKTPCAAGFARETLDLYTPLANRLGIWQLKWEMEDLAFRFLEPERYKQIAHLLEEKRVEREAFIAEAIARMQEALARAGVVAEVSGRPKHIYSIWNKMRLKGLDFSQMYDLRALRIIVDDVRACYTALGLVHEMWTPLPEEFDDYISRPKPNGYRSLHTVVTDAQGRAFEVQIRTREMHQFAEYGMAAHWRYKEAGARGGQVAASSEYDRQLSWMRQLLAWNSDVEDEGEAARRADQRIYVLTPQARVIELPAGATPVDFAYHLHTDLGHRCRGTRVDGQMVPLNTRLATGQTVEVIAAKSGGPSRDWLNTQLGYLASPRARAKVRMWFNAIELQQRITQGQALVEKELQRLGKTAVNLEQLAQGLGFARADDLYVAAAKDEFSLRQIDAVFQQPAPVAEPEPAALAHARSADSAEKSGKSGVLVVGVGSLLTQLARCCRPAPPDEIAGFVTRGRGVSIHRADCPSYKALAEREPERVIEVAWGKTSDSFYPVDISVRAQDRPGLLRDLSEVFARQRLNVVGVNTQSRQSLAHMVFTVEVRGGESLHKALDALGEVAGVTSAARR

SEQ ID NO: 50936 - protein, 399 aa, Bordetella pertussis
MKPYDLPDARGHFGPYGGVFVAETLMHALDELRAAYDQCRVDPSFIDEFNYELKHFVGRPSPVYHASRWSQRLGGAQIWFKREDLNHTGAHKVNNCIGQALLARRMGKPRVIAETGAGQHGVATATVAARYGMECVVFMGSEDVRRQASNVYRMKLLGATVVPVDSGSCTLKDALNEAMRDWVTNIENTFYIIGTVAGPDPYPRMVRDFQTVIGQECLTQMPEVIGRQPDYVVAAVGGGSNAMGIFHPYIPYENVRLIGVEAAGEGMETGRHAASLAAGQIGVLHGNRTYVMQNADGQVQETHSVSAGLDYPGVGPEHAWLKDSGRAEYAGITDDEALAAFHDCCRIEGIMPALESAHAIAQAVKMTPALSKDKVILVNLSGRGDKDMHTVAERAGLQL

SEQ ID NO: 50937 - protein, 545 aa, Bordetella pertussis
MTMNDQETLLSVRDLTIALPRGGDREYAVRDVSYDIRVGEILCIVGESGSGKSMSANAIMGLLPDYLQPQGGQILFRGKDLLRQDEATLLSMRGKDMAMIFQEPLSALNPLMTVGEQIGEVMRVHDAYPGPQRQRRVLELLAFVGLPDPAVLCDVYPFRLSGGQRQRVMIAMALALEPALLIADEPTTALDVTTQAQILALIARIQKEKGMGVMFVTHDFGVVAEIAHRVAVMEQGILVEQGPAEEVLNRPQHPYTRRLIAAVPHRRADARPPVAQDAPVLAVDKLCKTYVTGHGWFGKKRVVRAVDEVSFEVRRGETLGIVGESGSGKSTIGKCLLKLIGIDGGKLVFNGRDIAGLSESQFRPLRKDIQMIFQDPFASLNPRQTVGRIISDGPVANGKTRAQAEARARELLTLVGLDPSAFDRYPNQFSGGQRQRIGIARALALEPQVLVADESVSALDVSVQAQVLQLLHELQQRLRIALIFITHDLRVAAQICNAVLVMHRGKVVEYGTPAQIFDQPQNPYTQQLIAAVPGQHWDPTKAQTA

SEQ ID NO: 50938 - protein, 292 aa, Bordetella pertussis
MSWIEKLLPPRINKNSDSGARRVPEGLWVKCPSCESVLYSEDLAANLHVCPKCDHHMRIGARARIDSLLDIEGRVEIGQTTRSVDTLKFKDSRKYPERVQEAMKQTGETDALVVMSGSIRGVSAVLACFEFEFMGGSMGSVVGERFVRGVQAALENKTPFICVAASGGARMQESLLSLMQMAKTNAMLTRLSAAGLPFISVLTDPTMGGVSASFAFVGDVVIAEPKALIGFAGPRVIEQTVREKLPEGFQRAEFLLKTGAIDMVVDRRQLREEIARLLALLGNESADIVAAA

SEQ ID NO: 50939 - protein, 593 aa, Bordetella pertussis
LDKRILILDGAMGTMIQRYKLGEADFRGERFAEHHKDLKGDNELLSLVRPDVIAEIHRQYLEAGADVIETNTFGATSIAQGDYDLPELAYEMNLESARLARAACDAYSTPEHPRFVAGALGPQPKTASISPDVNDPGARNVTFDELRAAYVEQLNGLLDGGIDIVLIETIFDTLNAKAAIFAVEEAFEARGVRLPVMISGTVTDASGRILSGQTVEAFWNSVRHARPVTIGLNCALGAALMRPYVAELSKICDTYVCVYPNAGLPNPMAETGFDETPADTSALLEEFAQAGLVNMAGGCCGTTPEHIRAIAGKVAALTPRAVPEVPVKTRLSGLEALNIDDETLFVNVGERTNVTGSKMFARLVREEKYDEALAVARQQVENGAQIIDVNMDEAMLDSVACMHRFLNLIASEPDIARVPVMIDSSKWEVIETGLKCVQGKAVVNSISMKEGEEPFRHHARLCRRYGAAMVVMAFDEQGQADSLERRKEICGRAYRILVEEEGFPPEDIIFDPNVFAVATGIDEHNHYAVDFIEGARWIRANLPHARISGGISNVSFSFRGNEPMREAIHTVFLYYAIEAGLTMGIVNAGQLGV

SEQ ID NO: 50940 - protein, 429 aa, Bordetella pertussis
MGPRIITHGEGVYVFDDQGNRYLEGMAGLWSVAVGFGEQRLVEAAARQFQELPYYHTFTHKSHPSVIALAERLIGYTDGRMAQAFFTNSGSEANDTVVKLVWYYNNALGRRDKKKIIARQRGYHGVTVASASLTGLPGNHKDFDLPLPQIRHTACPHYYRYGLPGETEEDFATRMAGELEAMILREGPDTVAAFIGEPVMGAGGVIVPPRTYWQKIQAVCRKYDILVIADEVITGFGRLGQRFGSQVFDIEPDIMVLSKQITSSYQPLGAVLLNTRVADVVAEHSGRLGTFGHGYTASGHPVATAVALENLRLIDERGLIEHAAEMGALLHQELQALSSHPLVGEVRGVGLIAGVELVADKATRQPFDPLGKAGGYAYERAHDHGLIVRGIQDTVAFCPPLIITAEQVRDMVARFARTLDDVAAHVAQG

SEQ ID NO: 50941 - protein, 474 aa, Bordetella pertussis
MAGQACSVTPAAGRVQCPATISVLPSETFHMPSSVDSSVLAPPLSAVLLGAAAAVQAVRKGRSLTDALAETPPALRPAVQAISFHAMRQLGWADAVAETLVRRSPGPLFDALLRVALSLLRPAPGAAAQPGAPQYAPHTVVDQAVTAAAGQRKLAAYKGLLNASLRRFLREREALQDSVAERPAARWNHPRWWVELLERAYPDQWRGILAGANVPAPLTLRVNRRRATVEQARQALAQAGVAAAPVGDAGLVLAEPRPVPQLPGYGAGWWSVQDAGAQLAAPLLAPADGMRVLDACAAPGGKTAHLLELADIDLLALDADVQRLERVDQNLERLGLRTPRVRLAAADASDLDAWWDGRPFDAVLADVPCTASGIVRRHPDIRWLRRAKDVPRTAALQARIADALWRTVAPGGRLLYVTCSVFPAEGREQAEAFARRHADAAPLDAPGQLLPVAIDATPQAQHDGFFYALFAKRT

SEQ ID NO: 50942 - protein, 744 aa, Bordetella pertussis
LRLALVVGGVSGLALLGLLAWSTGNASRFARYYDTLLILNGIFAFALFVWVVALTVRLARQIRRRQFGARLTARFALAFALIGVVPGALIYTLSVQFMSRSIESWFNVRVDSALESGLNLGRAALDSQLADMDVRARAMAAELNNMSDNDIPLALTRLREANGAQEATVFTGSGRILAFSTNTYGQLLPPSLPAHLAEPAAAGARLLGRRGRRPGDSGRRGRPAPARGDPVVGAGALRRHPGRLGRARWLQLMHAVPDQIAHNANRVQQGFRDYQELALSRLGLRKLYGITLTLALLLAVFAAIAVALSLSKRLVRPLLRLAGGTQAVGVGDFRPLPEPPERDEVGQLTRSFNAMTRQLEEARQMVESNRRQLERSNVYLESVLSNLSSGVIAFDEGFRVTTVNQGAQTILQADLRSVIGRPLETVDGMLEFAQVVRQAFAAHAAVGSERLHWQQQFEITPGLDETGGQPVTLLARGTHLRVDGRGNGYLVVFDDITEVISANRTVAWGEVARRLAHEIKNPLTPIQLSAERLAMKLADRLQPADAQMLIRSTNTIVNQVGSLKQMVDDFREYARTPPAVMQRIDLNALVADVLSLYGWDPGDGGGRGAARVLNLDVELAPGLPDIEGDPTQLRQVIHNLLSNARDAVAEQGGEGRVKVTTQIVQSEQPDGGQQRAVRFTVADTGPGFPPQVMQRAFEPYVTTKAHGTGLGLAIVRKIIEEHGGRIDLANRKEGGARISILLTR

SEQ ID NO: 50943 - protein, 459 aa, Bordetella pertussis
MKILIMGAGRVGTSVAENLVSEQNDITVIDTDVGQLRYLQDRFDLRVVQGDGIQVSVLESAGADDTDLFIACAASDAANLVACKIAREVFNVPRRIARIRMPEFADHPELMSDEGFAIDALISPERSVTTYLHSLIEFPEALQVVEFAGGRVSVITVRVGHGSPMAHHPVDELREVWPDVTARIVDVLRDGRPLHAGTGTVVAPGDEVVLAVDTRHARRAVRQLREAEKTVHRVMIAGGGNIGLRLARQLAEEGYSVRIIEHDAKRCEYLAAELPDNVLVLHGNGTDEALLERENIEDMDTWLALTSDDEDNIMSSLLAKRLGARKVIALINRQAYGELMQGSHIDVAVSPSQATMSELLRHVRRGDVVAVHRLRQGVAEALEAVAHGDRSNSRVVGRAVGKIGLPKGASIGVLVRGDEIIVPDADTEIQSDDHVIVFVPSRRQMPRVEKLFQVSASFF

SEQ ID NO: 50944 - protein, 489 aa, Bordetella pertussis
MKRLLATFYVLGLTMVVFALTMVIPLAVAYIGQDAGFTAFLEGFLLALGIGAGTWLATRRGRSELHARDGFLLVSTVWAALPALAAIPLLLYYDDVGIPLSFTDAYFEAMSGLTTTGATVLSGLDALPASINLWRATLIWIGGMGILVLAVAILPLLGVGGHQVVRAETPGPMKDERLTPRIASTAKALYAVYFGFSMVCLLAYRAVGLSWFDAWCHMATTMGLGGFSTYDDGFAHFDSLSVELVAIVFMTISGINFATHFNALRQRNWRAYVVCPQTIPYLTVMLGAGLVISVFLYIKGVYGDPWEALRYGMFNTISVATTTGYANVDYASWPLFAPLTMLLLSAFVTSAGSTGGGIKMIRIILLVKQARNELVTMLHPHAVSPVRIGSRVVDQRVMASVLAFMLVYGLSVGVLSSLLLLSGLDLITAFSAVMAMINNTGPGLGPVGPMGNFSVLNDFQTWVCTFAMLIGRLELLTVLVLFTPLFWRK

SEQ ID NO: 50945 - protein, 297 aa, Bordetella pertussis
MSAARLALRLIALTVAALAASGAAGAAPVRVVDDQRRTVELAQPARRAIALAPHAAELVYAAGAGDRLVGAVRGTDYPPAARQLPSVGDAMQPDPERIAVLRPDLLIGWQPAAGAPLAPIAARLGAALYYSDPRTLADIPAAIEQLGRLFGTEAQADAGAAALRARLAALAARYAGKAPVRVFVQAGTDPLFTLNDHSIVGDVLRLCGGVNVYGQAPILAPQVTLEGVLAARPDAIVAGVTGTADAAATLRAWQTAGVPAALRGHVYGIDADSLYRPTGRLIDAAEQLCARLDEARG

SEQ ID NO: 50946 - protein, 291 aa, Bordetella pertussis
MLYHWPYRRKHSCARAPARCAYRSIAMTTEDTLTIAGRSYQSRLLVGTGKYQDFAQTRAALDASGTQIVTVAIRRTNIGQNPDEPSLLDFVPPSQFTLLPNTAGCYSADDAVRTLRLARELLDGHDLVKLEVLGDPQNLFPNMPETLKATKTLVDEGFKVMVYCTDDPIQCRMLEDLGAVAVMPLASLIGSGMGILNPWNLRLIIDQSSVPVLVDAGVGTASDAAIAMELGCDGVLMNTAIAGARDPILMASAMRKAVEGGREAYLAGRVPRKLYSAAPSSPTEGLIAAAK

SEQ ID NO: 50947 - protein, 162 aa, Bordetella pertussis
MSSARFESKILSRAELVAAVAAGRLPRPLVFTNGVFDILHRGHVTYLDQAAQLGATLVVAVNTDESVRRLGKGSDRPLNQVQDRAALLAALGCVDAVTSFHEDTPQELIGELRPDLIVKGGDYDMDTLPETALVKSWGGRAVAIPFDFERSTTALLGKIRQG

SEQ ID NO: 50948 - protein, 156 aa, Bordetella pertussis
MKLIVAAVGTRMPGWVETAWDDYAKRLPADCALELREIKPEPRTSGKTPAQMMAAEARRIETALPPGVLRIALDERGRDLTTVALSQQLEKWRAGGRDVAFLVGGPDGLDAALKASCEGLLRLSSLTLPHPMVRVLLAEQLYRAWAIMTNHPYHRA

SEQ ID NO: 50949 - protein, 177 aa, Bordetella pertussis
MPEPDKQATRKKRTTSSLTDSTVFDPAKQVLWSRPGYLVRRLNQIHYALFYEECKTQNVTPVQYGVLTALSLSPWLDQTAIGMELGLDRTTTADVIKRLQERGLVERRVNPNDKRSRQAVITQEGLRIMGLLQGGMARAQQRLLEPLSPCNREIFMKLLSTLVDANNQYSRTALKAM

SEQ ID NO: 50950 - protein, 320 aa, Bordetella pertussis
MTKVRKIAFEEHFTAVGFGDYSKAFVQHLDPGFAAELGARLTDFGAGRLAEMDAAGIDYAILSQTGPGVQGEPDAAVALRRARENNDFLAERIARHPDRFGGFATLPMHDPKTAAAELTRAVRELGFKGSLVNGHTNGVYYDDPAYDAFWEQMQELDVPLYLHPFDAYVLPHAYKGHPELAGATWGWGVETGTHALRLLFGGVFDRFPKLKIILGHMGEGLPFQRWRFDSRFAAYPYGVKLQRAPSEYIGSNILITTSGVCSHPTLVGAIAEMGAEAVMFSIDYPYESTALAVEFIESAPLDAATRDLVCYGNAARLFKL

SEQ ID NO: 50951 - protein, 420 aa, Bordetella pertussis
MDEIQSIVIVGAGQAGAVAAASLRQLGYRGGLTLVGQEAHPPYERPPLSKAVLQGTATHAEAAVHPAGFYAENDIALLTETAVAALDPAARTVRLADGRTLPYDRCLLATGGHARELPALPRGRAGVHYIRTLDDALDLRAALRPGVRAAVIGGGFLGLEVASTARELGAKVTVIENGSRLLERALPAIVSDWLAERVRASGVDLRLGGAIAAIGDGPPYAITLADGTQVNADLIVVSIGLAPEVTLARQAGLPLDDNGGICVDSQARTADPQVYAAGDCASQPRACLGTAARFESWQNANEQARAAAAAMLGLAPAAEPYPWFWTDQYGCNIQILGLPQPGLRYVCRPQTDPQAAPRVLWIGLRDGVPCHGIAVNAGGDLRQLRVLFERGIPVDPHRLADPAEALKPLVKAWQAAIAVA

SEQ ID NO: 50952 - protein, 396 aa, Bordetella pertussis
MIRLRNFLRRIGRYFPPNWWLAALVAIDGYLFVRPVLGRAVDYPMDYWLSFDSWRDAMDAVGLLQIPRVILGAGLLLMAAGLVLKARIAWAFSLVLLGAIGVVAGWDGGHGLLLAYTGVLIAALVCFWRRFDRASLAAGSLFAVISITSLLIYAVFGTLYLGAEFSPKVESPATAFYFSIVSMSTVGYGDITPQTTAARLFAASIIILGITVFATSISAIAGPVIGGNLKRLVRGRISHAMRKHHIIIAGATPLAQSVYAGMRERGNNVTVVVAPGIAHNYPEDADLVTGDPSNTAVLAEAGAAHARYVLALRDDDADNAFIVLAAKEVAGPDTKTVAVANTAMHLAKIRRVQPDMVFSLQLLGAELLARTLSGETIDNALITDLFFTKATPSGAA

SEQ ID NO: 50953 - protein, 125 aa, Bordetella pertussis
MPTISQLVRKPREVSIIKSKSPALENCPQRRGVCTRVYTTTPKKPNSALRKVAKVRLTNGYEVISYIGGEGHNLQEHSVVLVRGGRVKDLPGVRYHIVRGSLDLQGVKDRKQARSKYGAKRPKKA

SEQ ID NO: 50954 - protein, 173 aa, Bordetella pertussis
MAVSRDAVQLNRHKEAKMPRRREVPKREILPDPKFGSVELAKFMNVVMLDGKKAVAERIIYGALEQVQVKTGKDAIEVFNLAINNIKPIVEVKSRRVGGANYQVPVEVRPVRRLALAMRWLREAAKKRGEKSMDLRLAGELIDASEGRGAAMKKREDTHKMAEANKAFSHFRW

SEQ ID NO: 50955 - protein, 700 aa, Bordetella pertussis
MARKTPIERYRNIGISAHIDAGKTTTTERILFYTGVNHKLGETHDGSATMDWMEQEQERGITITSAATTAFWRGMAGNYPEHRINIIDTPGHVDFTIEVERSMRVLDGACMVYCAVGGVQPQSETVWRQANKYGVPRLAFVNKMDRTGANFFKVYDQLKTRLRANPVPIVIPIGVEDSFTGVVDLVKMKAIIWDEASQGTKFEYGDIPAELEGTANEWREKLVEAAAESSEELMNKYLETGSLDEDDINVALRQRTIAGEIQPMLCGTAFKNKGVQRMLDAVIDYLPSPADIPPVDGQDDDGNPIKRSADDAEKFSALAFKLMSDPFVGQLTFVRVYSGVLKSGDTVYNPIKGKKERIGRLLQMHANNREEIKEVLAGDIAAVVGLKDVTTGETLCDIDSHILLERMEFPEPVISQAVEPKSKADQEKMGLALSRLAQEDPSFRVRSDEESGQTIISGMGELHLEILVDRMRREFGVEANVGKPQVAYRETIRKNCDEVEGKFVKQSGGRGQYGHVVLKLEPLPPGGGYEFVDAIKGGVVPREYIPAVDKGIQETLPAGILAGYPVVDVKATLFFGSYHDVDSNENAFKMAASMAFKEGMRRASPVLLEPMMAVEVETPEDYAGTVMGDLSSRRGMVQGMDDIVGGGKTIKAEVPLAEMFGYATNLRSLTQGRATYTMEFKHYAEAPKNVADEVIAARGK

SEQ ID NO: 50956 - protein, 396 aa, Bordetella pertussis; identical to SEQ ID NO: 50797

SEQ ID NO: 50957 - protein, 229 aa, Bordetella pertussis
MSNSTPTPAAHRLGLVGRKVGMTRIFTEDGESIPVTVLDVSNNRVTQVKSLESDGYAAIQVTYGTRRATRVVKPQAGHYAKAGAEAGSILKEFRLDPARAAEFAAGAVIAVESVFEAGQQVDVTGTSIGKGFAGTIKRHNFGSQRASHGNSRSHRVPGSIGQAQDPGRIFPGKRMSGHMGDVTRTVQNLDVVRVDAERGLLMVKGAVPGHAGGDVIVRPAVKAPAKKGA

SEQ ID NO: 50958 - protein, 205 aa, Bordetella pertussis
MDLKLLNDQGQAATFSAPDTIFGRDFNEALVHQIVVAFQANARSGNRAQKDRAEVKHSTKKPWRQKGTGRARAGMTSSPLWRGGGRAFPNSPEENFSQKVNKKMYRAGIRSILSQLAREDRVAVVDTFTLESPKTKLAAAKLKSLGLDSVLIITDNVDENVYLATRNLPYVAVVEPRYADPLSLIHYKKVLITKPAIAQLEEMLG

SEQ ID NO: 50959 - protein, 275 aa, Bordetella pertussis
MALVKVKPTSAGRRGMVKVVSPKLHKGAPHAALLEKKTRGSGRNNNGHITVRHRGGGHKQHYRVVDFRRNKDGIPAKVERLEYDPNRTAHIALLCYADGERRYIIAPRGLEVGATLISGIEAPIRAGNTLPIRNIPVGTTIHCIEMIPGKGAQMARSAGASAVLMAREGTYAQVRLRSGEVRRVHIQCRATIGEVGNEEHSLRQIGKAGAMRWRGVRPTVRGVAMNPIDHPHGGGEGRTGEAREPVSPWGTPAKGFKTRRNKRTNNMIVQRRKRK

SEQ ID NO: 50960 - protein, 263 aa, Bordetella pertussis
MGQKIHPTGFRLAVTRNWTSRWFADDKAFGTMLAEDIRVREYLKKKLKSASVGRVIIERPAKNARITVYSARPGVVIGKRGEDIENLKADLQRLMGVPVHVNIEEIRKPETDAQLIADSISQQLEKRIMFRRAMKRAMQNAMRLGAQGIKIMSSGRLNGIEIARTEWYREGRVPLHTLKANIDYGTSEAHTTYGVIGIKVWVYKGDMLANGELPPEAATPREEERRPRRAPRGDRPDGARTGRPGGRGRGPRKADAAPAPEGE

SEQ ID NO: 50961 - protein, 103 aa, Bordetella pertussis
MNWIKIATTDQLEDDEVMPVTAGEAKLALYRSEGEYFASDNVCTHAYALLSDGYLEDGCIECPLHQARFDIKTGKAMCAPATADIRIYPLKIENDDIYVDLQA

SEQ ID NO: 50962 - protein, 461 aa, Bordetella pertussis
MSRISIFLPQSCGYHAFIRRRRVLPGQFPGFKAEWRVPSIERTRKESEMEQIPFVSSAPNTLGIELELQLVDPRSFDLAAASDELLAQLANHPIADRVKPEITRSMIELNSSVHEHPAGLLAEMREMRDVLCEAADAVGVGVTGGGAHPFMRWQDRAISDTPRFQYLAEMYGYLARQFTVFGQHIHLGVPSGDAAVRMVRGLSPYVPHFIALSAASPYCEGVDTLFSCCRLNAVNSFPLAGHMPADVTDWYRFEAHLAQLCASGLAESIKDLYWDIRPKPEYGTVEIRVCDTPLTVERACQLAAFAQALAVQVARDPEPSQQAWLAYRSNHFQACRFGLHGSYVTPDGQRVRLVDHLRALFERLAPVAEELGTGDMLQTLRDEILRNGNDARWLRGQFLKVRELPLVVESMAQNWRGQGVQDTPPSAVRRRIRATSEPVGGVCALSTPQGDPLPGWAERLH

SEQ ID NO: 50963 - protein, 122 aa, Bordetella pertussis
MIQMQTTLDVADNTGARAVMCIKVLGGSKRRYAGIGDIIKVSVKDAAPRGRVKKGEIYNAVVVRTAKGVRRKDGSLIRFGGNAAVLLNAKLEPIGTRIFGPVTRELRTERFMKIVSLAPEVL

SEQ ID NO: 50964 - protein, 179 aa, Bordetella pertussis
MSRLQEFYKSKVVADLQAKFGYKCVMEVPRITKITLNMGVSEAVADKKVIEHAVSDLTKISGQKPVVTKTRKAIAGFKIRENYPIGCMVTLRGQRMYEFLDRLVAVALPRVRDFRGISGRAFDGRGNYNIGVKEQIIFPEIEYDKIDALRGLNISITTTAKTDDEAKALLTAFSFPFRN

SEQ ID NO: 50965 - protein, 131 aa, Bordetella pertussis
MSMSDPIADMLTRIRNAQQVDKTTVTMPASKLKVAIATVLKDEGYIDGYSVKGTQAKPELEITLKYYAGRPVIERIERVSRPGLRIYKGRTSIPQVMNGLGVAIVSTSRGVMTDRKARANGVGGEVLCYVA

SEQ ID NO: 50966 - protein, 177 aa, Bordetella pertussis
MSRIAKYPVELPKGVEASIQPDQITVKGPLGILVQSLTGDVNVAQEDGKLTFVVANDSRHANAMSGTLRALVANMVTGVSKGFERKLNLVGVGYRAQIQGDAVKLQLGFSHDVVHQLPAGVKAECPTQTEIVIKGPNKQVVGQVAAEIRKYREPEPYKGKGVRYADERVVIKETKKK

SEQ ID NO: 50967 - protein, 120 aa, Bordetella pertussis
MDKKVSRLRRAVPTRRKIAQLRVHRLSVFRSNLHIYANIISPEGDRVLVSASTLEAEVRAQLGGAGKGGNATAAALVGKRVAEKAKAAGIELVAFDRSGFRYHGRVKALAEAAREAGLKF

SEQ ID NO: 50968 - protein, 171 aa, Bordetella pertussis
KHAAEKENDDGLREKMIAVNRVSKVVKGGRTMSFAALSVVGDGDGRIGMGKGKAREVPVSVQKAMEQARRGMFKVALKNGTLHHTVVGKHGASTVLISPAAEGTGVIAGGPMRAIFEVMGVRNVVAKSLGSSNPYNLVRATLNGLRASLTPAEVAAKRGKSVEEILGVNHG

SEQ ID NO: 50969 - protein, 146 aa, Bordetella pertussis
MSDIQLNTLKPAEGSKHAKRRVGRGIGSGLGKTAGRGHKGQKSRSGGFHKVGFEGGQMPLQRRLPKRGFTPLGQHLYAEVRLSELQLMEAEEIDVQALKAAGVVGQSVRYAKVIKSGELSRKVVLRGITATAGARAAIEAAGGSLA

SEQ ID NO: 50970 - protein, 83 aa, Bordetella pertussis
MNIIIMIIVGFVVGLITRAIMPGDQNMGYIMTTILGIIGSVVAGFLGQQLGWYAPGEPAGWIGSVVGAIIVLFVVGLVAKKRA

SEQ ID NO: 50971 - protein, 441 aa, Bordetella pertussis
MAKAQALGKTGARYGDLKRRLVFLVLALVVYRLGTHIPVPGINPDALADLFRQHEGGILGLFNMFSGGALSRFSIFALGIMPYISTSIIMQLMSVVVPSLEALKKEGEAGRRKITQYTRYGTVVLALVQAVGISVALESQPGLVIDPGMLFRFTTVVTLVTGTMFVMWLGEQITERGLGNGISILIFAGIVAGLPSALAGLLDLVRTNSMSVLSALFIVALVVLVTAFVVFVERGQRKITVNYAKRQVGNKVYGGQSSHLPLKLNMAGVIPPIFASSIILFPATITSWFSSGERMAWLRDLAAALEPRQPLYITLYSVAIIFFCFFYTALVFNSRETADNLKKSGAFVPGIRPGEQTARYIDKILMRLTLAGAIYITLVCLLPEFLVMRWNVPFYFGGTSLLIIVVVTMDFMAQVQAYMMSHQYDSLLKKANFKGSGLPMR

SEQ ID NO: 50972 - protein, 172 aa, Bordetella pertussis
MAVFPSCTRRPRAHPAMFHVVLVSPEIPPNTGNAIRLCANTGAQLHLVRPLGFELDDARLRRAGLDYHEWQPVQVHDTLPQALAATGAAAPRIFALTTRARTSLADMAFQAGDVFVFGRETAGLSEAHMALFGPAQQLRLPMRPGQRSLNLSNAVAVTVFEAWRQSGYAGSI

SEQ ID NO: 50973 - protein, 351 aa, Bordetella pertussis
MSQARPATLRVAVLGAGSWGTALAAAASRRHPTVLWARDGAQAQAMAARHENTRYLPGVALPHALQVSADLAQALAHLAHDPAHALIILGVPVAGMTPLCTELAARLPALGLQAVPLVWTCKGFEEQTARLPHETVQAALGAMPGLAAGVLSGPSFAREVAQGLPVALTVASGSSAVRDAVTTALHGAAVRIYASTDVVGVEVGGALKNVIAVACGICDGLALGTNARAALITRGLAEMARFGAALGAQQETFAGLTGLGDLVLTATGELSRNRRVGLEIGAGRKLADILASGMTAEGVRCARAARDRARALNIELPITEAVCAVLFEGLSPMTAVSALLAREARPESPTP

SEQ ID NO: 50974 - protein, 86 aa, Bordetella pertussis
MQKVVMYSKDYCPYCARAQALLKQRGVADLEIIRIDQDPSQRDIMIERTGRRTVPQIFIGETHVGGSDDLQALDRSGGLLPLLNGG

SEQ ID NO: 50975 - protein, 140 aa, Bordetella pertussis
MDLLQFLIDKNNVFIVAVAVVSGIMLMLPALRKGRAGAAVGTSEAIQMVNQRQAVWVDVRPTEQFQAGHIAQARSLPAADLEKKAGALPKNKPLIVVCEQGRDAARIAARLRSQGFAEVSVLEGGMRAWFAAGLPVTQKG

SEQ ID NO: 50976 - protein, 264 aa, Bordetella pertussis
MNDQQLLRYARHILLDELGIEGQERFLAARVLIIGAGGLGCPAALYLATAGVGHITLVDDDVVELSNLQRQILHASDSVGRAKAESGRDMLARFNPETQVEARVERLGGAALDAAVAQADVVLDCSDNFATRHAINRACVRHRKPLVSGAAIRFDGQVSVYDLRDAQAPCYHCLFPEADDVEELNCATTGVFAPLVGIIGSGQAAEALKLLAGIGQSLAGRLLQLDVRSMQWHSVNVPRDPDCAVCGQGGQAAEHARGDAAHCA

SEQ ID NO: 50977 - protein, 72 aa, Bordetella pertussis
MSKDDVIQMQGEVLENLPNATFRVKLENGHVVLGHISGKMRMHYIRILPGDKVTVELTPYDLTRARIVFRSK

SEQ ID NO: 50978 - protein, 121 aa, Bordetella pertussis
MARIAGINIPPQQHAEIGLTAIFGIGRTRARKICEAAGVPVTKKVKDLTDAELERIREHIGVFAVEGDLRREVQLSIKRLIDLGTYRGMRHKRGLPVRGQRTRTNARTRKGPRRAAASLKK

SEQ ID NO: 50979 - protein, 133 aa, Bordetella pertussis
MAKASTSGASRVRKKVKKNVSDGIAHVHASFNNTIITITDRQGNALSWATSGGAGFKGSRKSTPFAAQVAAETAGRVAMEYGIKTLEVRIKGPGPGRESSVRALNALGIKISSIADITPVPHNGCRPPKRRRI

SEQ ID NO: 50980 - protein, 207 aa, Bordetella pertussis
MARYIGPKCKLSRREGTDLFLKSARRSLDSKCKLDSKPGQHGRTSGARTSDYGLQLREKQKLKRMYGVLEKQFRKYFVEAERRRGNTGETLIQLLESRLDNVVYRMGFGSTRAEARQLVSHRAIELNGHTADIASMLVKAGDVISIREKAKKQGRIRESLDLAASIGLPQWVEVDASKMTGTFKSAPDRADVARDVNESMVVELYSR

SEQ ID NO: 50981 - protein, 328 aa, Bordetella pertussis
MSTQGFLKPRSIEVEPVGAHHAKIVMEPFERGYGHTLGNALRRILLSSMTGYAPTEVQMTGVVHEYSTIAGVREDVVDILLNLKGVVFKLHNRDEVTLVLRKNGAGAVVASDIELPHDVEIINPDHLICNLTDAGKIEMQVKVEKGRGYVPGNVRALSEDRTHTIGRIVLDASFSPVRRVSYAVESARVEQRTDLDKLVLDIETNGVISPEEAVRQAARILMDQISVFAALEGAGDAYEPPVRGTPQIDPVLLRPVDDLELTVRSANCLKAENIYYIGDLIQRTENELLKTPNLGRKSLNEIKEVLAARGLTLGMKLENWPPLGLERP

SEQ ID NO: 50982 - protein, 131 aa, Bordetella pertussis
MRHGNGLRKLNRTSSHRLAMFRNMAVSLITHEAIKTTLPKAKELRRVIEPLITLGKEPTLANKRLAFARLRDRDAVVKLFAEIGPRYANRNGGYTRVLKMGFRQGDNAPMAFMELVDRPEVDASEADSDAE

SEQ ID NO: 50983 - protein, 553 aa, Bordetella pertussis
MSNIVEIKVPDIGDFKEVEVIEVLVSAGDTIKAEQSLITVESDKASMEIPASAAGVVKSVKVKVGDKIAEGTVILEVEAAGEAAAAPKAEAPKAEAPKAEQAAETPKADAAKAEAPQAQAAQAEAPAAAGPIEVKVPDIGDFKEVEVIEVLVAEGDTIKAEQSLITVESDKASMEIPASAGGVVQSLKVKVGDKVAMGTVIAVVQGQGAAAAPAAAEPAAPASPVAPASAPAQRPAPAAALQDEDLKPGQLPHASPSVRKFARELGVNLSRVTGSAAKGRITADDVRAYVKQALSAGAPAGASGGGDGAALGLLPWPKIDFTKFGPIEAKPLSRIKKISGANLHRNWVMIPHVTNNDEADITDLEALRVALNKENEKSGVKVTMLAFLIKAVVAALKKFPEFNASLDGDNLVLKQYYHIGFAADTPNGLVVPVVRDADKKGILELARETSELARKAREGKASPAEMQGGCFSISSLGGIGGTHFTPIINAPEVAILGVSRSAHKPVWDGKQFVPRLTLPLSLSYDHRVIDGASAARFNAYLGQLLVDFRRIAL

SEQ ID NO: 50984 - protein, 596 aa, Bordetella pertussis
MSNIVEIKVPDIGDFKEVEVIEVLVAAGDTIKAEQSLITVESDKASMEIPASSAGVVKSVKVKVGDKVAEGTVILDVEAAGEAAAAPKAEAPKAEAPKAEAPKADAPKAPAAKASAPAAAAYSGSADLECDMLVLGAGPGGYSAAFRAADLGMDTVMVERYATLGGVCLNVGCIPSKALLHNAAVIDEARALAAHGISFGEPKVDLDKLRGYKDSVVAKLTGGLAGMARARKVRVVTGTGEFADPHHLTVTDGEGKKQTIRFKQAIIAAGSQSVKLPFLPDDERIVDSTGALQLRAIPKKMLIVGGGIIGLEMGTVYSTLGARLDVVEMLDGLMQGADRDLVKVWQKMNAPRFDNIMLKTKTVGAEARKDGIYVSFEGEGAPKEPQRYDLVLQAVGRSPNGKKIGAERAGVAVTERGFIEVDRQMRTNVPHIYAIGDVVGQPMLAHKAVHEGHVAAEAAHGEKSYFDARVIPSVAYTDPEVAWVGLTEDEAKKQGVKVEKGLFPWAASGRAIANGRDEGFTKLLFDAETHRIVGGGIVGTHAGDLISEIALAIEMGADMVDIGKTIHPHPTLGESVGMAAEVAEGVCTDLPPMRKK

SEQ ID NO: 50985 - protein, 391 aa, Bordetella pertussis
MAAVINTNYLSLVAQNNLNKSQSALGSAIERLSSGLRINSAKDDAAGQAIANRFTANVKGLTQAARNANDGISIAQTTEGALNEINNNLQRIRELTVQASNGTNSASDIDSIQQEVNQRLEEINRIAEQTDFNGIKVLKSNATDMTLSIQVGAKDNETIDIKIDRNSNWNLYDAVGTVPGGTVNGEARTVNALGFDVLSAVTTTIASDTVTFDAAVAAAEQAAGAAAGDGSVVSYGDAANPQYAVVVDNAGTLTSYALTFDKDGKAALGDQLGAVASQAAEAAVGVNDVASGDNVTVSGGNANALSKLDDAMKAVDEQRSSLGAIQNRFESTVANLNNTITNLSAARSRIEDSDYATEVSNMTKNQILQQAGTSVLAQANQVPQNVLSLLR

SEQ ID NO: 50986 - protein, 678 aa, Bordetella pertussis
MSNPTAPKLALADAIRVLAMDAVQKANSGHPGAPMGMAEIAQALWLGNLRHNPADPAWANRDRFVLSNGHGSMLIYALLHLTGYDLPLEELKNFRQLHSRTPGHPEVGITPGVETTTGPLGQGLANAVGMALAEALLAAEFNRAGHTVVDHHTYVFLGDGCLMEGISHEACSLAGTLKLSKLVALYDDNGISIDGHVEHWFADDTATRFEGYGWNVIRGVDGHDVAAVDAAIKQARAQSEKPTLIVCRTVIGKGSPNMAGTHNVHGAPLGNDEIAATRAALGWSAGPFEVPQDIYAAWDSRPAGALAQAAWEDKFQAYAAQYPAEAAEFTRRMKGELPEGFAARFEAFLQATVAKGETVATRKASQFAIAELAGLLPEMLGGSADLTGSNFTDWKGVAPLRAGHHGVHFGRHINYGVREFGMAAIMNGIALHGGYLPFGGTFLTFSDYSRNAIRMAALMKQRVVHVFTHDSIGLGEDGPTHQSIEHAASLRLIPNLSVWRPCDTVETAAAWGAAVTRPASIGMDLHDGGPTALLLSRQNLPFVARDEATQKAIVRGGYVLRDAHDARAAIIATGSEVAIALAAQELLAADGIAVRVVSMPSTDVFDRQDAEWKREVLPAGMPRVAVEAGVTAFWHKYVGLEGAVVGIDRYGESAPAGALFKFFGLTAEKVAEAVKQVL

SEQ ID NO: 50987 - protein, 336 aa, Bordetella pertussis
MTIRVVINGYGRIGRNILRAHYENGKKHDIEIVAINDLGDPKTNAHLTRFDTAHGKFPGTVTVDGDYMVVNGDKIRVLANRNPAELPWGELGVDVVLECTGFFTSKEKAGAHLKGGAKKVIISAPGGKDVDATIVFGVNQNVLKAEHTVISNASCTTNCLAPLVKPLHDKLGVETGLMTTVHAYTNDQVLTDVYHEDLRRARSATMSMIPTKTGAAAAVGLVLPELNGKLDGFAIRVPTINVSLVDLSFVAKRDTTVEEVNSILQAAAEGELKDILTYNTEPLVSIDFNHNPASSNFDATLTKVSGKLVKVSSWYDNEWGFSNRMLDTTVALMSAK

SEQ ID NO: 50988 - protein, 397 aa, Bordetella pertussis
MSNVNTLSALAKSGALSGKRVFIRADLNVPFDDAGRISEDTRIRASVPGIRLALDAGAAVMVTSHLGRPKEGALTEADSLAPVAQRLSELLGMQVRLVPDWVDGVSVEPGEVVLLENCRGNVGEKKDDEGLSRKMAALCDVYVNDAFGTAHRAEATTHGIARFAPVACAGPLLEAELDALGRALHDPKRPLVAIVGGSKVSTKLSILQSLADKVDQLVVGGGIANTFMLAAGLPIGKSLAEPEQVEQARAVIEIMKRRGAEVPIPTDVVCAKSFGADAAATVKAAADVAEDDMILDIGPQTAQRLADILKTAGTIVWNGPVGVFEFDQFAHGTEVVARAIADSAGFSIAGGGDTLAAIAKYGIADQTGYISTGGGAFLEFLEGKALPAVAVLQARAA

SEQ ID NO: 50989 - protein, 338 aa, Bordetella pertussis
MKPQIISAAFPVSRPRRLRRDDFTRRLVRENTLTANDLIYPVFVTEGKGIQQAVPSLPGVVRYSLDTLLPVAEQCVKLGIPVLSLFPAIEPALKTPDGIEAANPEGLIPRVVGELKKRFPELGVLTDVALDPYTSHGQDGVIDPAGYVLNEPTVEILIKQALVQAAAGVDIVAPSDMMDGRIGAIRQALEDQQHIHTRIMAYSAKYASAFYGPFRDAVGSASNLGKSDKMAYQMDPGNIDEALREVAADLQEGADMVMVKPGMPYLDVVRRVKDAFRVPTFAYQVSGEYAMIKAAAANGWLDHDKVMMEALLGFKRAGADGVLTYFALEAATLLQQQR

SEQ ID NO: 50990 - protein, 233 aa, Bordetella pertussis
MKRVLSRMLVASGLVLGASVHSMSFAADGAAGPAKPDAAKGAQLYDQGDASRGVIACASCHGAAGSSTIPANPNLAAQPHEYLVKQLTEFKVKEGEKLPLRMGPGGNPTPMTAMAQPLTAQDMQNVALYLSQQPLKEPATAGHENLVELGQKIWRGGLADRNVPACAACHGATGAGIPGQYPRLSGQFSSYIEEQLKLFRSGERGNSVPMHDIADRMSDADIKAVADYAAGLR

SEQ ID NO: 50991 - protein, 444 aa, Bordetella pertussis
MSTTTSNSAAAWTSGFSPTGDGRAQRGRPDWTDIAFFLLLAAGAGFALTRFSGAMDYYEKLILCGTVPALAWLGWLWRPLRHLMIACALAAGLALLLYQNDLARAEQVFFLKYLLSSQSAILWMSALFVLAMLCYWIGILSPTAAWLGTALTWGAVFAGTTGLLVRWREGHLMGPDLGHIPVSNLYEVFVLFALITALFYLYYERKYATRALGGFVLLVITSATIFLLWYSFTRDAGQIQPLVPALKSWWMKLHVPANFIGYGTFSLAAMVGFAYLVKQYGQTTSWLKLAPLFVLGVALCVEPIVFRTEGLSATWMIYCGAGVVIVGGILLARARIAQALPSLEVLDDIMYRAIAIGFAFFTVATVLGALWAADAWGAYWQWDPKETWALIVWLNYAAWLHMRLIKGLRGTMAAYWSLVGLLITGFAFLGVNMFLSGLHSYGKL

SEQ ID NO: 50992 - protein, 823 aa, Bordetella pertussis
MGDNRTIAAMSKRQNSTKQDKPAKSGSAILRFFLKAGIFFGGLALCGVLLAGMALALAWPNLPDLHAMTDYRPRVPLRVYTADRVLIGEFGEERRNVLRFNEIPDVMKSAVLAAEDDRFYQHGGIDWMGVIRAGLTNLISMSKSQGASTITMQVARNFYLSSEKTYSRKFYELLLTFKIESQLTKDQILELYMNQIYLGHRAYGFAAASRTYFGKPLSQVTPSEAAMLAGIPKAPSRFNPISNRPRAELRQRYVLGRMYSLGYLTEPEYKEAMAQPIVIKSAEGTPAGGYAIHGEYVAELARQLLYNVYQDNLYSRGINIYTTVQSKDQESAYRAVRDGVLEYTRRAPYPGPEEQLDMPAGVENDPQALDEFLDGVFDKFSDSGDLLTAVVLSASPTEIKLVRSSREVISITDKKALGVVARALTDKAKPEMRLKRGSVVYIHKYNDNWEVINMPAVQAAFVALSPQDGAIRAMVGGFDFYRGNFNRVTQAWRQPGSNIKPFIYAASLERGLTPATQISDQPFELSAAQTGSKAWHPKNYGNQYEPMLTMRQGLYKSKNMVSIRILQAIGPQYAQDYLTRFGFDKARQPAVLPLALGAGSVTPLQLAGAYAVFANGGYRITPYLIDRVTDSSGKVLMQSRPVIAGDAAARAIDARTAFVMDDMLRGVATSGTAARARATLKRSDVAGKTGTTNESVDAWFSGYTPSLVATAWLGFDQPKSLGSRETGGGVAMPIWLDYMKDALKGVPEEKQRPRPDGLLVENGELYFSEFPPGQAVARLGLPQAGDALGDFLNGLTGGNDNSIRVAPGVGTQGSQPWSQNIPF

SEQ ID NO: 50993 - protein, 235 aa, Bordetella pertussis
MRYAVAIGRRGTRGACRPRSPPLPAPLTLYVDARFRSPYAMSAHVALAEKQLEFEVRLVDLAAGEQRMQPYQSRALTARVPALAHAGFHLTESSAIQEYLEDAFAPPAHPALYPAGAQARARARQVQAWLRTDLAALRRARPIDSVFDAPATTPLDDAAHCDAAKLIRVAEALLPPGQAHLFGAWSIVDTELALMLNRLAHSGDDLPAPLRDYAAAQWQRASVQAWLRHYEAARG

SEQ ID NO: 50994 - protein, 161 aa, Bordetella pertussis
MLEIIEADFNDAAHARAIIALLDEYARGPMGGGEPLSAHARANLVAELARRPHARALLAWQDGEPAGLAICIEGFSTFACRPLLNLHDLAVAERFRGQGVGTRLLEALEALAARLDCCKVTLEVLEGNTRAQALYRRLGYAGYELAADTGRAMFWQKKLSA

SEQ ID NO: 50995 - protein, 312 aa, Bordetella pertussis
MEFKDYYKILGVQSDAPEDEIRRAYRKLARKYHPDVSKESDAETRMRDVNEAYDVLGNQEKRQAYDNLAAGVAPDGGFQPPPGWDQGFEFHYARDGEGDQQFSDFFSSLFGGQARRRAAQQDFRARGEDHHAAIEVDLEDALRGATRDISLRSMQPDEHGQPQVRTRTLSVRIPAGVREGQYIRLAGQGMPGYGGAENGDLYLEVRFKPHPRYRAEGRDLYMNLPVAPWEAALGAQVEAPTPGGAVEVAVPPGSRNGRKLRLRGRGIPGDPPGDLYLVLDLVLPPADSEAAREAYRKMAQDLAFDPRRNLGV

SEQ ID NO: 50996 - protein, 491 aa, Bordetella pertussis
MLHLFSGLDLWVGLSLVLALTFVLAFEFINGFHDTANAVATVIYTKAMPPHLAVILSGIFNFLGVLLGGVGVAYAIVHLLPVELLINVDTGRGLAMVFAMLSAAIAWNLGTWYFGIPASSSHTLIGSILGVGMANALLTDISLAEGVNWGKAIDIGLSLVVSPVAGFMVAGGILLLLKRWLPLSKMHKTPEQRRAIDAKKHPPFWNRLVLVLSAMGVSFVHGSNDGQKGIGLIMLVLIGIVPAKFVLDVNSTTYQIDRTRDAASHLSAFYHRNEATLGEFLALSRGGNGADLPKTFRCDPKLTMPTIAALQDDLRGVTNYADLSADKRIDVRRYLLCLDDTAKKVARLEGLPARERADLQRLRGDLTTTTEYAPLWVIVAVALALGIGTMVGWRRVVLTVGEKIGKQGMTYAQGMAAQVTAVGAIGLANVFSLPVSTTHVLSSGVAGTMVANNSGLQGGTVRTILMAWVLTLPASMLLSAGLFWVGTLLAA

SEQ ID NO: 50997 - protein, 952 aa, Bordetella pertussis
MDAIRIRGARTHNLKNVSLDLPRHQLVVVTGLSGSGKSSLAFDTLYAEGQRRYVESLSAYARQFLQLMDKPDVDLIEGLSPAISIEQKSAGHNPRSTVGTITEIHDYLRLLYARVGTPYCPDHGLPLQAQSVGQMVDAVLAWPAEARLAVLAPIARARKGSFEDELASLQAQGFVRLRVDGQLQEIEQLPALKKTEKHDLDVVIDRLRIRPESQQRLAESFETALQLAEGRAIALDMDSGREQVFSSRYACPICSHSLAELEPRLFSFNNPMGACPGCDGIGQVGFFDPKRVVAFPELSLAAGAIRGWDRRNSFTHSLLTSLATHYEFDIDTPFEELPAEVREKVLHGSGEEEIAFFYVNEKGRSTVKRHPFEGVIPNLERRWRETDSATVREELGKYRNIKTCPDCGGSRLRPEARNVLIGSEPREGERHGQAIFEVESMPLSVCLDWFRQLQLTGAKQEIAQRIVREIEARLSFLNNVGLNYLSLDRSADTISGGEAQRIRLASQIGSGLTGVMYVLDEPSIGLHQRDNDRLIGTLQHLRDLGNSVIVVEHDEDMIRCADWVVDMGPGAGEHGGQVVAQGTPEAVQTDPQSLTGQYLSGARAIEIPARRPVADDQPWLHLSGATGNNLKSVDLRIPAARLVCVTGVSGSGKSTLVNDTLAVALARQLNHAQGEPAPYAGLAGLEHFDKTISVDQSPIGRTPRSNPATYTGLFTPIRELFAGVPEARARGYDPGRFSFNVKGGRCEACQGDGVVKVEMHFLPDMYVPCDVCHGKRYNRETLEIRYRGRNISEVLDLTVEQALEYFESVPAIARKLHTLIDVGLSYIRLGQSATTLSGGEAQRVKLSLELSRRSTGRTLYILDEPTTGLHFHDIELLLKVLNQLVDSGNTVLIIEHNLDVIKTADWLVDMGPEGGDGGGRVVAQGTPEQVAASPDSHTGHYLGRVLRNGKRR

SEQ ID NO: 50998 - protein, 179 aa, Bordetella pertussis
VNKVILVGNLGRDPEVRYSPDGAAICNVSIATTSQWKDKASGERREETEWHRVVMYNRLAEIAGEYLKKGRSVYIEGRLKTRKWQDKDTGADRYSTEIVADQMQMLGGRDSGGDSGGGYGGGYDDAPRQQRAPAQRPAAAPQRPRAAGRAGRQPGRHGRRYSVLRRLQPIAGCESPAQA

SEQ ID NO: 50999 - protein, 148 aa, Bordetella pertussis
LKARLRQGQAITMIGNSLPDTYAAEMVASAGFDAVMIDLQHSAIGLHEVNDLARAVRAQGCAPVVRVAANDPAAITKVLDGGVDAVVAPMIQQRQSIQDYYAQTRDRLLPIAMIENEEGVRQAEQIMRTEGLGAIYVGASDLSIAMGM

SEQ ID NO: 51000 - protein, 216 aa, Bordetella pertussis
MSTSTSPSAPLVRSHPDELLIGLVSISDRASTGVYQDQGLPSLRDWLGTALTSPWQAVERLIPDEPAAISAAMVDLVDGCGCDLVLTTGGTGPARRDCTPEATLAVATKEMPGFGEQMRQISLRFVPTAILSRQVAVIRETAGHAALIINLPGQPKAIRETLEGLKDADGAVLAAGVFAAVPYCIDLIGGPYAETDPAVIKAFRPKSALRQPAARQ

SEQ ID NO: 51001 - protein, 288 aa, Bordetella pertussis
MPVSAAARLWRGAWLALALLAAQGAQAQGYISRKLSAPVPGGVAVVDLGQAAQAPEVTYRGRPVMVLREADGPWIAVVGIPLAARPGSEAISVRGSGGAVRSIAFDIGAKKYTAQHIKLKNQRQVTPNPDDLKRIERELAEQTDAYRIFRAGVTPSNVLLDRPVPGRLSSPFGLRRFFNGQERNPHSGLDFAAAAGTPIKAPAAGRVVLVGDYFFNGRTVFVDHGQGFISMFCHMSEIDVKVGDEVPRGGVVGKVGATGRATGPHLHWNISLNDARVDPAIFIGAFKP

SEQ ID NO: 51002 - protein, 181 aa, Bordetella pertussis
MVPARSHSELTERHIMAAKPHTQATRAEDVGNEFLVFTLGEEEYGIDILKVQEIRGYDAATVTRIANVPSFIKGVTNLRGIIVPIVDLRIKFNLGSVEYNEQTVVIILNLDRRVVGIVVDGVSDVLMLNAAQVRPAPEFGATLSTEYLTGLGTVDERMLILVDIEKLMTSDEMALVEKVAS

SEQ ID NO: 51003 - protein, 129 aa, Bordetella pertussis
MVDKGMKILVVDDFPTMRRIIRNLLKELGFENVDEAEDGAIGLEKLRNGAFQFVVSDWNMPNLDGLEMLKQIRADAALKSLPVLMVTAEAKKENIVAAAQAGANGYVVKPFTAATLEEKLNKIFEKLAG

SEQ ID NO: 51004 - protein, 210 aa, Bordetella pertussis
MNATDTGMQADPTDLIQRIASLTRMLRDSMRELGLDQAIKDAAEAIPDARDRLRYVAQMTEQAANRVLNATEAAGPIQDGMARGAQALDERWQQWYDQPLELPQARALVQDTRAFLAAVPQHTQQTQAKLMEIVMAQDFQDLTGQVIMRMMDVVGAIERELLQVLLDNVPQERRDEANSLLNGPQVNPGGKADVVTSQDQVDDLLASLGF

SEQ ID NO: 51005 - protein, 358 aa, Bordetella pertussis
MPITQEHAIMSTSFPTQRLGATDMRITRVGFGAWAIGGPGWSVGWGAQDDGESIRAIRHAVNRGINWIDTAAVYGLGHSESLVGRALAGMPPSERPYVFTKGGLVGSPADPMAKPRRIGAPDSLRREVEASLRRLGVEAIDLYQMHWPAGDGTPLEVYWQALLDLRQAGKVRHVGLSNHNLAQVQAAEQLGHVETLQPPFSAIRRESAADLLPWCASHDTGVIVYSPMQSGLLSGAFSAERAAALPEGDWRARNAEFMAPRLAANLEFADALKPIAQHHGASVGAIAVAWALAWPGVTGAIAGARSAEQVDGWLGAATLELDSDDMRQIADALARTGVGGGPLLPPPDEAALALTARP

SEQ ID NO: 51006 - protein, 528 aa, Bordetella pertussis
WRQPAILAAAGAAHALSFAPDPLPAWSLAPVQVIALAVAAHASLQAPSARRALARGWLFAMFSFSLGLYWMYVSMHDYGGLAAPLAAAGVLALSAFLALFPGLACAAARWLCPPHWDASPPARARRTLYTAATWAACWAALEWLRAVVLTGFPWLNISYAHVDSPLAGWAPLLGVHGMALLAAFAAAALAGLWQSASGRIDSRQALAAGVALLLAGAGWLLGQFSWSRPEGKPLHLRLVQGNVEQSQKFDPALLETGLRRHLELASLPPRPGEPKPDMIILPETVLPVFQDQLPASVWDAWIEVARRADTRIAMGVPLHTQPDGATGHRYTNSVIGFTPARPSNNCSTGTTAMRYDKQHLVPWGEYVPPGFRWFVDMLDIPLGDFDRGAARQPSFDIAGQRIAFNICYEDLFGPELLPALQDGPDGRPGATIMANVSNLGWFGNTWALRQHLQIGRLRTMETARPMVAATNTGITAAIDARGRVAAALPADRAGVLPVAVQGMTGLTPYARFGDKPALALIGLLLIAA

SEQ ID NO: 51007 - protein, 295 aa, Bordetella pertussis
MSDPYPATEAHAQRAAKSPPKSLLDRLLSLVRREPEDREGIKAILEAAHERELLDAESYAMIKGALAVSERTVADIMVPRSRMDLLDISQPLPQLLATIIETAHSRFPVYEDDRDNIIGILLAKDLLRYMLEPALDIRSLVRPAVFIPEVKRLNVLLREFRASRNHLAIVIDEHGGISGLVTMEDVLEQIVGDIEDEFDEDEEESIFPEGENQWRLTASTDISHFNATFATDLPDDEYDSVGGWLGGQLGRIPRRGDSADHDGLHIEVVRADARRALWLRVRRNAGAQPPASAAE

SEQ ID NO: 51008 - protein, 378 aa, Bordetella pertussis
MTGLQFELLATDGGARRGRLTLNHGVVETPIFMSVGTYGSVKAMLPHELEDIGAQIVLGNTFHLWLRPGTAIMEKHGGLHGFMQWDKPILTDSGGFQVFSLQGMRKITEEGVKFASPIDGARLFLTPEESMRIQRSLNSDIVMVFDECTPYEIDGRPASIDEDARSMRMSLRWARRSRDEFDRLGNPNALFGIVQGGMYEALRDESLAGLAEIGFHGYAIGGLSVGEPKEDMMRILAHVTPRLPAQAPRYLMGVGTPEDLVEGVARGVDMFDCVMPTRNARNGWLFTRYGDVKIRNARYRDDTRPLDPSCACHTCGHFSRAYLHHLQRANEITGARLNTLHNLHFYLAIMGEMREAIAAGRFEAWRAQFAADRARGVD

SEQ ID NO: 51009 - protein, 347 aa, Bordetella pertussis
MPTPLTLADFDYHLPPELIAQSPAAERGGSRLLHLDAASRLHDRRFPDLAGLLRPHDLLVFNDTRVIKARLTGQKATGGKVEVLVERITAPDRALAHVRASKSPGPGMRLRLAEAFEAEVLGREGELFDLRFPAPVLDLLDAHGATPLPPYITHAADATDERRYQTVYAREPGAVAAPTAGLHFDQPMLEQLAAQGVQRAFVTLHVGAGTFQPVRVQNLAEHIMHAEWYTVPEATVAAIARARAHGGRIVAVGTTSVRALESAAAQAQDGPLAAAQGDTRLFITPGYRYRAVDALLTNFHLPQSTLLMLVSALAGVEPIRRAYAHAVAERYRFFSYGDAMFIETPAP

SEQ ID NO: 51010 - protein, 505 aa, Bordetella pertussis
MCPRAPLRASLGMLAFLNERTCNRQGAMRRAGKQGKWQQWLAGVMLALGAAGAAAQGLPSSLVAAWKATKLPDQSLSLVVQEINGPRLATLNAKEPRNPASVMKLVTTWAALSELGPSYAWRTEFLTEPGNRPDAHGVLRGPLYLRAGGDPQLLLQDLWALLRELRLRGVKQIGDLVVDRSIFGQVAIDPGAFDGASDRAYNASPDALMVGFGAQRLLFTPDAAARKWVPMIDPPLPGLRLEGAVEWSDVRCPGPPVVGTEPVVTQQGVSIRLSGKVAGSCGEFSLYRLALSQPEYASAVFRLLWRELGGTLKGQIRSGVVPPDAVVLASHDSPTLGEAIRTINKRSNNVMARTLLLTLGAERGRRPATVESSGVVARTVLGAQGLEMPELVIDNGSGLSREGRVSADSLASMLTVAWNSPLMPEFISSLAIAGVDGTVRRRLKGNGAQGMAHLKTGSLRDVRAVAGYVLGASGKRYVVVSMVNHENAAAVRSFDDALVAWLAEQ

SEQ ID NO: 51011 - protein, 243 aa, Bordetella pertussis
MPANRLKIRMFPSAALRRRPFESHLLEIPHMPVHEIRHPLIRHKLGIMRRADLSTKSFRELSQEVAALLTYEATKDMPLAPASVEGWCGTVEVDKITGKKVTVVPILRAGIGMLDGVLSLIPGAKVSVVGVARNEETLQAHTYLERLVGELDQRLALIVDPMLATGGSMVAAIDMLKRAGCREIRALTLVSAPEGIDAVLKAHPDVQIYTASIDQGLNENGYIMPGLGDAGDRIFGTTQKHAE

SEQ ID NO: 51012 - protein, 768 aa, Bordetella pertussis
VAGEQAQASIADSTLQGAGGVQIERGANVTVQRSAIVDGGLHIGALQSLQPEDLPPSRVVLRDTNVTAVPASGAPAAVSVLGASELTLDGGHITGGRAAGVAAMQGAVVHLQRATIRRGDAPAGGAVPGGAVPGGAVPGGFGPGGFGPVLDGWYGVDVSGSSVELAQSIVEAPELGAAIRVGRGARVTVSGGSLSAPHGNVIETGGARRFAPQAAPLSITLQAGAHAQGKALLYPGPAGAREADADRGADAQGDIVATELPSIPGTSIGPLDVALASQARWTGATRAVDSLSIDNATWVMTDNSNVGALRLASDGSVDFQQPAEAGRFKVLTVNTLAGSGLFRMNVFADLGLSDKLVVMQDASGQHRLWVRNSGSEPASANTLLLVQTPLGSAATFTLANKDGKVDIGTYRYRLAANGNGQWSLVGAKAPPAPKPAPQPGPQPPQPPQPQPEAPAPQPPAGRELSAAANAAVNTGGVGLASTLWYAESNALSKRLGELRLNPDAGGAWGRGFAQRQQLDNRAGRRFDQKVAGFELGADHAVAVAGGRWHLGGLAGYTRGDRGFTGDGGGHTDSVHVGGYATYIADSGFYLDATLRASRLENDFKVAGSDGYAVKGKYRTHGVGASLEAGRRFTHADGWFLEPQAELAVFRAGGGAYRAANGLRVRDEGGSSVLGRLGLEVGKRIELAGGRQVQPYIKASVLQEFDGAGTVHTNGIAHRTELRGTRAELGLGMAAALGRGHSLYASYEYSKGPKLAMPWTFHAGYRYSW

SEQ ID NO: 51013 - protein, 493 aa, Bordetella pertussis
MNPGPYDRLTFAGLPAWLISMTLFPIFADLTGRRVLVVGGGAVAVRKTQALLQAGAEVVVGAPRLDPALAALAEQGGIARLDGGFEPAWLAGAWLVVAATDDRAVNAAVSEAARARRVFCNVVDDAELSSFQVPSVVDRSPLIVAISSSGVAPVLARRLRERIESLFDHSLGQLAALAARYRPRIRAARPDLGQRRRFYDWLLDGPVAARLRQQQPGLAEQELEQALRAPQAAPRGSVVLVGAGPGDPGLLTLKALRALNEADIILYDRLVSEGVLALARRDAERVPVGKLPGKGHDATQARIHALMLAQARAGRRVVRLKGGDAFIFGRGGEELEYLRAHGVPYEVVPGITAALACAAYAGMPLTHRDHAQSVRMVTAHCRADQDTLDWAGLARDQQTLAFYMGVGQLDYVTARLLEHGRAPATPFALIENGSRPEQRVVTGTLADLPEIARRRGVRPPALLVIGEVAALADTLQWFGQHQRGLPGPQALAA

SEQ ID NO: 51014 - protein, 105 aa, Bordetella pertussis
MAARRSDEATKEKLIDSVKTSLNDAETLLREAASTTGDKATELRERALASVRRTREALYDAQDAVLERGRRAARATDDYVHDNPWQAISIAGVTGLLLGLLISRR

SEQ ID NO: 51015 - protein, 303 aa, Bordetella pertussis
MIPDPATAPSMNPTQTTNPMRPFRSVLYTPGANARALARARELDADALILDLEDAVAVSAKEEARVQVTHALREGGFGRRSVIVRVNGLDTPWGEDDVRALAPLGPHAMLLPKVEHPAQLARAAALAAEAGAPGLAWWAMIETPLAILNIGAIAAAGAPLRALVAGTSDLVKALHARHTPARAEVQAALSMTVLAARAHGLLALDGVHLDLADAEGLRHACRQGRDLGFDGKTLIHPRQIDSANAAFGPSEAEVVRAHAIMAAWQDAQAHGAGVTVVDGMLVEALHVEDAQRVLALAQAIAAD

SEQ ID NO: 51016 - protein, 274 aa, Bordetella pertussis
MIAAAGARGAPAIGSKMENTATAAKAKLEVKNLNFYYGKFHAIRNVNMSIRENKVTAFIGPSGCGKSTLLRTFNRMFELYPGQRAEGEILLDGENLLTSKTDISLIRAKVGMVFQKPTPFPMSIYDNIAFGVRLFERLSKGEMDERVEWALSKAALWNEVKDKLHQSGNSLSGGQQQRLCIARGVAIKPEVLLLDEPCSALDPISTAKIEELIAELKHEYTVVIVTHNMQQAARCSDYTAYMYLGELMEYGATDQIFVKPARKETEDYITGRFG

SEQ ID NO: 51017 - protein, 338 aa, Bordetella pertussis
MSAVMDNSVPLPSSTADSTTTGTPSPMKQNNNALMDALFKNLTRTFAFLVFILLAAIMISLIYGSRESLAKYGLSFLWLNDWDPVQQNYGAVVPIIGTLLTSFIALLIAVPVSFGIAIFLIELAPTWLRRPLGTAVEMLAAIPSIIYGMWGLFVFVPVFQQYVQPALIATLGSVPIIGGLFAGPPFGIGIFTAGLILSIMIIPFIAAVMRDVFELVPPMLKESAYGLGSTTWEVMWRVVLPFTKSGVIGGIMLGLGRALGETMAVTFVIGNAFRWSGSLFSPGNSIASALANEFNEAGGIQKSALLELGLILFLITTVVLAFSKMLLVRLSRAEGRQA

SEQ ID NO: 51018 - protein, 452 aa, Bordetella pertussis
MSQRKYFGTDGVRGEVGGPVINAAFALRLGYAAGRVLAREHREHASGRGRNRPQVVIGKDTRISGYMLESALEAGLSAAGIDVLLAGPVPTPAVAYLTRTLRLAAGIVISASHNPYQDNGIKFFSAHGMKLPDDIEAAIEQAVDEPLGCVGSEELGRARRMADAQGRYIEFCKSTFPHDLDLNGLKLVVDAAHGAAYNVAPHVFRELGAEVHAIGVSPDGFNINKGVGALHPESLAEEVRARGADLGIALDGDADRLQMVDGTGRIYNGDELLYAIVRERMQRGPVAGVVGTLMTNYGLERQLQQIGVGFERANVGDRYVLEQMQARGWLYGGESSGHLLCLDCHTTGDGTIAALQVLTALRRADATLAEWVADLRMYPQRMINVPLAPGLDWKTHDGLARARGAVEAELAGRGRVLIRASGTEPKLRLMVEAEDEALAQASAQKLADSLGA

SEQ ID NO: 51019 - protein, 280 aa, Bordetella pertussis
MANNFQCGRFEFDLERPLVMGIVNVTPDSFSDGGEHADTDSAIAHARQLIDEGAHILDLGGESTRPGAQPVSAADELARILPLIEGLRDCGVPLSIDTFKPEVMRAVLDAGADMINDIYGFRQPGAIDAVARSRCGLCVMHMKGEPRTMQEAPEYADLMGEIGVFLGARAQRLRAAWVDPRRIVLDPGFGFGKTMDQNYQLLRRLASLRVSSYPLLVGVSRKSMIGAATGKPVGDRLAGSVAAALACVARGAAIVRVHDVAATVDALKVWQAAEQGAVPT

SEQ ID NO: 51020 - protein, 617 aa, Bordetella pertussis
MVIALVLFTVFKQFDGRAQTQDGVSYTQFMDDAKAGRIRKVDVQGDVLYVTPDAGRPYSLTSPGDLWMVSDLLKYGVQVSGKAREEPSLLMSIFVSWFPMLLLIGVWIFFMRQMQGGGRGGAFSFGKSRARMLDENTNQVTFADVAGCDEAKEDVQELVDFLRDPSKFQKLGGRIPRGVLMVGSPGTGKTLLAKAIAGEAKVPFFSISGSDFVEMFVGVGAARVRDMFENAKKHAPCIIFIDEIDAVGRQRGAGLGGGNDEREQTLNQMLVEMDGFESGQGVIVIAATNRPDVLDPALLRPGRFDRQVVVPLPDIRGREQILKVHMRKVPLSPNVDATILARGTPGFSGADLANLVNEAALFAARRNGRTVDMSDFEKAKDKIIMGAERRSIVMPEEERKNTAYHESGHAIVARMLPKTDPVHKVTIIPRGRALGVTMQLPETDRYSMDKERLLNTIAVLFGGRIAEEIFMNQMTTGASNDFERATAIARDIVTRYGMTDELGPMVYAENEGEVFLGRSVTKTTHVSEATMQKVDSEIRRIIDEQYGVARKILEDNRARVEVMTSALLEWETIDADQIDDIVNDRPPRPPKTPQGPSDTFDTPPTGLAAGGNTAAAV

SEQ ID NO: 51021 - protein, 384 aa, Bordetella pertussis
MAEESDLEKSEAASPRRLEKAREEGQIARSRELGTFMMLAAGVAGVWLSGSMLYQGLTGVLRRGLGFEPRVAQDPGVMVEQAVHGAGRALLTVLPMFGMLAVVAVLSAVLLGGFVFSTKPLEPNFSKLSLWSGIKRMFSAQTVVELVKALAKAALVGGVAVWVIWHYHDDMLGLMHVAPSAALTSAMSLVALCSALIVGSLLFVVLLDVPWQIWNHLKKLRMTKEDVRQEHKEGEGDPHVKGRIRQQQRAMARRRMMSEVPGADVVVTNPTHYAVALKYADGAAGAPRVVAKGTGLIAARIRELAAEHRIPTLEAPPLARALHQHVELGQEIPTALYTAVAEVLAWVFQLRSWRPGLGREPQAPTALVVPAELDPHSPTAAQGA

SEQ ID NO: 51022 - protein, 337 aa, Bordetella pertussis
MSSPDWRLCVAPMIDVTDRHCRYFHRLLAPRARLYTEMITTGALLHGDVARHLDFDAAEHPVALQLGGSEPDALAQAARLGRQWGYDEINLNCGCPSERVQRGAFGACLMAEPALVADCMKAMQDAVDIPVTVKHRLGLDYDESYGFVRDFVGQIYDTGCRVFVVHARNAVLKGLSPKDNREIPPLRYDVARQLKRDFPDCVIVLNGGLADAQAAQAVAGEFDGVMLGRAAWHTPRVLSEVSLQWWPAIRLPSDAQVVDAMMQYAATQIARGVPLRVMTRPLLGLVNGQAGARRWRRLLSDPVRLAANDPSLLYEAWRSLQGAPRERDACADPLPAV

SEQ ID NO: 51023 - protein, 234 aa, Bordetella pertussis
MTTVNETTSQAGLALAQAGSNSAAQGIQDQFLTLLVTQLRNQDPLNPMENAELTSQLAQISTVEGINNLKNTMLAISGQIDVSQSMDAVSMIGKGVLMPGDKVSLGADPNDPAQRGATPFGIDLQGDATKVTVKVLDPSGAVVRTMELGDLKTGVHTLQWDGNNDGGQPLADGKYSITVSASDADANPVKTEALTYGQVKSVAYSTNGLRLDLGLAGQISMLDVRKVIGASGSA

SEQ ID NO: 51024 - protein, 634 aa, Bordetella pertussis
  MISC_FEATURE (155)..(155): X=any amino acid
  MISC_FEATURE (161)..(161): X=any amino acid
MSISRRLFLSVVLLAGLLVIGTQAAGLAANYRASVERQKRHVETAAASLAWVLSQSHTTPAQWQTLATDLQRHGGYALVRIQEHYTGRMIEAGQLSEAPARADGSLQQGRASQIVATRTFRSADGTYVGSSPSTTRSSRSWKPPSSPRAWRSWCXSSPACXSGTAICRALHDRLQRGPLKRLAHNLAHIGQAGVDPKLAEGLPRELQPLGTALVQSHQRVHDQLRQQRARIDALENETYHDPVTRLPNRKFFNESLRRAVQRDGGVDGHLLIFRQRDMAEINRQMKREATDQWLRLACAQLSKTIKEQAGAGAVLVRINGSDFAALLPGLPSPRAAVLAERLRRELRVLRLPLRTHGWCRWAMVLTPYTVGEQVSDILARLDHALMRAEIAESDEVEPAFSQTGNRIDGEYGWQDILTRALEQHRFFLTLYPRQDAEGQVLHTEAQLTLRDQDSPEPLHAQLFMPPAARLGLSADCDIQAIRMSMDQLVARDGDMVVRVSLPSLEQAHFLKRLEDVLRDRPEQAGHLIIEIDAHGLVDYFHNVQALCEIAARTGVRVGVRRLSEQFAALERLHQLPLAYLKIGGSFVQGITRSPGNQQLADTVIQVARTLDIPAYAEDAEEPVARELLQAIGFR

SEQ ID NO: 51025 - protein, 539 aa, Bordetella pertussis
MFANLKVRTGLLLALVALALAALVSIALGWESVREGSRSLHALDSVSVQQGSLLKDAYAQMLRATIRADIAAVQRRGDAAGTLENERTVKQLMGEAKARIEAFRKVPKLSELGRSMETGLTSSFGSFAASLDEMMAALERNDDAAYLQLKNVKAGQASAAFAARLGEFSTNLDKLSSETLAAHETRETIMLYVYAALLLLIVGVIAGSYLYMTRAVVRPLQRASQQFERMAAGDLSARIEGNSRNEIGALLTALRHMQESLTRTVAAVRRGVDEINVGSREISAGNTDLSSRTEEQAASLEETAASMEQLASTVKQNADNARQANQLAASASDVAESGGSAVSEVVSTMDGISASSRKISEIVSVIDGIAFQTNILALNAAVEAARAGEQGKGFAVVAGEVRSLAQRSAQAAKEIKVLIEDSVDKVGTGSQQVERAGATMQEIVASVKRVTDIMGEISAASEEQSSGIEQVNRAVSQMDEVTQQNAALVEEAAAAAGSLQEQAQRLAEAVSVFKINTGEVIEVPAHQLSGYAAPLVAQS

SEQ ID NO: 51026 - protein, 309 aa, Bordetella pertussis
MASTPSPLDRFLSRLLKNDPPRAKSLCVSLLGDALAPHGGAIWLGDLIELLAPIGINERLLRTSVFRLVAQGWLQSERHGRRSLYLLSEHGLRHTAHASQRIYDGPARAWNGEWTLVALPRAGNNGLAERGELRRELLWEGFGMVAPGLFAHPQTEARAAHDILEKLGIPDKALVLSARDQAGAGGLPIASLAGQCWNLDEVADQYRLFSRNFGPVEKLLDPPPTPAQAFAVRVLLLHNWQRIVLHDPQLPTPMEPDGWPGNAARALCRRIYWQVFDASERHLDAVAGRENARYRPAQADIMGRFGGRP

SEQ ID NO: 51027 - protein, 336 aa, Bordetella pertussis
MKNDGKPLDGMTRSAVLMMSLGEDAAAEVFKYLSAREVQQVGAAMASLKQVTRGDVAVVLEEFRQEADQFMAVTLGSDDYIRTVLTKALGSDRAAGLIEDILEAGEGGSGIDALNWLDPHTVAELIGDEHPQIIATILVHLERDRAASVLAMLSERMRNDVMLRIATFGGVQPAALSELTDVLNSVLAGQGAKRSKMGGVRTAAEILNMMNSSQEEAVVESLRERDSDLAQKIIDEMFVFDNLLDVEDRAIQLILKEIDNDTLMVALKGAGDELRNKFLRNMSSRAAEMLREDLEAQGPIRMSKVEGEQKKILQIARRLAESGQIVLGTQGDDAYV

SEQ ID NO: 51028 - protein, 865 aa, Bordetella pertussis
MPHVDLNPLKQRMQAARAAAVAQFRQHPRPDMLLTELRRIVDQALRELVKLCPLPAGATLAAVGSYGRGELYPHSDVDLLILLPQPPSAADARAVEALVAALWDLGLEPGHSVRTLEDCEREARGDITVETALLESRWLAGSRTLMKRLDSAMQARLDAAVFFQAKRVEMQQRHAHYQDTPYALEPNCKESPGGLRDLQVILWMARAAGFGHSWREVAQAGLLTSSEARDLRRAEQAFKRLRIELHLLTGRREDRVLFDLQPGLAAVYGIASTATRRASELLMQRYYWAARLVTQLNVILVQNIEERLFPRPDSDARLIDDDFRNLRERLDIVREDGFERNPTLLLRAFLVMQQHPELIGMSARTLRAIWHSRHRIDAQFRRNPVNRKLFLQILQQPRGIVHELRRMTMLNILPRYLPVFRRIVGQMQHDLFHVYTVDQHTLAVVRNLRRFTMPEHAQEYPLASQLIAGLDRHWLLYVAALFHDIAKGRGGDHSELGAREVRRFAQDHGLDPTDAELVEFLVRHHLLMSAVAQKRDLSDPQVVRDFAAQVGDERRLAALYLLTVADIRGTSPRVWNAWKGKLLEDLFRLTLAALGGAHADAHTVLTERKDEAARLTRLAGLRDDAREAFWNQLDIAYFLRHDASEIAWHTRHLYYQVAPDEPVVRVRPTEHGEGLQVMVYTRDAPDLFVTTCGYFDAKSLSVQDARVHTTRHGWALDSFIVLAPEGFADLRAQATLVEHELAERLRDPHAARHAHAPRRLPHSHARRSRVFPVMPQAELSPDERSQSWRLSVTATDRPGLLYALARVFAEHGVDLIMAKIMTLGERVEDVFIVSGSALERPRSQMQFERAILDALAGDEPRQQAA

SEQ ID NO: 51029 - protein, 544 aa, Bordetella pertussis
MSLARVGIAQINACVGDLAGNAARVLQAARQAAGQGADVLVTPELVLTGYPPEDLLLRPRFIQEQQAVFERLCQDLAGLAGLHVVIGHVLARQDRLYNAATVVCEGRVLGSYCKRELPNYSVFDEQRYFSAHGEAFGFTVKGVRFGLNICEDIWFERAPRAAAADGAQVLLVPNASPYNTGKQEERLSVARRSVQDTGCALIYANLVGGQDELVFDGASFALDAQGRMSARLPDFTEGVNVLEVDARSTVRPVTEQAAVQPYGLEEQVWNALVLGVRDYLGKNGFPGAIIGLSGGIDSAVVLAVAVDAVGADNVRAVMMPSRYTADISLTDAADMARRLGVQYDVIAIGEVVDRFEAALAPQFAGLPVDATEENIQARARGTLLMALSNKTGRLVLTTGNKSEMTTGYCTLYGDMAGGFAVIKDVPKTLVYRLANWRNQRQPIIPERIITRPPSAELRPDQTDQDSLPPYDILDGIIERYMEHNASAADIVAAGFPREAVGQVVRLIRINEYKRRQAPPGPRITPRAFGRDWRYPVTNGFRETV

SEQ ID NO: 51030 - protein, 249 aa, Bordetella pertussis
MSLMREMLEAGVHFGHQTRYWNPKMAPYIFGHRNKIHIINLEQTVAKYQEASKFVKQLVARGGNILFVGTKRAARELVATEAARCGMPYVDARWLGGMLTNFKTVKSSIKRLKDMEAMVADGGFERMTKKEGLLFQRELDKLNKSIGGIKDMNGLPDALFVIDVGYHKIAVAEAKVLGIPVVAVVDTNHSPDGIDHVIPGNDDSARAIALYAKGMADAVLEGREQNINGLVEEIGEGQEEFVEVQDNQA

SEQ ID NO: 51031 - protein, 292 aa, Bordetella pertussis
MAEITAALVKELREKTDAPMMECKKALTEAEGDLARAEEILRVKLGNKASKAAARVTAEGLIGLYIAADGKQGAVIEVNCETDFVAKNTDFIDFINKLAELVATQNPADVAALSALPFGEGTVETTRTALVGKIGENISVRRFERIQTPNSLASYVHGGKIGVLVEFSGAEEVGKDLAMHIAATKPKALNADGVNAEDIAAERSVAEQKAAESGKPAEIVAKMVEGSVQKFLKEVTLLSQPFVKNDKQTIEQMLKEKGASITKFVLFVVGEGIEKKTADFASEVAAAAAGRA

SEQ ID NO: 51032 - protein, 238 aa, Bordetella pertussis
MSSRSYKRVLLKLSGEALMGEDAFGINRSTIVRMTDEIAEVAALGVELAIVIGGGNIFRGVAPGAQGMDRATADYMGMMATIMNALALQDALKHKGVDTRVQSALNIDQVVEPYIRPKALRYLEEGKVVIFAAGTGNPFFTTDTAAALRGAEIGAEIVLKATKVDGIYSADPNKDPTATRYARISFDEVIVRRLEVMDATAFALCRDQKLPIKVFSINKSGALKRAVSGEDEGTLVHV

SEQ ID NO: 51033 - protein, 186 aa, Bordetella pertussis
MSVADIRKSAETRMAKSLETLKASLAKIRTGRAHTGILDHVQVEYYGSPVPISQVANVNLVDARTISVQPYEKSMAGPIEKAIRESDLGLNPVSMGETIRVPMPALTEERRRDLTKVVKSEGEDAKVAVRNLRREANEALKKLVKDKEISEDDERRAQDDVQKLTDRAVGDIDKMIVQKEAEIMTV

SEQ ID NO: 51034 - protein, 502 aa, Bordetella pertussis
MVQIIRQVGRRAVPWRRRGARRPYIIARIMANTSHSSQDQFANKAQAWSARFSEPVSDLVKRYTASVDFDKRMARHDIRGSLAHADMLAAQGIISAQDLADIQRGMQQILSEIDAGSFQWLLDLEDVHLNIEKRLVELVGDAGKRLHTGRSRNDQVATDIRLWLRDEIDTLVDLLRQLRHALATVALENAATIMPGFTHLQVAQPVTFGHHLLAYAEMFGRDAERLADCRRRVNRLPLGAAALAGTSYPIDRERVARTLGFDGVCRNSLDAVSDRDFGIEFCAAGALIMTHISRLSEELVLWMSPRVGFIDLADRFCTGSSIMPQKKNPDVPELARGKTGRVNGHLVALLTLMKGQPLAYNKDNQEDKEGLFDTADTLRDTLTIFADMAGGIKVKADNMRAAALQGFATATDLADYLVKRGLPFRDAHEIVAHAVRDCEQRGCDLADLSLADLQAYHPSIGEDIHQVLTLEGSVAARKHIGGTAPERVREEAQRVLAETAGA

SEQ ID NO: 51035 - protein, 194 aa, Bordetella pertussis
MTVSPLHALTSRRSMKFLRAPAPKQDELEQILQAAMSAPDHGALRPWRFVLIRGDAIGRLADLAIEAVKRSGDKRMTPEKEKSVREWAAGVPLFIAVAQKISHDNTRIPEQEQLLATGAAVMNILNAAHMLGYGAFWSTGLGTYVEDVQDALGLDAMDYRFLGFVALGTPGCAVPPAQRPDFREFVSEWQGVTA

SEQ ID NO: 51036 - protein, 254 aa, Bordetella pertussis
MALSSTQAIPETGDIPRHVAIIMDGNGRWATRRHLPRTAGHAKGVHAVRRVVEACGRRGVRYLTLFAFSSENWRRPADEVSLLMRLFVQALEREVDKLQDQGVRLHVVGDLSAFEPKLQELIAQAQERTEHNDRLHLTVAANYGGRWDILQATRAMLRADPGLAQDPDRIDEARLAEHLSMAWAPEPDLFIRTGGEQRISNFLVWQLAYAEFYFTEQFWPDFGADELDAAFEWYRTRERRFGRTSAQLRGGAKR

SEQ ID NO: 51037 - protein, 365 aa, Bordetella pertussis
MSKVIFLTDRRQADLAAPSADLPPAGEPARDVRARPLRDLRISVTDRCNFRCTYCMPREVFDSSYAFMPHSALLSFEEITRLAAQFARLGVEKIRLTGGEPLLRKNIETLVGMLAELRTPAGRPLDLTLTTNGSLLARKAAALKQAGLSRVTVSLDALDAALFARMSDSNFSPDDVLRGIDAAAEAGLAPVKVNMVVRRGLNDGEILPMARRFRGSGHILRFIEYMDVGSTNGWNLSEVVPSDEVLARIAEHHPLAPLDTPVMGRVAERWRYDDGGGEIGAISSVTHAFCSGCTRARLSPEGRLFLCLFASHGHDLRAPLREGADDDSLARILTGIWGQRDDNYSERRGQGGGAADRIEMSYIGG

SEQ ID NO: 51038 - protein, 401 aa, Bordetella pertussis
MLEFDQAQQLLAQAGAPVAGTENVALEQADGRVLATDLAATVDLPPADNSAMDGYAIRLADYQAGARMPVQQRAYAGDMPQALIPGQATRLFTGSLIPAGADTVVMQEDAREADGQVEITQAPTLGQWIRKRGDGTTAGRPLLDAGTLLHAGHVGLLGTQGLASVPVRARLRIGVLTTGDELVAPGQPRAAQQIYNSNGPMLAALVRGMGAQVSHVLHARDDEDALRAALCTLLADSDLVLSSGGVSVGERDLVKPVLEALGGELGLWKVRMKPGKPVALAHIDGKPVVCLPGNPVSSYAVFALLVSPLVRRMQGRAELYPTVSRLPLRTERPRQDSREEFLRVQWRATEDGAGELQPFGNQDSAIITSVPWSTGLARLPAGVPVNDGERVGYYDLRHWLT

SEQ ID NO: 51039 - protein, 173 aa, Bordetella pertussis
MNDAKQVSLVCAILTVSDSRSAGDDTSGNMLAESLAHAGHMCVRRDLVKKDLYQIRRVISEWIADPEVQVILVSGGTGFTPRDCTAQTIEPLFDKTIEGFGELFRQLSYEEIGSSAVQSSALAGTANDTVIFCMPGSNHACKLGWNRIIREQLDDAHKPCNFAMHYRAKPDAD

SEQ ID NO: 51040 - protein, 363 aa, Bordetella pertussis
MPVLLDPENALALDVLLAGIDAQGLDWHLSAPDAADLPRIRGIGTLSSAGNEEISFLSNPRYQNQLATTRAAAVIVTPDVAQARQEQGASGHVLVVCKHPYLLYARLAQWFERASRPAGPAGVHPSAVVDPSAEIDADVRVGAQCVIEAGARIGRGARLGPGCVIGAGSTVGADSLLHPRVTLYAGVHVGERAIIHSGAVLGADGFGFAPDPTLGRGAWGKIPQLGEVRVGNDVEIGANTTIDRGALDDTIVGDGVKLDNQIMVAHNVRIGAHTAIAACVGIAGSTTIGERCTIGGASMLSGHLAIADDVNISGGTAVTSNIAKAGRYTGVYPYAEHSEWQRNAAVIQQLALLRRRLRALERE

SEQ ID NO: 51041 - protein, 151 aa, Bordetella pertussis
MELDIKGIMDRLPHRYPMLLIDRVLEMVPGKSIVAIKNVSINEPFFTGHFPHHPVMPGVLIVEAMAQASALFSFTDENGGLKCDGAKTAYYLVGIDGARFRKPVVPGDQLRLEVEAERLSRTICKYQGRALVDGQLVAEAKLMCAIRSLEE

SEQ ID NO: 51042 - protein, 393 aa, Bordetella pertussis
MSLRIGMVAGEPSGDLLAGRIIAGLQARAPGVHCAGIGGPQMAARGFEAWHPMHALTVFGYIDAFKRIPSLLSTYGDVKRRLLAEPPSVFVGIDAPDFNLRLEHQLRQAGTPTVHFVGPSIWAWRYERINKIRAAVSHMLVLFPFEEALYRKEGIPVTYVGHPLAGVIPMQPDRAAARARLGIDADARVLAILPGSRSSEIRLLAPRFLQAAAELVRRDPRLQCVVPMVNPQRRAEFEAIATQHPVPGLRCVTAAEGQGETPVAWSVMEASNAVLVASGTATLETALYKRPMVISYVLSPWMRRIMAWKSGQQRPYLPWVGLPNVLLRDFAVPELLQDEATPAALAEATWQALTDEAGAARIEARFTALHQDLLRDTPALAAQAILEVADGAA

SEQ ID NO: 51043 - protein, 201 aa, Bordetella pertussis
MEQPDLFGTLAPLPAIIAGVDEAGRGPLAGAVYAAAVILDPDRPVDGLADSKVLKAEQREALAVQIRAQALAWFVASASVQEIDSLNILRATMLAMQRAVAGLAMAPELAMVDGNQAPKLRCAVQTVIKGDALVPAISAASILAKTARDADLLRLHALYPQYGFDQHKGYGTPQHLSLLREHGPCPEHRRSFAPIKAYGAP

SEQ ID NO: 51044 - protein, 340 aa, Bordetella pertussis
MEPRPMHTAYVPVPAPVRPPSAERWPLAAVAELFELPFLDLLHRAQQVHRQHFDANTVQLSSLLSIKTGGCPEDCAYCPQSAHYDTGVDADKLMPLDEVVRAARAAQANGAQRFCMGAAWRSPKPHHLEAVAEMIGAVKALGMETCVTLGMLRDGQAEQLKAAGLDYYNHNLDTAPEFYGKIISTRTYQDRLDTLQQVREAGINVCCGGIVGMGESRRDRAGLVAQLTNMEPYPESVPINNLVQVEGTPLAGAETLDPFEFIRTIAVARITMPLAKVRLSAGRETMSDSEQALCFMAGANSIFYGDVLLTTGNPQVEADRRLLQRLGMRAEGLPCAAGQA

SEQ ID NO: 51045 - protein, 874 aa, Bordetella pertussis
MKSSEIRQKFLQFFQSKGHTIVPSSSLVPANDPTLLFTNSGMVQFKDVFTGKEARAYKRATSSQRSVRAGGKHNDLENVGYTARHHTFFEMLGNFSFGDYFKREAIQYAWELLTQVYKLPAEKLWVTVYQEDDEAYDIWAKEVGVPAERIIRIGDNKGARYASDNFWQMADTGPCGPCSEIFYDHGPEIWGGPPGSPEEDGDRYIEIWNLVFMQFERDAAGNMERLPKPCVDTGMGLERIAAVLQHVHSNYEIDLFQKLIAAAARETGVKDLADNSLKVIADHIRACAFLIVDGIIPSNEGRGYVLRRIVRRALRHGYKLGQTKSFFHRLVPDLVAEMGEAYPELAQVAERVAQVLRQEEERFGETLEHGMKILDGALAKVAKGDPLDGTTLFTLYDTYGFPVDLTADICREREVEVDMAGFEAAMQRQREQARAAGKFKMAEGLSYEGAETRFEGYENLELSGVKVTALYVEGTQVEQVSAGQDAVVVLDATPFYAESGGQVGDTGLLEAGGVRFAVADTLKIQPGVFGHHGTLEAGALKVGDTLLARVDAVRRARTVRNHSATHLMHKALREVLGAHVQQRGSLVDPDKTRFDFAHDAPMTAEQIARVEAIVNAEVLANQATEAKVMAYDDAVKGGAMALFGEKYGDTVRVLDIGFSRELCGGTHVRRTGDIGLFKVVSEGGVAAGVRRIEAITGDNALAWVQDQNALLQRAAGVLRAPAHELPERIAQVQEQLKALEKELEQARTKLAASAGNDLVATATVEVKGIKVLAASIGDVDPKALRGMVDNLKDRLKPAVVLLAAGSADGKISLVGGVTADLTGRIKAGDLVGFVAGQVGGKGGGRPDMAMGGGTDLAALPAAVASVQKWVDERL

SEQ ID NO: 51046 - protein, 257 aa, Bordetella pertussis
MKHLSSRDNPAVKALHKLAAGGGRRDGRILLDGVHLCQAWLAHQGTPLQALFDVARLDHPEIRALAGQVPPQHCLALDSRLLQGLASVESGQGVVFVARAPEPALPERIDENCVLFDRIQDPGNVGTLLRTCAAAGVRRVLLAAGTAAAWSPKVLRSGQGAHFALHIHEHLDLEAVLPRLDVPLVATTLARSGSLYDTDLPARCAWVFGHEGQGVAEALLRAAALRVHIPHESAAVESLNVGAAAAICLFEQRRQRR

SEQ ID NO: 51047 - protein, 196 aa, Bordetella pertussis
MDTPSTNTTREQLLDYAQKLIRTRGCNGFSYRDLADHVGVKTSSVHYYFPCKDDLLYEAVENYTGSALETLRGISPTLPAKERLDAYIAMVESHSCQADQLCLGGMLAAELNTLPERVRAALQAFFTVEENWLAKVLADGAREGTLRYASTPEKAARALFATVQGCLLGARLFQRPPELREALGALYVQCGASPAH

SEQ ID NO: 51048 - protein, 275 aa, Bordetella pertussis
MTSTPIERAVYIVSDSTGITAETFSHSVLSQFDEVNFKPVRLPFIDTLDKAREVVARINRNALEAGVPPIVFSTLVNPEILALVRQSNGVFLDLFGTFVSHIEQALGLKSSHSIGRSHMAANSEKYRNRIDAINFSLAHDDGQFVNQLDQADVILLGVSRCGKTPTSLYLAMQYAVKAANFPLTPDDFERGALPKTIAPYRGKLFGLSIQPERLAEVRNERRPNSHYARLEQCRYEVAEAERMMRREGISWLSTTTKSIEEIATTVLQEVGLERV

SEQ ID NO: 51049 - protein, 86 aa, Bordetella pertussis
MLVIRLARGGSKKRPFYNLVATDSRNRRDGRFVERVGFYNPVAAEGTENLRIALDRVQYWTGNGALLSPAVERLVKEYSAKVSAAA

SEQ ID NO: 51050 - protein, 207 aa, Bordetella pertussis
MSEAAHSGAAPADLVELGRIASAYGVKGWVKVQPHSAQAEVLRTVSHWWLTRPAPQAARDVVASVPRAYQVLQARVHGGAVVAQLAGIDDRDQAEALRGCFVQAARSAFPAPADDEYYWVDLIGCALYSDADGEPRLLGVVDEVFDNGAHAVLKVLRQQIQPGQPGPVPLLDPKGRPLEELVPFVRAHIRHVDLAARRIDSDWPLDY

SEQ ID NO: 51051 - protein, 257 aa, Bordetella pertussis
MRFDVVTLFPDMFGLVRDQGVTGRAHAQGLWALHAWNPRDFTHDVHRTVDDRPYGGGPGMVMMAAPLEAAVAAAQAARAAQGLQAAPVILLSPAGRRYDQAEATTLAAGTGAIFICGRYEGVDQRFIERCVTHELSLGDFVLSGGELAALAMMDAAVRLLPGVLNDGDSALQDSFNAALDGLLDSPHYTRPEVYEGVPVPQPLLSGHHANIARWRREQSLRLTASRRPELIERARGEGRLSKADERFLASLAGERES

SEQ ID NO: 51052 - protein, 155 aa, Bordetella pertussis
MSIIDNRKATHDYFIEDRYEAGMVLEGWEVKAIRDGRVQLKESYVIVRDGEIYLLGMHVSPLPTASTHIRPDATRTRKLLLKAEEIRKLIGKVEQRGYTLVPLNLHYKNGRIKLDFALGRGKKLYDKRDTAREKDWQREKERVLKHDTRVNQRDS

SEQ ID NO: 51053 - protein, 1414 aa, Bordetella pertussis
MKALLDLFKQVSQDEQFDAIKIGIASPEKIRSWSFGEVRKPETINYRTFKPERDGLFCAKIFGPIKDYECLCGKYKRLKHRGVICEKCGVEVTVAKVRRERMGHIELASPVAHIWFLKSLPSRLGMVLDMTLRDIERVLYFEAWCVIEPGMTPLKRGQIMSDDDFLAKTEEYGDDFRALMGAEAVRELLRTIDIDREVETLRGELKATSSEAKIKKISKRLKVLEGFQKSGIKAEWMVMEVLPVLPPDLRPLVPLDGGRFATSDLNDLYRRVINRNNRLKRLLELKAPEIILRNEKRMLQEAVDSLLDNGRRGKAMTGANKRQLKSLADMIKGKSGRFRQNLLGKRVDYSGRSVIVVGPQLKLHQCGLPKLMALELFKPFIFNRLEMMGLATTIKAAKKLVESQEPVVWDILEEVIREHPVMLNRAPTLHRLGIQAFEPVLIEGKAIQLHPLVCAAFNADFDGDQMAVHVPLSLEAQLEARTLMLASNNVLFPANGEPSIVPSQDIVLGLYYTTRERINGKGEGIFFADVSEVQRAYDNGEVELQTRITVRLTEYERDEQGEWQPVKHRHETTVGRALLSEILPKGLPFTVLNKALKKKEISRLINQSFRRCGLRDTVIFADKLMQSGFRLATRGGISIAMEDMLIPKAKEGILAEASREVKEIDKQYSSGLVTSQERYNNVVDIWGKAGDKVGKAMMEQLATEPVVNRHGEEVRQESFNSIYMMADSGARGSAAQIRQLAGMRGLMAKPDGSIIETPITANFREGLNVLQYFISTHGARKGLADTALKTANSGYLTRRLVDVTQDLVITEDDCGTSHGYAMKALVEGGEVIEPLRDRILGRVAAIDVVNPDTQETAIAAGTLLDEDLVDLIDRLGVDEVKVRTPLTCETRHGLCAHCYGRDLGRGSHVNVGEAVGVIAAQSIGEPGTQLTMRTFHIGGAASRSALASAVETKSNGTVGFASTMRYVTNAKGERVAISRSGELAIFDDNGRERERHKIPYGATVLVGDGEAVKAGTRLASWDPLTRPIVSEYSGAVRFENIEEGVTVAKQVDEVTGLSTLVVITPKTRGGKIVMRPQIKLVNENGEDVKIAGTDHSVNISFPVGALITVRDGQQVAVGEVLARIPQESQKTRDITGGLPRVAELFEARSPKDAGMLAEVTGTVSFGKDTKGKQRLVITDLEGVSHEFLILKEKQVLVHDGQVVNKGEMIVDGPADPHDILRLQGIEKLATYIVDEVQDVYRLQGVKINDKHIEVIVRQMLRRVNIVDPGDTEFIPGEQVERSELLNENDRVVAEDKRPASYDNVLLGITKASLSTDSFISAASFQETTRVLTEAAIMGKRDDLRGLKENVIVGRLIPAGTGLAYHIARKDKEALEAAEREAARQLANPFEDAPVTVGGEPEAPAADTPSDDSAE

SEQ ID NO: 51054 - protein, 338 aa, Bordetella pertussis
MHAFYDSIPARADGSAQCAPLASLRVIGAAGADALAFLHGQLTQDVTGQPADHARLAGYCTAKGRLLATLVMWLAAAADESAPVWQALVRADVAEAVLKRLSMFVLRAKARLAPVPAWAAGVQCAPAALAALQDAAGGALPAAPWQRAELPTGTWIGAPSADAQPRWWWIATEAQLERAGALAAHLGRASESAWQAADLAAGLPWIGAATQDVFIPQTVNLDLIGGVSFTKGCYPGQEVVARSHYRGTVKRRMAHGVIAEAPADLPDPLAGQDIYDSARPDEPCGRVVDAARSDGQLALLFETTLASLPDGDLRLLSAQGPRIALAPLPYELAGNAAG

SEQ ID NO: 51055 - protein, 208 aa, Bordetella pertussis
MTPRGRFITLEGVDGAGKSTHTAWMVQALRDLGLTVLATREPGGTPVGEKLRELLLSEPMALETETLLMFAARCEHVREVIAPALARGEWVVCDRFTDASYAYQGGGRQLGAARVAALEQWVHPDLQPDRTWLFDVPLDVARARLARSRQLDRFEREEDAFFERTRAAYHERARSSDGRIRIIDSSRPLEVVRAQLDSEVRELVAQAA

SEQ ID NO: 51056 - protein, 350 aa, Bordetella pertussis
MSLGRFLPWQTEIARSWLSGRDRFAHAWLIHGNGGIGKLDFTAAAAASLLCESPRQGLACGECAACAWVASGNHPDLRRIRPEAVALEEGADQTEGAEEAEAGSGGAAAKRAPSKDIRIDQIRALEPWFNTATHRGGWRVALLYPAHALNVISANALLKVLEEPPAHTVFLLVADAPDRLLPTLVSRCRRLPLPTPSAGQALQWLGEQGVEPAADWLAAAGGAPLAAQRLAARGDAPCPAWLAQLVQPLAAGKAPDVGTLTENLEKVAAAEWIDALQRLFTDLTLAAHGAASRYYPLLAEPVRQAAARAQPAQLAETARWLSRQRGLATHPLNAKLFVHAALQRVVLSCQ

SEQ ID NO: 51057 - protein, 259 aa, Bordetella pertussis
MVRMYVDSHCHLNFPELAQDLPAVLDRMAANQVTHALVVSVNMPDWPGLMQLVEPHGNLWASVGVHPDYEDTPDPEPAELERLAAHPKVVAIGETGLDYYRLSEPLDWQRERFRRHIRAARSTGLPLIVHTRASAQDTVRLLREEGADEVGGVMHCFTESWEIAQQAVALNFHISLSGIVTFKNAQLVHEVAANMPLDRLLIETDSPYLAPVPYRGKLNDPSKVIHVAEKIAELKGIPVAEVAHASTENFFKLFNKIKR

SEQ ID NO: 51058 - protein, 320 aa, Bordetella pertussis
MPSQLEALRRHTVVVADTGDFEAMRALRPTDATTNPSLILKAVQQEAYRPLLVQTARAHQGASPAEITDRLLVAFGRQILDIVPGRVSTEVDARLSFDTRATVERARGLIALYQAAGVPRERVLIKIASTWEGIQAARVLQAEGIRCNLTLLFCLPQAAACADAGVQLISPFVGRIYDWHKKNAGAEWVEDARRGANDPGVQSVSRIYRYYKRFGIETEIMGASFRNVDQILALAGCDLLTISPELLTRLAQTEGEVPAALSPQAGHDDADAVRLDGGEVAFRTQLNEDAMASEKLSEGIRLFVADARKLDALIESHGAA

SEQ ID NO: 51059 - protein, 1417 aa, Bordetella pertussis
AILALADGTIFRGVSIGVPGHTVAEVVFNTSMTGYQEILTDPSYAGQTVMLTYPHIGNTGVNPEDVEANRVYAAGLVVRDCPARVSNFRATQSLPEYLNAQGIVAIAGIDTRKLTRILRESGAQGSCILVGEDAERAVELARGFPGMSGQDLAKVVSIKERADWTQGTWELGSGYTQPAQDRFHVVAYDYGVKSNILRLLADRGCRVTLVPAQTTAEEAFKLQPDGVFLSNGPGDPEPCDYAVDATRAFLERKLPVFGICLGHQLMGLALGGKTVKMKTGHHGANHPVQDVQSGRVFITSQNHGFAVDAATLPANTRVTHISLFDGTLQGFELTDRPAFCFQGHPEASPGPHDIIVLFDKFISLMAGQNKDSTMPKRTDLKSILIIGAGPIIIGQACEFDYSGAQACKALKAEGYRTILVNSNPATIMTDPETADVTYIEPITWQAVEKIIEREKPDALLPTMGGQTALNCALDLAHHGVLKKHNVELIGANEHAIEKAEDRQKFKQAMTDIGLESAKSGVAHSMDEAWEVQRRIAADIGTAGFPVVIRPSFTLGGSGGGIAYNAEEFEVICRRGLEASPTKELLIEESLLGWKEFEMEVVRDKADNCIIVCSIENLDPMGVHTGDSITVAPAQTLTDKEYQIMRNASIAVLREIGVDTGGSNVQFAVNPQNGRMIVIEMNPRVSRSSALASKATGFPIAKVAARLAVGYTLDELRNEITGGATPASFEPTIDYVVTKVPRFAFEKFPQADARLTTQMKSVGEVMAMGRTFQESFQKALRGLEVGVDGLNQKTTDREKLQIELGEPGPERIWYVGDAFAQGFTLDEVHGLTRIDPWFLAQIKEIVDIELALEQKTLADLDYATLWELKRRGFSDRRLAFLLDSSESEVRKLRHQLNVRPVYKRVDTCAAEFATNTAYMYSTYEEECESQPTDRKKIIVLGGGPNRIGQGIEFDYCCVHAALALREDGYETIMVNCNPETVSTDYDTSDRLYFEPLTLEDVLEIVHKENPVGMIVQYGGQTPLKLARALEANGVSIIGTSPESIDVAEDRERFQKLLNKLGLRQPPNRTARTEAEALAHASEIGYPLVVRPSYVLGGRAMEIVHEQQDLERYMREAVKVSNDSPVLLDRFLNDATEVDVDCLADGQTVFIGGVMEHIEQAGVHSGDSACSLPPYSLSAEVIAEIKRQTTMMAKALNVSGLMNVQFAIQGGDVYVLEVNPRASRTVPYVSKATGLQLAKIAARAMAGRTLADQGITREVVPPYFSVKEAVFPFVKFPGVDTILGPEMKSTGEVMGVGNSFGEAFVKSQLAAGVRLPDSGTVFISVRNQDKPRAVEVARGLHNLGFKLVATRGTAAEIEAAGIPVQVVNKVTEGRPHIVDMVKNGEVSLVINTVEERRNAIADSRTIRTQALANRITFFT

SEQ ID NO: 51060 - protein, 1012 aa, Bordetella pertussis
TFQQIILTLQDYWDKQGCALLQPYDMEVGAGTSHTATFLRAIGPEPWRAAYVQPSRRPKDGRYGENPNRLQHYYQYQVVLKPAPPEILDLYIGSLKALGIDPTQHDIRFVEDDWENPTLGAWGLGWEVWLNGMEVTQFTYFQQVGGLDCTPTTGEITYGLERLAMYLQDVESVYDLVWTEGANGNRVYYRDVFHQNEVEQSTYNFEHASADMLFAHFNDYEAEAKRLMDVPLALPAYEAALKAAHTFNMLDARGAISVTERAAYIGRIRNLSRAVAQAYYDSRERLGFPMLAAARPPGRQPDMTTDIRPLLIELFTEELPPKALQKLGQAFAEGVRATLARHHLLADGCAVEPFATPRRLAVRLSAVLAQAPEQAYAEKLMPVKVGLDANGQPTAALAKKLAAKGLEGLDPATLERESDGKQEYLVARGTAAGAQLAVGLQEGLDAAIDGLPIPKVMRYQLADGQTTVKFVRPAHGLVALFGADIVPIAALGLQAGRATQGHRFQSNGAIELATAQGYEADLAERGRVIASFEARRAEISRLLDEHAQRLGATLGDDPEVTALLDEVTALVEHPTVYVGQFEEQFLQVPQECLILTMRLNQKYFPLFDPASGKLTHRFLIVSNMQVADPANIVEGNQRVVRPRLADAQFFFETDRKTPLAARVEQLGSIVYHNKLGTQLERVERVRAIARGIATALGGDAAHCDRAALLAKADLGSNMVGEFPELQGIMGAYYAQGDGEPADVVTALRTQYRNRYDAPVDAATLTAATLFIAERIETLVGIWSIGLAPTGERDPFGLRRAALGLISAFEQLAAGGWLKVSEDGPLSLDGLLALAAQAFPDGKIGADTLAEVRAFIYERYRNQLIGEHDRNAVEAVIALAPPLHQVAARVRAVAAFAQLPAAASLAAANKRIGNLLKKAEGEIGAVDAALLQDPAEKALAEAVAQLRPQARAQLQAGDFAASLATLAQAREPVDAFFADVMVMADDAALRANRLALLGQLHGLMNQVADISRL

SEQ ID NO: 51061 - protein, 242 aa, Bordetella pertussis
MAWLRSALYALFLIVTVIPYAFACILWAPLPLHWRYRLTVGWPRLAIWGARVICGIRWRIKGAENLPDGPAILLSKHQSAWETLFFPAHMPREVCFVYKKELHMVPFFGWGLALLRMIPIDRAKGRDAFEQVVRQGQVRLDEGRWPLLFPEGTRVPPGKTGRFKMGGALLASRTGARIIPVAHNAGECWRRNAFVKRPGLITVSIGPAIESQDVAPEVLNAKVQAWIEGEMRVLNPERYGQA

SEQ ID NO: 51062 - protein, 722 aa, Bordetella pertussis
MTFRRLAGWRRPALAAAVLAGGVVMALLALDRLFPLPRFGSDGAQVVVAADGTPLRTYPSRDGVWRYPVGPGQVSPHYLETLLTYEDRWFYWHPGVNPFALARAGWQWAAHGRIVSGGSTLTMQVARLLDPELAGQPSKTLSAKLRQAWRAIQLEMHYSKDEILGLYLSHAPMGGIVEGVEMGARMWLGKSAADLSHAEAALLTALPQAPSRLRPDRHPQAAQLARDKVLQRMAQRGVWDAALVADARIENVVAPPLRARWLAPLAAQRLLGEAGPAAGVVRSTLDPDIQSTVEAMLLDRVDALPPKVSMAVLVMDNDSLEVKAYAGSADFTDDSRYAHVDMVRGVRSPGSTLKPFLYALALDEGLIHSESLLLDAPLSFGGYAPGNFQAAFAGPVSVAQALQRSLNVPAVDLLDRVGPARFASVMLAGGVHLRMPAGAVPNLSLILGGGGTTLEELVGAYRALARGGLSGRPRLRASQPRIEARLMSPGAAWIVRDILELGGHPDRPLFQGAAAGRQLAWKTGTSFGFRDAWAVGVTDRYTIGAWVGRPDGTPNPGFFGANVAAPLLQDIVAALPAGAPVPRTRPPQVQAVVTCWPLGWRLGSAPAGICPERRMAWALDDTVPPSFVGYADTATGPLRIEGVADGTILRPVPGKRAVTLEVGAQGASGEVWWMLDGKVYRSGAAGQAQTLTLSRNGRYALTVMDGQGRYAGLEFEISGVTP

SEQ ID NO: 51063 - protein, 244 aa, Bordetella pertussis
MPSDDDKQFEGRFLGVLGGMGPMAGASFMQRLVALTEAACDQQHVPAILWNDPRVPDRPAGQSGQGADPLPWMRHGIRRLEQAGATAIAIPCNTAHVWYPQLAQSASVPVLHIVEAVLDDLRRQGIHAGRVGLLATATTLRLGLYQHEMLAQGYEPVVPPVDLIDGLCAQSIRLVKQNLLPQALPPALACIDSLRAMGVDAIVLGCTELPLALPHALRAELGVAMTDSIDALALAGLGWYRRGG

SEQ ID NO: 51064 - protein, 1238 aa, Bordetella pertussis
MPAPHRLYPRSLICLAQALLAWALLAWAPAQASQELTLVGKAAVPDVEVALDGDDWRWLARKRVLTLGVYAPDIPPFDVTYGERYEGLTADYMAIIAHNLGMQAKVLRYPTREQALSALESGQIDLIGTVNGTDGRQQSLRLSVPYAADHPVIVMPIGARHVPASNLAGQRLAVDINYLPKETLARAYPQATLHYFPSSEQALAAVAYGQADVFIGDALTTSHLVSQSYFNDVRVVAPAHIATGGESFGVRADNTRLLRVVNAVLEAIPPSEHRSLIYRWGLGSSISLDFAHPAYSAREQQWMADHPVVKVAVLNLFAPFTLFRTDEQFGGISAAVLQLLQLRTGLDFEIIGVDTVEELIAKLRSGEADMAGALFVNSARESFLSFSRPYVRNGMVIVTRQDPDAPVDADHLDGRTVALVRNSAAIPLLQRRYPQAKVVTADNPSEAMLMVANGQADAVVQTQISASYYVNRYFAGKLRIASALDLPPAEIALATTRGQTELMSILNKALYSISNDELASIISRWRGSDGDPRTWYAYRNEIYLLIGLGLLSALLFLSWIVYLRRQIRQRKRAERALNDQLEFMRVLIDGTPNPIYVRDKEGRMLLCNDAYLDTFGVTADAVLGKTIPEANVVGDPALAREMHEFLLTRVAAEREPRFEDRDVTLHGRTRHVYQWTIPYGDSLGELKGIIGGWIDITERAELLRKLHDAKESADAANRAKTTFLATMSHEIRTPMNAIIGMLELALLRPTDQEPDRQSIQVAYDSARSLLELIGDILDIAKIEAGKFDLAPVRTALRVLPEGAIRVFDGLARQKGIELVLKTDIVGVDDVLIDPLRMKQVLSNLVGNAIKFTTEGQVVLAVTARPDGDAAHVQFSVSDTGCGISEADQRQLFKPFSQVGGSAEAGPAPGTGLGLSISRRLVELMGGTLVMRSAPGVGTTVSVDLRLTMVEKSVQAAPPAAATAATPSKPQVSLRVLVVDDHKPNLMLLRQQLDYLGQRVIAADSGEAALALWREHAFDVVITDCNMPGISGYELARRIRAAEAAPGYGRTRCILFGFTASAQMDEAQRCRAAGMDDCLFKPIGVDALRQRLNEAVARAALPTPPSPQAAAPATDDATPTAFSAESILALTQNDEALIRQLLEEVIRTNRADVDQLQKLHQQADWPKVSDMAHRLAGGARVVDAKAMIDTVLALEKKAQGQAGPSPEIDGLVRTLAAQSAALETQLRAWLEQRPHQDQP

SEQ ID NO: 51065 - protein, 218 aa, Bordetella pertussis
MRLILLGPPGAGKGTQAAFLTQHYGIPQISTGDMLRAAVKAGTPLGLEAKKVMDAGGLVSDDLIIGLVRDRLTQPDCANGYLFDGFPRTIPQADALKSAGIALDYVVEIEVPESDIIERMSERRVHPASGRSYHVRFNPPKAEGVDDVTGEPLVQRDDDREETVRHRLNVYQNQTRPLVDYYSSWAQSDAAAAPKYRKISGVGSVDEIKSRLSQALQS

SEQ ID NO: 51066 - protein, 274 aa, Bordetella pertussis
MNTYACDGALAQSRPQGWFTPAFTVKRQGGMARWRRRLGVAALGAAMLASLAPAARASLVITGTRVIYNAGSPETTVKMSNEGQAPALMQAWIDDGNAEAKPDEVQVPFFLTPPLARVDPGKGQTLRIFFNGYPDGKTLPSDRESVFWLNVLEVPPKATPEEGHGVLQLTIRSRLKLFYRPKGLSGNPLTAAADLTFKRKPNGVLEVHNPTPYYVNLQKLEVGENGAHGSKTPWMLAPLSSDELRLKGTGAKSVQYWAIDDFGGVTPYQAAIAD

SEQ ID NO: 51067 - protein, 522 aa, Bordetella pertussis
MALLRSAATVSSFTLLSRITGLVRDILVARAFGAGPLTDAFWVAFRIPNLLRRLFAEGAFAQAFVPILGAARTERSDAEVRTLLDRVAVLLTAALMLVTLAGVVAAPWVVTAMASGLRSAERGAEFGAAVWMTRVMFPYILCMSLIAFASGVLNTWRRFAVPAFTPVLLNLAMIAACLWLAPRMDVPIYALALGVMAGGVAQLAVQWLALARLGLTPRWSLDLRQAWRDPTVQRILKQMAPATLGVSVAQISLLINTNIATWLQPGSVTWLSFADRLMEFPTALLGVALGTVLLPSLSAAHARADQDGYSGLLDWGLRLVLMLGLPAALGLALLSDGLVATLFHYGAFQAQDVQQTRLAVIAYSAGLIGLLAIKILAPGFYAKQDIRTPVKIAIMVLVLTQLLNAILVPWLAHAGLALAIGLGACINALALLTGLRRRGVYRPGAGWGRFMLRLVPALAALAAVLLAADRHIDWIALQPWPGLRALWLGGVLLACMLAYFGLLLAAGMRPRDFTRRGARWRM

SEQ ID NO: 51068 - protein, 873 aa, Bordetella pertussis
MKQIPLILAMSLAFAAAAKGESAPDMQAAVNFDSAMLWGGANGADLSRFNYSNALRPGNYIVDIYANNYPLIRQQVRFVAAQTSGQGLKTAPAVACFTYGQLEAMQVRLRALDPALVADLKSSGRCEVLGKLFPDSRESFDFGENRLEVSIPQAYTINRFRRDISPDEWDSGITAFRLGYQYNYADYIGGLRAGRRLDLNLYSGFNFKGWYLRNSSTLGWGQGRFTRRSQRTSLQTDIPSWRARLVFGDVFSSGEYFAPYSMRGMLVGSDTAMLPYSERLYRPTIRGVARTRANVKVYQAGVLVFQDAVPPGPFAIDDYSPASYGGDLRVVVTEANGAVQTFTVPYASAVRLILPGQTQWSFSAGRYRNYRNDGQDRPWVTQLTGRHGVADGVNLYGGLLIAQAYQAGLAGLSWNTPWGAMAADATLSRSQLSTTGNANGSSLRFSYSKTLSGTNTAIRLATLRYSSSGFWNFADAVNAGPVETNGRNGRFGLYSLLGRERPRGDFSVTLSQPLGGYGSLYVSALRRTYWGSSRVDQQTQLGYSTQVGRVGVNLDVSRTENRRSTEHQVMLNLSIPLYGATSSGVVTGSLARTGSAPVQQSVNYSGMSGERDQYTYGLGVQRAGTSAQYALNGSWSGTYGEVSGQLTHGRSYSQYQINGSGGLVAHAGGVTFGQYQAGTIGLIQAEAAAGAKVVNTRNAAVDRSGYGLVSLTPYSLNEVELSPQDLPLDVQLESTVEQVIPRAGAVVALRFPTRHDVAAMLVAEPGSEGALVFGTEVRDGAGKVVGVAGQGASALVRGVSASGTLEVTRADGSICRATYDLKSAGQAVHGLPRIALACAPQGGGERGARAAGQAVAQPSAISISGKDHEPDIR

SEQ ID NO: 51069 - protein, 87 aa, Bordetella pertussis
MANTAQARKRARQSVQRNKHNSSLRSMLRTAIKRVRQSIATGDKAAAGETLRKATSVIDSVADKNIIHKNKAARHKSRLAAAVKALA

SEQ ID NO: 51070 - protein, 194 aa, Bordetella pertussis
MVHDEASTLAWIESQLVTVMARAEAPLWCLLFEAWRAGDDAAAHGWNQWFHASRETRELRQETEQMGRSLARLAQELGWGTAATRAAVAALRPATLPAVHACACAMWALPREAGLGAYVFSWLENQVAAAIKGVPLGQMAGQRMLERLRAGLPAVLADARARAGATPPRLDTFAPQYAMVSARHETQFSRLFRS

SEQ ID NO: 51071 - protein, 333 aa, Bordetella pertussis
MIEMIRQGLQADGITVSIVKLCRWFGVPRRTVYYKPVKVPPKVDPKFATPIKAMIEESPSFGYRTVAHLLGFNKNTVQRVFQLMGWQVRKRPIGFRPRIQALPSVATMPNERWSTDLCRVWAGRNGWATLALVIDCHTRELLGWHLSRSGKACTAGSALEHALIARFGTLGRVPAPFLLRSDNGLVFTSRSYTALVRGYGLRQEFITPHCPQQNGMVERVIRTLKEQCVHRHRFETIQHASRVIGDWIRFYNDRRPHQALGMKTPAEAYALAEPEQVSLGQYTAGVTHTNRRPMAKTRPWPGKGKTGSNEIQGNFADGARGRNRTGTPCGGGF

SEQ ID NO: 51072 - protein, 571 aa, Bordetella pertussis
MTRISRSAYAEIYGPTVVGGVGDRVRLADTLLLAEVEKDHTIFGEEVKFGGGKVIRDGMGQSQRLATDCVDTVITNALIIDAVTGIVKADIGIKDGLISGIGKAGNPDTQPGVTIIIGASTEVVAGEGLIVTAGAIDTHIHFICPQQIEEALATGTTTMIGGGTGPATGSLATTSTSGPWHMAAMLQALDAFPVNVGLFGKGSSSSHGALLEQVRAGAMGLKIHEDWASTPASIDTCLNVAEETDIQVAIHSDTLNESGFVEDTFAAFKGRTIHSFHTEGAGGGHAPDIIRAAGMPNVLPASTNPTMPFTRNTIDEHLDMVMVCHHLDPSIAEDLAFAESRIRRETIAAEDILHDLGAFSIMSSDSQAMGRVGEIVLRTWQTAHKMKLQRGPLQGDSERSDNERIKRYIAKYTINPAVAHGIAHLVGSVEVGKLADLVLWKPAFFGVKVNMVLKSGMAVSASIGDMGASISTPQPVQIRPMWGSHGKALRTSVAFVSQVSLSNPAVSELGLNKRLEAVRGCRGVTKHDMVRNNWLPAISVDPQTYQVYADGQLLRCEALAELPMAQRYFLF

SEQ ID NO: 51073 - protein, 635 aa, Bordetella pertussis
MSQTTTTSASETLGFQAEVKQLLHLMIHSLYSNKEIFLRELVSNASDACDKLRFEAIDQPGLLEGDGELAIRVGYDKAARTITISDNGIGLSRDEAVANLGTIARSGTREFFSQLTGDKQKDAQLIGQFGVGFYSSFIVADKVTVLSRRAGLAANEAIRWESDGQGEFSIAPAEKAGRGTDVVLHLRADEDELLNGWKLREILRRYSDHISLPIRMAKEDWDAEKGEQVKGDELETVNQANALWTRNKSDITDEQYREFYKTVSHDYDDPLAWTHNRVEGRSEYTQLLYVPKHAPFDLWDRDARRGVKLYVKRVFIMDDAEQLLPSYLRFVRGVIDSADLPLNVSREILQESRDVRAIREGSAKRVLSLLEDMAENKAEDYATFWTEFGQVLKEGTGEDAANRERIARLLRFASTHDGEQAQTVSFADYVGRMKDGQDKIYYVTADTFTAAANSPHLEIFRKKGIEVLLLSDRVDEWMLSYLREFDGKSLVSVAKGGLDLAELADEEEKKRQSEVAETFKPLVERLQQALAEQVKEVRVTQRLVDSPACVVVGQNELSPHLLRMLKAAGQEAPEVKPVLEINPDHALVARIRDASDAEFGDWAALLLDQALLAEGAQIADPAAFVKRLNGLLLKA

SEQ ID NO: 51074 - protein, 100 aa, Bordetella pertussis
MELTPREKDKLLIFTAALLAERRRARGLKLNYPETVALITAALMEGARDGKTVAELMSEGTRILGRDEIMEGVPEMISNIQVEVTFPDGTKLITVHNPVV

SEQ ID NO: 51075 - protein, 469 aa, Bordetella pertussis
MLDNLTQRLSRVVKTLRGEARLTEANTQEMLREVRMALLEADVALPVVRDFVARVKEKALGEEVAGSLSPGQALVGVVHKELTSLMGGDLGEHAGELSLATQPPAVILMAGLQGAGKTTTTGKLARWLSEGQHVQGGRKTGKKKVLVVSADVYRPAAIEQLKTVAAQVGVDFLPSDVSQKPEDIARNAIDHARRHHYDVLIVDTAGRLGIDEAMMREIRALHDLVKPIETLFVVDAMQGQDAVNTARAFGDALPLTGVVLTKLDGDARGGAALSVRHVTGKPLKFVGVSEKLDGLEPFHPERMAQRVLGMGDIVSLVEQAQKNIDIAEAQKLASKIKSGNKFDLNDFRDQLDQVKKLGDMGSLLEKLPAQLQQAAGQLQGGQAEKQLRRTEGILNSMTPGERAKPELIKASRKRRIAAGAGVPVQEVNRLLSQFEQMQGMMKQMKKGGMAKMMRAMGGMKGLGRFGGMR

SEQ ID NO: 51076 - protein, 468 aa, Bordetella pertussis
MKYISTRGGMAPQSFSDILLEGLAPDGGLAIPEQLPQVDAATLESWRGLSYADLAFEVLSLFATDIPAEDLRGLTRAAYRQGVFKSEDIVPVRELGQGLQLLGLSEGPTLAFKDMAMQFLGQVFEYVLTRRGTTLNIVGATSGDTGSAAEYALRGKQGVAVFMLSPHGRMSAFQRAQMYSLQDENIHNIAVRGVFDQAQDIVKQLAGDLAFKTRYRLGAVNSINWARIAAQVVYYFHGWLRAAPKGGEVSFAVPSGNFGNILSGHIARGMGVPIRRLVLATNENNVLEEFFRTGGYRPRGPEHTYATSSPSMDISRASNFERFVFDLVGRDPGRVASLWADLARDGSFDLSALKPQFETRYGFVAGASSHADRLQTIRNTFDETGVLVDPHTADGIKVARQFVEPGVPMLVLETALPAKFAETIEAALGRTVPPPADLADLESLPQRVTLMDCDAQAVRAFIEAHAKV

SEQ ID NO: 51077 - protein, 395 aa, Bordetella pertussis
MRKFSRIERLPPYVFNITGELKMAARRRGEDIIDMSMGNPDGATPQHIVDKLVEASTRPDTHGYSVSKGIPRLRKAICDWYMRRYAVEFDPDSEAIVTIGSKEGLAHLMLATLDRGDTVLVPNPSYPIHIYGAVIAGANIRSVRMTPGIDFFEELERAVRESIPKPKMMILGFPSNPTAQCVDLSFFERVVALAKEHDILVVHDLAYADVCFDGYVAPSIMQVPGARDVAVEFFTMSKSYNMAGWRIGYMVGNRELVGALARIKSYHDYGTFTPIQVASIAALDGPQDCVNEIVAQYQRRRDVLARGLHEAGWNVEIPKASMYIWAQIPEPYRAMGSLEFAKRVLSDAKVAVSPGIGFGEYGDEYVRFALIENEQRTRQAVRGIKDMFRKDGLLK

SEQ ID NO: 51078 - protein, 299 aa, Bordetella pertussis
MSDRVCAIGAAPPRARILTGARMKETLNEISTLMPQLVDLGINLGVALLILILGWWASSLLGGWVRRAAQRSPRIDPTIVPMFQSTVIWTVRIFTLIAVLARFGVQTASLIAVLGAAGLAVGLALQGTLQNIAAGIMLLILRPIRAGEYVALSSGSDGTVEEVGLFLTRLVQVDGIHITLPNSTVWNATIINYSRNANRRLDIPVTVHYGDDLGEAIARLEALVRGHEMVLQDPAPIVKASEYRDNGTVVNVRVWTQAAQYWDLRWDLFHQIRRALGEAGFRAPIPVREIQGGGKDAAA

SEQ ID NO: 51079 - protein, 250 aa, Bordetella pertussis
PAIDLNCDMGESYGAWRMGNDEAVLQFVTSANIACGFHGGDPSTMRQTVAAALAHGVALGAHPSLPDLAGFGRRAMQITPQEAYDLVVYQVGALAGVAASQGARLHHVKAHGALYNMAAKDAALARAICQAVRDVDSDLVLYGLAGSALIDAARAIGLRAAQEVFADRTYQADGQLTPRSQPDAMITDLDQAIAQVLGMVRDGSVRTPDGQTVALQADTLCIHGDQPDALVFARGIRLALERDGIAIQAA

SEQ ID NO: 51080 - protein, 624 aa, Bordetella pertussis
MTLPYAIRRLFVDLPRPFKQMLAIVLDAVILLGAFHLALWLRFELFFLTDQYLFLSLLACAGGIAALAAFGVYLYILRYMSERVLAAILGGIVVSVMVVTAGNTFLQLATISRGVLVLYAALALVGLIGVRLIARKLLFPADHHMADPRTPVLIYGAGGAGSQLAMALRTGPHYRPVAMLDDDKRKHRLVVNGLRVYPPEQLPKLIDRHNIRQLLIAMPSAPPKQIRSIVEAAEPYRLRIRLVPSMRELIDPTNGVRLRDVQVEDLLGRDPVAPIDTLLGRCVTDRVVMVTGAGGSIGSELCRQILALRPRKLVLFEIAEPALYAIEQDLRQRIGERNIEIAGVLGSVRDAAHCLAQLQEHGVQTIYHAAAYKHVPIVEHNVSEGIRTNAFGTLNMAETAIQAGVLDFVLISTDKAVRPTNVMGASKRLAELILQAHAQIQDKTRFSMVRFGNVLGSSGSVVPLFRRQILEGGPITLTHPEITRYFMTIPEAAQLVLQAGAMGESGSVFVLDMGEPVLIRELAERMVRLYGLTVKNSDQPDGDIEIRITGLRPGEKLYEELLIGEDSRETLHPRIMRATEYSLPYETLMGQLRMLDRSLQMCSPRQAAELLGQIVREYASVTYA

SEQ ID NO: 51081 - protein, 512 aa, Bordetella pertussis
MNAITGGGELHAVGRAQPISEGSEWTFELIQRYDEAISEIAREYRLDTYPNQIEVITSEQMLDAYASAGLPIGYPHWSYGKEFIRNEQYYRKGMQGLAYEIVINSSPCIAYLMEENSMAMQALVIAHACYGHNSFFKGNYLFRQWTDADSILDYLVFARKYVMDCEDRYGIEAVEAILDSCHALAAHGVDRYKRPTPISYREEAQRQAEREEHARRQYNDLWRTVPRQESPAGAGERRAVFPPEPEENLLYFIEKYAPKLEPWQKELVRIVRKIAQYFYPQGQTKVMNEGWATFWHYTLLNRLHQKGRVTDGFMIEVLQSHTNVVSQRGFDERGYGGVNPYALGFSMMQDIRRICERPDEEDRRWFPDIAGSDWLTTLDFAMRNFKDESFISQYLSPRLIREFRFFAIADHQANPKLEVAAIHDDEGYRQIRKLLAAQHNRDNQVPDIQVVRYFRESDRALVLRHQQSRGRPLAGEDADKVMKHLARLWGFRVRLEEAAPDGTVLSYRQIEP

SEQ ID NO: 51082 - protein, 419 aa, Bordetella pertussis
MNSLIDRRLNGRNKSAVNRERFLRRYKDQIRKAVQDLIRERSISDMDQGGEINLPARDISEPSFRHGEGGDREIVHPGNREFAKGDTFDRPQGGDDGSGSQPGEGESVDQFTFSLSRAEFLNLFFEDLELSHLARTQLGDVKQQRWHRAGYTTTGSPSMLSVNRTLKASLSRRVALGVGARAALDAAEQELDAAREAGAPQAELDRLLAEVEKCAARVARVPFLDDLDLRYRNRVAVAVPMARAVMFCLMDVSGSMDEMKKDLAKRFFTLLYMFLSRKYEHVDVIFIRHTDNAEEVDEQTFFYDPKSGGTIVLSALELMHEIVQKRYSPATWNIYAAQASDGDSFGADAGKSARFLAENLLPATRYFAYIEVPDSQEARKSSLWAEYEQESASHFVMRRICERGEIFPVFHDLFKKETV

SEQ ID NO: 51083 - protein, 457 aa, Bordetella pertussis
MNTPADPQLEYLRVPPHSIEAEQSVLGGLLLDNAAWDRIADVLVEEDFYRHDHRLIWHHIARLIGLARPADVITVNESLASAGKSEEVGGLAYLNALAHNTPSAANIRRYAEIVRERAMLRKLVSIADEISAAALNPQGKEARQLLDEAESKVFKIAQEGERGSAGFQEIQPLLTQVVERIDELYHRESESDVTGVPTGFADLDKMTSGLQAGDLVIVAGRPSMGKTSFSMNIGEHVAIEQGLPVAVFSMEMGAVQLAMRMLGSVGMLDQHRMRTGKLVADDWPRVTHAVQLMQDAQVYIDETPALSSMEVRARARRLARQCGQLGLIIIDYLQLMSANSAGENRATEISEISRSLKGLAKELNCPLIALSQLNRSLEQRPNKRPVMSDLRESGAIEQDADVILFIYRDEVYNPDSPDKGSAEIIIGKQRNGPIGTVRLTFQGSSTRFLNFAPGTQY

SEQ ID NO: 51084 - protein, 151 aa, Bordetella pertussis
MQIILLEKVANLGNLGEVVRVRDGYARNFLIPQKKARRATDAALKEFEARRAELEKVQAEKLAAAQALAERLNGFQLKISQKAGVDGRLFGSVTNADVAEGLRKAGFEAVEKSQVRMPNGQIKAVGEYLVQAVLHADVVADVVVLVEGEMA

SEQ ID NO: 51085 - protein, 90 aa, Bordetella pertussis
MAFFGKRKEKRKFTQQNPLFKRRKFCRFTAAGVEEIDYKDLDTLRDFVQENGKIIPARLTGTRAIYQRQLDTAIKRARFLALLPYTDNHK

SEQ ID NO: 51086 - protein, 126 aa, Bordetella pertussis
MRHYEVVFIVHPDQSEQVPAMVERYQALVTGQSGTVHRLEDWGRRQLAYPIQKLVKAHYVCMNIECGQATLDELEHSFRYNDAVLRHLVIKTKKAPAAPSIMMKSVEREEARKASAEAAATATAAE

SEQ ID NO: 51087 - protein, 265 aa, Bordetella pertussis
MNSPIDPAIVMPDVQSSTDTRHIPIQRVGIRGVRHPMLVLAGDGAAQPTVANWTLTVALPAEEKGTHMSRFVALLEKYRATPMTPALFAAMAREMLPLLHAERGDITASFPYFINKSAPVSGVQSLLDYEMQWIARAVGEQVEFELVAQVPVTSLCPCSKAISEYGAHNQRSHVTVSAIVDGDFRMDELIRLVEDEASCELWGLLKRPDEKYVTERAYDNPKFVEDLVRDVAARLKAHPGIGRFRVEAENFESIHNHSAYAVVEG

SEQ ID NO: 51088 - protein, 486 aa, Bordetella pertussis
MLHIYNTLSRTKEPFKPAHAGQVRMYVCGMTVYDYCHLGHARMLVAFDVVQRWLRASGLAVDYVRNITDIDDKIIRRAVETGRRIGEVTEYYIAAMHADERALGVQPPDREPRATQYVGEMLDIIGRLESKGLAYRAEDGDVNYAVRGFADYGKLSGKSLDDLRAGERVAVGSAKRDPLDFVLWKSAKPQEPDDTKWESPYGLGRPGWHIECSAMSKTLLGLPLDIHGGGPDLKFPHHENEIAQTEGAFGGALANVWMHCGPLMVDADKMSKSLGNFRTIRQTIAQGPLSDTQAEYAVNPREAEMLRFFIVRNHYRSPQNYAPDNLVDAQNALDRLYQALQNTAADGQGVDWSEEPQAQAFKAAMDDDFNSSGAVAALFELASEANRTGSARAVGQLKALGAVLGLLQQDPPAYFQSPTRYSAAARGQGAPAAALDAAAIEARIAERAAAKAARDFARADAIRAELRAAGIELDDKPGGLTQWRRA

SEQ ID NO: 51089 - protein, 303 aa, Bordetella pertussis
MKQSHLACADWLRERAQHVEHVLDELLPGADIAPTRLHEAMRYAVLGGGKRVRAALVYAAGQACPVNGSTLAVGASMDRAAAAVELIHAYSLVHDDLPCMDDDTLRRGRPTVHVQFDEATAMLAGDALQPLAFELLAGMPIAPALVVQAAQVLARAAGSQGMAGGQAIDLHSVGRMLTRDELQTMHSMKTGAMLACSVTLGGIVAGASSTARQALDSYAQAIGLAFQVVDDILDVTADTASLGKTAGKDAADNKPTYVSLLGLEQARALAQELRQAAHQALAPLGESGARLGQLADFIVLRDR

SEQ ID NO: 51090 - protein, 321 aa, Bordetella pertussis
MRNTFLEFEQPLAELENKIEQLRYVQADSAVDISDEIGRLQQKSQNLAKEIYGKLTPWQTALVARHPQRPYTLDYVREIFTDFHELHGDRMYADDQSIVGGLARFNGSACMVIGHQKGRDTKERAARNFGMPRPEGYRKALRLMRLAEKFRLPIFTFIDTPGAYPGIGAEERGQSEAIGRNLYAMAELKVPVICTVIGEGGSGGALAIAVGNAVLMLQYATYSVISPEGCASILWRSADKAPEAAEALAITAPRLKDLGLVDRVVNEPVGGAHRDPRVMARLLRRALGDALRQLQGLGPEQLVDQRLQRLMSYGRFQEVRA

SEQ ID NO: 51091 - protein, 418 aa, Bordetella pertussis
CLPQWLIGDPAGWLLFGAATAAMLLWRSWRLHLVSRWAHDPESAPPAAVGPWDDILAPLYRYTRARARELAETRETMQSMLAAAQALPDGVVTLNEDFQIDWANRMARRHLGLRLPADRGHNLLNLLRAPEFVAYAHRGHWPEPILVRLSLNGQERVMMIHLAGYASNQRLLISRDVTQIERLETTRRDFVANVSHELRTPLTVLAGFLETLRELPAEALPAEQRDQYMAMMHEQARRMQAIVEDLLTLSTLESSPEADPLAVDVGALLRTARQQVEALSNGRHVFEWQIEEGLDVLGSGTELASALSNLLTNAVRYTPDGGRIIVRWRRGADGEALYSVQDTGIGIPARHLPRLTERFYRVDRGRSRAAGGTGLGLAITKHIAMRHDADLLIDSELGKGSTFTLRFPAERVTGEDPD

SEQ ID NO: 51092 - protein, 232 aa, Bordetella pertussis
MSSTILVVEDEPAIQELIAVNLSFAGHKVLRAFDAEQAQTLIRAELPDLILLDWMLPGASGLSLARKLRDEERTRAVPVIMLTAKGAEQDKVDGLEAGADDYITKPFSPKELMARIKAVLRRRAPQLTDDIIDVAGLKLDPVTHRLSGHSQSLSIGPTEFRLLHFFMTHPERVFSRSQLLDQVWGDHVFVEERTVDVHIRRLRKALEPSGHDAHVETVRGSGYRFTAQVPAR

SEQ ID NO: 51093 - protein, 258 aa, Bordetella pertussis
MQTPHSQPESAPQGEQSTHFGFQSVPEADKARKVAEVFHSVASRYDVMNDLMSAGLHRVWKAFTIGRAAVRPGMKVLDIAGGTGDLARAFAKRAGPSGEVWLTDINESMLRVGRDRLTDSGLLVPTAVCDAERLPFPSQYFDRVSVAFGLRNMTHKDRALAEMTRVLKPGGKLLVLEFSRVAKPLAPAYDWYSFNVLPWMGKKVANDEASYRYLAESIRMHPDQETLAGMLRDAGLDRVQYFNLTAGVAALHEGVRLG

SEQ ID NO: 51094 - protein, 419 aa, Bordetella pertussis
MNILLINHYAGSPRYGMEFRPYYFGREWIGHGHQVKVAASTISHIRARAPQAGGRLTRENVDGIEYLWYATLPYQGNGARRLLNMLQFSARLYGLRRDLGGWRPDIVIASSTHPYDVLPAARLARQTGARLVFEVHDLWPLTPRLLGGFKAWHPMIASMQYAEDYAYRHADLTVSMLPCALPYMRERGLDPRRYAHVPNGVPVTEYSSPDFDNPDYLRVRAQIRQLREQCDFVLAYAGTHGHANALDMLLQAMARLRDQPIGLLLLGDGPDKPELKRLAGQLGLRHIAFADPVPRPAVQAVMADIDAAYIGLRRSPLFQFGVSPNKLFDYMLSACPVVQSIESGNDIVADARCGLSVPAEDPAALAAALHGLRTLPAAERQAMGRRGRDYVLARHDYPVLAQQFLDAVQSVTPRRAASR

SEQ ID NO: 51095 - protein, 362 aa, Bordetella pertussis
MPKKILTVLGARPQFIKASVVSAAIAQHPELTEVVVHTGQHFDANMSDVFFDELGMQTPAHQLDIHGGGHGDMTGRMLVALEQVMQAEKPDVVLVYGDTNSTLAGALAAVKLHIPVAHVEAGLRSFNLRMPEEVNRILTDRISRWLFTPTDSATRHLAAEGQSGEKVVQVGDVMYDVALHHGARVTAEGRALAAHGLKPGGYVLATIHRAENTDDAQRLTTIVRALQALAAERQVVWPLHPRTWGILARLGLLDELASTVTLLEPVGYLDMVQLEKYAALIATDSGGVQKEAFFHRIPCVTLRDETEWTELVDAGWNRLAPPVSSAVVAQAVQDALREQPRDVQPYGDGQAARRIVDALAAH

SEQ ID NO: 51096 - protein, 350 aa, Bordetella pertussis
MSSLPITDRKIRFGLVGCGRISKNHIGAIAQHGDRAELVEICDTNPEALQAAEAATGARPFSSLSDMLAQGNADALVLATPSGLHPWQAIEVAQAGRHVVSEKPMATRWEDGKRMVKACDEAGVRLFVVKQNRRNATLQLVKKAIEQGRFGRIYMVTVNVFWTRPQEYYDAARWRGKWEWDGGAFMNQASHYVDLLDWLVGPVESVYAYTATLARRIEAEDTGVAALRWRHGAMGSINVTMLTYPQNLEGSITILGEKGTVRVGGVAVNRIDEWKFAEPHPDDDKIREANYETTSVYGFGHPLYYDNVINCLRGDCEPETDGREGLQSLALLTAIYRSARDGVRIPLPLD

SEQ ID NO: 51097 - protein, 335 aa, Bordetella pertussis
MPNRILIVRTSSLGDLVHMLPAISDIARYVPDTQIDWVAEEAFADIPKWHPAVNEVIKVAHRRWRKAWWSEPVRQERRALAERLRSVSYDVVLDMQGLLKSAWLVRQTRGVRHGLDWRSAREPLVSLFYNVRHRVEFWQPAVVRQRKLAALTFGYNYAGSPDFGLQAFGRAAQADDAPADPGRRMLHLAADRGYAVIMPSASRDDKLWPEDDWRAVFRRLQDAGCALRLLAGNEQEAERARVLVAGMEGVEVLPRMDLTSVAQVLAGARLMVGLDSGLTHLSAALGRPTIGIYRASTPVRTPLVGPSYTASLGDRGASPSREAVLASVEQALAAA

SEQ ID NO: 51098 - protein, 297 aa, Bordetella pertussis
RLAVAVSGGADSAMLAVAAAAALPPGCTLRLFHVHHGLQAAADQWAAQVRGLGALLGVPVDEARVTVPPGQGLGMEAAARLARYQALAGLARQHGVRHILLAHHRNDQAETVLLRLLRGTGLQGMAAMAPFSERDGVAYLRPWLDVDHAAILALAGAVRAQCGWQAVQDPTNTDPRYARAAVRTQLAPALDARWPGWQAIVARHARQMAEAAEIVAEVAQADFATLEPADAGRSFSLAAWRGLSAARQAQALRHWLASQDAPMPTEARLAELQRQVAPIARAGPRPPLALATRGARR

SEQ ID NO: 51099 - protein, 421 aa, Bordetella pertussis
MSLIVQKYGGTSMGSVERIKNVARRVAKWHAAGHKVVVVPSAMAGETNRLLSLAREISPQPDGRELDMIAATGEQASSGMLAIALQAEGVPARSYAGWQVPVRTDSSYTKARIKSIDDKRVLADLDAGRVVIVTGFQGVDDDGHITTLGRGGSDTSAVAVAAAIKADECLIFTDVDGVYTTDPRVVPEARRMAVVSFEEMLEMASLGSKVLQIRSVEFAGKYHVPTRVLSSLTDPLIPLEEEMRSGTLITFEEDEKMEAAVVSGIAFSRDEAKITLLAVPDKPGIAYSILGPVAAANIDVDMIVQNQSVAGTTDFSFTVNRNEYQRTLDLLKREVIPAVSARELVTDEKVAKVSIVGIGMRSHVGVASLMFQTLSQEGINIQMISTSEIKTSVIIDDKYMELAVRSLHKAFGLDQVPGDQV

SEQ ID NO: 51100 - protein, 422 aa, Bordetella pertussis
MLSAVVLLLLLFAASIPVALSLGIAPLPALLARDVPLLAVPQTMFESMDSFALMAVPFFVLAGRLMQTGGIAGRLMDLGLALIGWVKGGLGGAAVLTTMFFSTICGSSSATTAAIGSVMIPEMERRGYPRPFAASVVASSGELGVILPPSVPMIIYAMLTGTSVAQMFVAGILPGLLIGLSLIITILIMSRLGDYGGSQRVSVGEWALNVWRALRRASLSLLMPVIILGGIYGGLFTATEAAVVAVAYTFVVSVFIYREIKWKDLPEIFWSSAVTSGIVLLIVGFASVFAYVLSLYQAPQQVAALLLGVSDNPLVFLLLVNIALLVVGLFMETFAAILILAPVLAPVAVSLGIDPVHFGLIVIVNLAVGMVTPPVGVNLFLVCGIARVSMERLMRPLSVFLGVLLLDLIIITYGPVLYARFF

SEQ ID NO: 51101 - protein, 255 aa, Bordetella pertussis
MTQRLSGRIAIVTGAGSGIGEATARLMAREGAVVVVADKAIEVAERVAQAIVAEGGRAEARQADVGEAQSVRALVDAVAARWERIDVLVNNAGYGIAATVVDTDEADWSALMRVNVDGVFLGCKYVIPIMQRQGAGVIVNTASAGALVGLRQRAAYCASKGAVAALTRAMALDHATEGIRINCVAPGTIESPYFREIYARSDDPEALRASLAARQPMNRLGQPEEVARAIVFLASDDASFATGSTLVLDGGLTAA

SEQ ID NO: 51102 - protein, 209 aa, Bordetella pertussis
MTLSTWLTFFVASWAISFSPGAGAISAMSSGLKYGFARGYWNTAGLILGILFQFLIVAVGLGAVLATSELAFTLVKYAGVVYLIYLGMRQIRTDAAPVTVDAGDPHRASIRELVGRGFLINTMNPKGTVFLLAVVPQFVDPAQPLTQQYLALAGTLAFTDLVAMDVYTLLAAKVLRMLRKAHHIRWMNRVFGSLFILAGVFLATFRRHS

SEQ ID NO: 51103 - protein, 543 aa, Bordetella pertussis
MRQYNPPAMNIPQEVARRRTFAIISHPDAGKTTLTEKLLLFAGAIQIAGSVKARKASRHASSDWMEIEKQRGISVASSVMQMEYRDCVINLLDTPGHQDFSEDTYRVLTAVDAALMVIDAANGVEPQTIRLLQVCRARNTPIITFINKLDREVREPLELLSEIEGHLGMDTVPFSWPVGMGKAFGGVFDIRRNRMRIFRAGQERRGEDDEFIDGLDNPEIPRRFGAAFAQASGEIELINEAAPAFDREAFLAGKQTPVFFGSAINNFGVQEVLDALVDQAPAPGPRQALEREVRPDEPKFTGVVFKVQANMDPAHRDRVAFVRVSSGRFERGMRLKVARTGKEMRPNNVVSFLSQRRELLDEAYAGDVIGIPNHGVLQLGDVLTEGESLRFTGLPFFAPELFQAVEVKDPLRTKQLRVGLTQLGEEGAIQVFRPEAAGGALLLGAVGQLQFEVVAHRLKTEYGVDARMMPSRYTSARWITSDDPRALRKFMDANAAHIAYDVVDAAAFLITSPAQLRVAEDLYPNVKFHALREHGGKVFGDKA

SEQ ID NO: 51104 - protein, 244 aa, Bordetella pertussis
MTAVVNIAAYKFVSIANPADLREPMLEQAGQRQLKGTVLLAPEGINLFLAGAADAIEGFLRWLRADARFADLQAKYSESARMPFRKLLVKVKREIIRMDHPAIRPEAGRAPAVDAATLRRWLAQGRDDQGRELVMLDTRNAFEVEVGTFRGALDWRIERFTQFPQAVRDNQAALAGKTVVSFCTGGIRCEKAAIYMAEAGIEHVYQLEGGILKYFEETDGAGFDGACFVFDERVALDAALAPQA

SEQ ID NO: 51105 - protein, 700 aa, Bordetella pertussis
SFPLSLLRHVTHALVTTALPYANGSFHIGHIMEYIQADIWVRSMRMAGHTVHFVGADDAHGAPIMLKAEKEGITPQALVARYAAERPRYLDGFHIRFDHWHSTDTPENVALSQEIYRALKSEGLIETRSIEQFYDPVKGMFLADRYIKGECPRCHAKDQYGDSCEVCGAVYAPTELINPYSALTGAAPVLKSSDHFFFKLSDPRCVEFLQQWTTGANRQGVKHLQAEVQAKTREWLVGDDGEAKLGDWDISRDAPYFGIEIPDAPGKYFYVWLDAPVGYLASLKSYCAAKGLDFDALLDPAGPTEQVHFIGKDIIYFHALFWPAMLKFAGRKTPDQLNVHGFITVSGEKMSKSRGTGISPLRYLEIGMDAEWLRYYMAAKLNARVEDMDFNPEDFVARVNSDLVGKYVNIASRAAAFITRHFDGELAYDGDTDALAAEFAQQAESIRAAFEAREYNRAVREIMAHADRINQAFDAAQPWVMAKGIGAADAATRARLQDICSRALAGFKALSVMLAPVLPALASRVARELFGANADFAWGDAQQLPQRVAPFKHLMQRVDPKLLDDLFEPPAAEASAPAALPGGEALADTITIDDFAKIDLRIARIVNCEEVEGSTKLLRLTLDVGEGRHRNVFSGIKSAYQPQDLVGKLTVLVANLAPRKMKFGVSEGMVLAASHADEKAEPGIYVLEPWPGAQPGMRVR

SEQ ID NO: 51106 - protein, 1206 aa, Bordetella pertussis
LACGFVFWTVASQNGTRLLLDTVARQLDGEIAGVRGSVLRGLRVDRIRLSVADVDVAVDDLRLDVAWRALGQRLLHVRELAATRVEVGLHTPATPPPDSDEPFALRLPVELALDRLSLGEFVLRQDGEPLPVSAGELQASLAAGRHGARLTLDSLRVTHAVGTLRAQGRLDVASLAQPWPLTASLDLQAQGSGPESPLCLAPLLDARDKTAKDKAAKDKGKDKGKDKGKDKGKDKGKDKGKDKGKDKGKDKGKDDAGEKPDEPADPCGLALQVQAQGTLEQLEAELTGAGQGLALEARAGLLPQAPFPLRTASLKLTREDKSSLAATLDWQPQPGQPGRDRVVATFEAERLDLQRLAGEAIPPAMLSARGGLDAEVDDLSSLHRATLTLDVTKGSSWNRHPLAGKVAASVSALGDPPGAFATAAPAQPHALPGGLWVDQLDVDLQLGPNRVRAQGKLDERAGALKLDAQAPRLDAFWPGIPGAASVKAALDGALARHRGRIEAAYTPADARARLGRARGRRSWSSAAAGGRGRPPRAAAAGWRGSVSRLTADSAGFALALERPVTLAYVPEALAPQWQWQVGATTLALTFPDKQRVALAHAASRGGAGRWETAGRADALVITAAMVRQILVALDPEAVARAERDSGSPVNAPVPAAQRRISLDASWDLKFAGALAGKVRVARRDGDLRIPGDPPIPLGLRTLVLEANATPTGGQASRLDARLDMATARMGAINGTASATLGGLALDPRQPIRVALDADVTDLAWLGLFVGDTLEVGGMLKANVRAQGSLDGKWNASGTVNGDKLRVVRIDDGVRLIDGMLRARLQDDRVILDSLRFPASLRVMPAEWRTREWVSTNPDAKGGYLEATGQWELSAARGQVRLQLHRFPALQRSDRYGMVSGVVTLDAALPRISINGDITADAGWVSLEILQGVPTLDDDVKVVRAGQKNAQGDGPPLQIDMNLKVDMGPRFYITGMGLDAGLLGSIQIRLQEGRLTGYGALRTRGGGIEAYGQKLRLRRGTLTFQGRLDNPLLDIEALRTGEQVEAGVRVAGTAQRPRIDLVSYPDVSDVEKLSWLVLGRGPDASGGDTALLLSVGTALLGGGQPFYKQFGLDDVSVRSGAIGSSGSLLPDRTVAAGVNRDSDADLATQFLVASKRFANGITLSVEQALAGSETVGRASYRLARGLSLDLKAGSVNGIALVYRILLD

SEQ ID NO: 51107 - protein, 131 aa, Bordetella pertussis
RRQCGHRYAIRAGRNLPDKEFRYLRTVIVTAAVYRGFDQELAPHHLTFRHRAGVTPYTSTFVFAECCVFNKQSQPPILCDPFMLSAQALHTTRVYLLPKLRYQFAEFPSPEFSQAALEYSSRPPCVGLRYG

SEQ ID NO: 51108 - protein, 136 aa, Bordetella pertussis
  MISC_FEATURE (77)..(77): X=any amino acid
  MISC_FEATURE (129)..(129): X=any amino acid
  MISC_FEATURE (131)..(131): X=any amino acid
GAGILTSFPSATHLCLALGADSPCADERCAGNLGLTARGLFTPFIATHVSIRTSDTSSSLYKPPSQAYRTLSYRAHXKCTPAASVYRLAPLHLPRRTTRSVSYYAFFKGWLLLSQPPDCLCLPTSFPTXRXFRDLS

SEQ ID NO: 51109 - protein, 333 aa, Bordetella pertussis
MSTLVESPVPSNDSQAAAPAAYDPTQKQKSQAKTARIPIKVVAAEKLKKPEWIRVRAAAPGSRFYDIKRILREHNLHTVCEEASCPNIGECFGKGTATFMIMGDKCTRRCPFCDVGHGRPDPLDTQEPENLARTIAALKLSYVVITSVDRDDLRDGGAAHFVECIAKVREYSPDTRIEVLVPDFRGRLDRALHILNSGPPDVMNHNLETVPRLYKQARPGSDYAHSLKLLAEFKKLHPEVPTKSGLMLGLGETDEEILQVMRDMREHNVDMLTIGQYLQPSEHHLPVLRYVHPDTFAMFEREAYAMGFTHAAVGAMVRSSYHADQQAHAAGVN

SEQ ID NO: 51110 - protein, 591 aa, Bordetella pertussis
MNSAARNAPAGSQPVKAELWKRVYSRVGSYWKGLVLAVLLMAGAAATQPTLAVIMKPLLDDGFSGAKPHYVWFLPLAVVGLILLRGICNFFSDYLLAWVANNVLRGIRGEMFERLLGLPDADFKRGDTGRLLNRFTIDAGNVTGYATDVITVLVRETLVVIALIGVLLYMSWALTLIILVMLPVSVGIARAFTRRLRRINRETVNMNAELTRVVSEGIDGQRVIKLFDGYDAERRRFDFVNSRLRRFAMRSATADAALTPLTQVCISVAVGAVIAVALSQANSGALTVGSFASFMAALAQIFDPIKRLTNLAGKMQKMLVAAESVFTLVDQTPEADAGTRALPEPVRGKVEFRAVSHRFPDADRDTVSAVSFLVEPGQTVALVGRSGSGKTTLVNMLPRFVLPDGGDILFDDVPIQDLTLRSLRSHLSLVSQDVVLFDDTIAANVGYGAGGTVDDARVRDALAAANLLEFVDGLPLGIHTPVGQNAARLSGGQRQRLAIARALIKNAPVLILDEATSALDNESERQVQASLERLMRGRTTLVIAHRLSTVQNADRIIVLDAGKIVEHGPHSELLAANGLYASLYNMQFRED

SEQ ID NO: 51111 - protein, 419 aa, Bordetella pertussis
MNDSVKSVLSSFVFYYPFFMSYFWIVGGLLHFFLFEQGRKHRATLLPRVPRVAIVVPCYNEGENVAEVIAHLDRMHYPNYRIIAVNDGSRDNTGALLNELAEQYPRLLVVHQSRNEGKAIGLNTAAQLSDAEFLLCIDGDSLPHPDSITYMLTHFLHAGHVGAVTGNPRIRNRSTVLGRMQVGEFSSIVGLIKRTQQLYGKLMTVSGVMTMFRKQALHQVGYWSPDMQTEDIDISWKLQLAGWTLRYEPRALTWILMPETFRGLFKQRYRWARGGIETALKYAPRMLNPRQILMWPIFLEFSLSVLWAYAMLFLICMAVLGQFVALPPAWQFEIFPRWHGTLLFLTCLAQLFAGCIVDRAYDYRIFRYFADAVWYPIAFWIIGMITTVFALPRVLFRRAQSRARWVSPDRGIKHESVDH

SEQ ID NO: 51112 - protein, 701 aa, Bordetella pertussis
MTAMHRTLLKWFACCALGLLMLPARAYKVDMLPPPDPDDGLTFRVLCMHDVRDNLRASFADMPDQFAIETRTLTDLFEWIRVKGFNLISMQQIIDSRAGVRPLPPRPILLTFDDGYASTYTKVFPLLKKFNYPAVVAVVTSWTDAPAGTKIRLSPKIEVPHDFFMTWAQLREMAQSGLVELASHSHNLHRGVLANPQGNEQPAASSRQYLPASGRYENDAEYRARVRQDLKTSADLIREHTGVTIRSIVWPYGAHNRDTDQVAAEVGLNIGLTLQPGPNTPDVSLTQIRRSLVDYEVNVATVARAMREPVSYHGQVRPIERIVQVDLDYIYDPDPEQQNRNLGQLIDRMKDLAPSAVYLQAFAYPKGDGDITEVYFPNRHLPMRADLFNRVAWQLKTRAGVMVYAWLPVLTFSVPPGNPAYGKVVQSTTRKPGERGLGSPTRLSPFHPDAHRVISEIYEDLAKAAHFDGLLFHDDAVLDDTEDSSPEALATYQGWGLPPDIAAIRADPKLAQQWSKGKIRYLIDFTMHLRHIVSGYQNDRDMVVARNLYAQPVLDPVSEAWYGQSLPEFLKSYDFVALMAMPNMEGAARPEQWMRQLVAAVARQKGLDRTIFELQARDWRVGKPIDTEILRKQMVQLRSLGAINYGYYPDDFIANHPDAEVLRDVMSLKSTLEKRRLTKAQELSRQTTLYGSASQAEPTQR

SEQ ID NO: 51113 - protein, 401 aa, Bordetella pertussis
MFDVAVIGAGAAGMMCAAVAGQRGLRMVLIDHAAKLAEKIRISGGGRCNFTNLGAGPANFLSDNPHFCRSALAGYTPQDFLGLLRRHRVHWHEKHRGQLFCDDSSETIIEVLRAECGQGGVAWRMPCRVDEIARREGGGFTLRTSTGAIDARAVVVATGGMAIPQLGATDYALKVARQFGLKVVEPRPALVPLTFDPAQWQPFAALSGVALEVTLSTGQGKGRAAFLEDLLFTHRGLSGPAILQISSYWKPGEPIVLDLAPGRDLAAELIGAKPGNRQQLHTVLAGLWPRRLADTWLDVAGRAVGADLAAARLADVPDRTLRALAALIHDWRLVPSGTAGYKKAEVMRGGVDTRALDQKSMQARGVPGLYFIGEAVDVTGWLGGYNFQWAWASGYACGNAL

SEQ ID NO: 51114 - protein, 366 aa, Bordetella pertussis
MSAPLKRTPLAEEHLAAGACMVDFGGWDMPLAYGSQLEEHHAVRQDAGMFDVSHMLNVDVGGADATAFLRRLVANDVARLATPGKALYSCMLNPQGGIIDDLIIYYFAPDQWRVVVNAGTADKDIAWMQRVAAADGFDVVIAPRRDLAMVAVQGPNARAKVWAARPAWQAASEPLAPFSAAAVEAGTLVARTGYTGEDGFEIVLPADAVVQLWRDLLAQGVRPCGLGARDTLRLEAGMNLYGQDMDELVHPDQAGLSWTVALKDEARRFVGRDAIEQFAVPRAFVGLKLQERGVMRAHMPVRCAQGMGELTSGTMSPTLGVSVGFARMPVGVQPGDAVEVEIRGKWVPALVCKLPFVRHGKAVEHS

SEQ ID NO: 51115 - protein, 954 aa, Bordetella pertussis
MSRAPDTHSDFIPRHIGPSDEDQATMLVAIGAASLDALIDEVVPPRIRSRAPLALPAARSETDVLQDLKRIAARNQIYRNYIGQGYYGTHTPNVVLRNVLENPAWYTAYTPYQPEISQGRLEALLNYQTMVADLTGLDISNASLLDEGTAAAEAMTLARRGSRSSSPVFFVSQHCHPQTLEVVRTRAEGLGIELVIGDESRGLPECFGVLLQYPHSLGGVADYRELAQAAHAQGAVVACVTDLLALALIEPPGQWGADIAVGSAQRFGVPFGFGGPHAGFMACRDAYKRNMPGRLVGVSKDAQGNPALRLALQTREQHIRREKATSNICTAQVLLAVMAGLYAVWHGPRGVRRIAERVQSLTGALRAALAGLGVKVANDTWFDTLSLETGAATPAILAAADCARINLRQVDGARLAVSLDETVTLADLQALVNVFAAGLGKDEVALAPPQASLDGIPAAVRRQGPILSHPVFSSVQSETDMLRYLRKLADKDLALDRTMIPLGSCTMKLNATAEMIPITWPEFALIHPFAPASQTPGYRELIEGLSAQLCEITGYDGISLQPNSGAQGEYAGLLAIRAYHQANGQPQRNVCLIPASAHGTNPASAQLAGMDVVVVASDANGNVDLADLRARIAQVGERLAALMITYPSTHGVFEEAVTEICDAVHEAGGQVYLDGANMNAMVGVAQPGKFGSDVSHLNLHKTFCIPHGGGGPGVGPVAVRAHLAPYLPGVLDARGRLDPEAKVGPVSAAPYGSAGILPIPYVYIALMGAEGLRRATEVAILNANYIATRLRGHYPVLYAGRNGRVAHECILDVRPLKETSGISAEDIAKRLMDYGFHAPTMSFPVAGTLMVEPTESEGLAELERFIEAMIAIRAEIAQVESGERDRDDNVLRNAPHTAQMLLAEEWHHDYPRQQAAYPVASLRENKYWPPVARVDNAYGDRNLVCACLPVEAYA

SEQ ID NO: 51116 - protein, 560 aa, Bordetella pertussis
MLLEQQKQLISLIQAAVAQCLPEAQAQVQLERPKVAAHGDIATNVAMQLAKPARRNPRELAQGIVDALMAQPQARELIQDAEIAGPGFINFRLTPAARQAVVQAVASQADAYGRAPRNGEKVLVEFVSANPTGPLHVGHARQAALGDAICRLYDASGWDVTREFYYNDAGNQIDNLAISVQARGRGIAPDAPDYPADGYKGDYIVEIARDFAARKSVQASDGQPVTATGDLDSLDDIRAFAVAYLRREQDLDLQAFGLAFDNYFLESSLYASGRVQETVDTLVAKGHTYEEGGALWLRTTELGTGDDKDRVMRKSEGGYTYFVPDVAYHKVKWERGFHHAVNIQGSDHHGTVARVRAGLQGLAGIPKDFPAYVLHKMVKVMRGGEEVKISKRAGSYVTMRDLIDWVGRDAVRYFLIQRRADTEFVFDIDLALSKSDENPVYYIQYAHARICTMIGNSGASAAEIAQADTALLTAPSEYALLQRLAEFPQVVALAAQELAPHHVAFWLRDCASDFHAWYNAERVLVDEPALKLARLRLAATTRQVLANGLALLGVSAPDRM

SEQ ID NO: 51117 - protein, 261 aa, Bordetella pertussis
MGFLAGKRILMTGVLSNRSIAYGIARACRDQGADLAFTYVGDRFKERITEFAASFGSDIVLPCDVAEDSQIDAAFAELGKRWDGLDGLVHAIGFAPREAIAGDFLDGLSRENFRIAHDISAYSFPAMAKAALPLMEGRKGSVLTLSYLGSERVVANYNTMGLAKASLEASVRYLATALGPRGIRANAISAGPIKTLAASGIKDFSSILKFVEANAPLRRNVTIEDVGNVAAFMLSDLAAGITGEITHVDAGFSTVVPGMEN

SEQ ID NO: 51118 - protein, 462 aa, Bordetella pertussis
AANLGLAQFCYQAYGQRFNFGFAYSILTTNYDETVQLLTQHWRSAALTLAVLALLLWVVRRAAHELPTRWLALGAAATALVFFGSWLRYELAMRGAADEYYPSIERTVSRSPMFNMRYFIQASYDQSLLDTAGRHRVTHALTRRDTGIDTYVVVVGESARRANWGLYGYARDTTPRAAAERDRMTLYTQAAAPAPLTIMAVPLTLSAATVDSYDPRLFGDNVVALAGDAGFRTYWLSNQARLGRYDTSVTAMANMAHFKTWADAPYDEALLPLLDAALAEPGRKVVFLHINGNHDNYCTRYPETATVYQGGAPYEDCYDNSIRYVDALLGAVMDRLRERRASLLFYPDHGLERHESVLGTFYHGGVRPSREAFDIPMFIWNSPAAPAPARREYDAPYSTEDNYGLILDWLGVATGVDDCKHRPAAPACAGRPVRVIDAKRDVYAYADLRRTRTAAARPRPRG

SEQ ID NO: 51119 - protein, 1163 aa, Bordetella pertussis
MSEAVTNPPPFVHLRVHSEFSVSDGIVRISDLIKRVAKLGQPAVALTDLSNIFGLIKFYKGARGAGVKPVAGSDVWLTNDDDREKPFRLLLLVRNHQGYLNLCELLTRSFLENQYKGRAEVRREWLQGQEGLIVLSGARGGDVGQALEAGNAVTALSLARQWGQLFPGSYYIELQRAGFDGDETYTQAAMRLAAEAGLPVVATHPVQFLDRDEFQAHEARVCIAEGEILANPRRVRRYTQDQYLLSSEEMARRFADVPSALANTVEIARRCNLTLVLGKPRLPNFPTPDGVTLDDYLVQLSEEGLEKRLQFLFPDEAERNAKRDQYYERLRWECKTIIQMGFPGYFLIVQDFINWGKNNGVPVGPGRGSGAGSLVAYALGITDLDPIRYDLLFERFLNPERVSMPDFDIDFCQDNRERVIDYVKMKYGREAVSQIATFGTLGAKAVVRDAGRVLDMPYLFCDALSKLIPFNPADPWTLERTLKDEPAFKDRYEQEEEVRALVDLARPLEGLTRSIGMHAGGVLIAPGKLTDFCPLYCQPGQENSAVSQFDKDDVEAAGLVKFDFLGLRNLTILDWAVRFVRQFNADKRDFDVMALSLDDQAAYKVLCDANTTAVFQLESRGMKELLKKLRPSTFEDIIAMLALYRPGPLESGMVDDFVNRKHGRAAVDYFHPDLEGTLRSTYGVIVYQEQVMLISQIIGGYSLGGADLLRRAMGKKKPEEMAKHRELFEQGAREKGHDPDLAVKLFDLMEKFAGYGFNKSHSAAYALIAYQTAWLKAYHPTEFLAATLSSDMDDTDKVQIFVRDAQDNGVEVLPPDVNASGYRFEPVADKHTEQGKPPRTMRYGLGAVKGTGQGAVEEILRARQEGGPFANLFDFCRRVSKHAVNRRTIEALIKAGAFDTIEPNRAAMLVSVGTAMEAAEQAARSANQSSLFGDDSGDVVAGELTKVAPWNLHTTLTEEKTALGYYFSGHLFDAWRDEVRRIVPMQLARLEPQRDLQWMCGVLAGVRTMMTRRGKMVFAVLDDGTAQIEISVFNELYEKHRGRLREDQLLVVQGKVSNDEYSGGMRIVAEQLYDLQLAREARAKSLRIRLNGQADAARLRQLLNPFRAEPENGVPGVPVDVVYRRNNFLCTVRLGEDWRVRMADTLLENLNDWAKPDGVEVTY

SEQ ID NO: 51120 - protein, 355 aa, Bordetella pertussis
MGAGLLRLRTCPELYPVGAAAGTISPPFRARWAAACVTIPDYRFIPRMPQRRPLRTMKWLIPGLWLASILFAHFRGRVRLSLSRQMLDHSVLLAPVNAFMVLTSRVPTTPYLTTSEIPELKVLDDNWETIRDEALKMAELRRIKAAERHDDIGFNSFFKYGWKRFYLKWYDARHPSAEELCPKTVAILKSLPKVKAAMFAELPPGGKLNPHRDPFSGSLRYHLGLATPNDDRCYIAVDGESYSWRDGESVVFDETYVHEAHNKSEGNRIILFCDVERPLKWRWAEAFNRWFGRVVMSAASSPNDAGDQTGAINKLTHAHWVIDQKRKQFKAWNRTVYKATKWGLIALVAIGFLAL

SEQ ID NO: 51121 - protein, 587 aa, Bordetella pertussis
MTHAPTPPAASNFLRPIIEDDLQANRFQGKLWAGKPGPAALQAQGQPDPARIRTRFPPEPNGYLHIGHAKSICVNFGLARDYGGVCHLRFDDTNPEKEEQEYVDAIIEAVHWLGFDWQADGNDNLYFASDYFEFMYEFAEALVQAGHAYVDEQSAEEIRASRGTLTEPGTDSPWRDRPADESLLRLREMRDGKHPDGSLVLRARIDMASPNINLRDPVMYRVRHATHHRTGNAWCIYPMYSWAHPVEDALEGITHSICTLEFEDQRPFYDWILARLAELGKLARPLPHQYEFARLNLTYVVTSKRKLLQLVREGYVDGWDDPRMPTLFGLRRRGYTPSSIRLFCDRTAVSKSDSRIDYSLLEQAVRDDLDPVAPRSVAVLDPLKLVITNYPEGRSETCSAPRNPHDPQAGVREFPFTRELWIEQDDFREEPPKKYFRLFPGNTVRLKYGYVVRCTGFTKDESGKVVEVQAEYLPDTKSGTPGADSVKVKGNITWVSAAHAVPAQVHLYDRLFADAHPDGGDKDFLACLNPNSKQTVQAWLEPGIEAVPGATWQFERLGYFTVDSKDSRPEAPVLNRIVTLRDSWQAA

SEQ ID NO: 51122 - protein, 538 aa, Bordetella pertussis
MAQYVYTMNRVGKIVPPKRQILRDISLSFFPGAKIGVLGLNGSGKSTLLKIMAGVDKEIEGEAIPMPGLNIGYLPQEPELNPEHTVRQSVEEGLGAVFNAKQRLDEVYAAYAEPDADFDALAAEQAELEAVIAAAASSGADDIEHQMEIAADALRLPPWDAMVVKLSGGEKRRVALCRLLLSKPDMLLLDEPTNHLDAESVEWLEQFLHKFPGTVVAVTHDRYFLDNAAEWILELDRGYGIPWKGNYSSWLEQKEDRLKQEEATESARQKTIKKELEWVRQNPKGRQAKAKARIARFEELSSYEYQKRNETQEIFIPVGDRLLIDDLSFKVPAGAIVGIIGPNGAGKSTLFRMLAGREQPDSGEVKLGQTVKLAYVDQSRDSLEGNKTVFDAVADGADLLTVGKFEMPSRAYLGRFNFKGGDQNKIVGQLSGGERGRLHLAKTLIAGGNVLLLDEPSNDLDVETLRALEDALLEFPGSVMVISHDRWFLDRIATHILAFEGDSQVVFFDGNYQEYEADKKHRLGEEGAKPKRLRYKAL

SEQ ID NO: 51123 - protein, 274 aa, Bordetella pertussis
MVVTKMAADVIAPASIGFYRWVLAGLLLAPFALPGVLRQWPQIRPNLGRLAVLGGLGMALYQGLMYVAAGTTTATNMGIITAMVPLLTVVVGSLVLRERPALTAILGAVVSLAGLGILLGEGNPLRLLALGGSRGDALMGLAALAYALYGVLLRKWPMSVGPWQSLFVQVLFGIVFQLPAFLLTPASSLNAQNIPLVLYAGIFPSLFAPFLWMQGVRYLGPNRASIFLNLMPVVTVAIAAAFLGETPHLYHIAGGLMALAGVSLAQWRPARRRA

SEQ ID NO: 51124 - protein, 354 aa, Bordetella pertussis
MFVCKTQRFFWLRHRKAPYGRDARPAGRRRAARDTPRLHPSEHAMDNPIQNLAVVGAGAMGSGIAALFASKGFDVVLIDPMEGALTRAAQVIERQLGVYAPDAIAPAMQRIRMDAGLEAACSAQLVIEAVPEKLALKRDIFARLDTLCDPQAIFATNTSGLSINDIAQAVTRRDRFVGTHFFTPADVIPLVEVVRNDDTSEQTVARVMDMLRAGGKRPVLVRKDIPGFIANRIQHALAREAISLLEKGVASAEDIDEVVKWSLGIRLALSGPLEQRDMNGIDVHYAIASYLYQDLENRTTPSELLENKVQAGELGAKSGQGFYAWPPERRERVLRDKSAALAELAAWLENRKPV

SEQ ID NO: 51125 - protein, 269 aa, Bordetella pertussis
MKGPNKSLRMLVLGLGYFFLYVPIISLMVFSFNDSPVVTSWTGFSLRWYGSLLEDSALLRAAWLSFKIAVLTATAATIIGTWAGYVLGRMGRFRGFTLYVGMLSAPLVIPEVVLGISLLLMFVEMRGHLGWPEQNGVFTIWVGHVTLCMAFVAVVVQSRIRDMDRSLEEAALDLGATPIKVFFAITLPLIAPALVSAWLLAFTLSLDDVVIASFLSGPGSSTLPMEVFSRVRLGLKPEINALATLFILAVGTCVIIANRLQWRKEADNR

SEQ ID NO: 51126 - protein, 141 aa, Bordetella pertussis
MTTTRVQPISEPLDTSKTVFDMLGGEPGVRELVDRFYDLMDMESDFKALRDAHGPSLEQARDKLFWFLCGYFGGPDHYIERFGHPRLRARHLPFSIGEIERDQWVACMGRAMQDQQLPAALVDRLLQAFYGTADWMRNRAG

SEQ ID NO: 51127 - protein, 324 aa, Bordetella pertussis
MAELRFAHAINRALAECMEEDPMVFLFGEDIAEAGGPFGVTRGLHDRFGSDRIRDTPISEATMANAAVGAALSGLKPVLEIMFMDFMTLTMDALVNQAAKARFMFGGQASVPMVVRTPHGGGISAGPQHSQCLEAWFAHIPGLKVVCPSNPADAYGLLKSAIRDPDPVVFVENKALYAAKGEVPDDVGPIPLGQARIARAGRDLTVVSYGAMVHKVERAAEALARDGIEAEVLDLRSIQPWDEAAVLASLRRTHRLLIVHEAVEAFGVGAEIAARMADIGFDELDAPIVRVAAPFVPVPFAPSLEAQYQPQEADIIAAARKLCA

SEQ ID NO: 51128 - protein, 323 aa, Bordetella pertussis
MARANKEQLLDAYQRMLGIRLVELRLGRLFADGEVPGFIHLSVGQEAVAAAMGMVLRPDDTVASTHRGHGHALAKGIDMDDFFLELMAREEGICKGRGGSMHVANMSIGMLGANAIVGASIPIALGSALAHQVRKTDALAVAFFGDGAMAEGGLHESLNLAALWQLPLLFLCENNGWAEFSPTHKQFVAPLDKLSAAFSIPHAKVDGNDVLAVMDAAQAAVADIRAGKGPRVLECITHRWRGHYEGDPQKYRDSDEISGLDEHDPVARFEAVLDSKGVSQAQRQKVRDAVQAQVDQAVERARKGRPPVWETARTDVYTQAEAR

SEQ ID NO: 51129 - protein, 436 aa, Bordetella pertussis
MNLSDKKATLSFSDGSAPIEFPVYKGTVGPDVIDIRKLYGQTGMFTFDPGFMSTAACASGITYIDGDKGELLYRGYPIEQLAVNCDFLDICYLILNGELPNGGQKQDFDSQVTHHTMVNEQLHFFLRGFRRDAHPMAVLTGLVGALSAFYHDSTDITNPHHRHVSAIRLIAKMPTLVAMAYKYSQGQPFIYPQNDLSYTGNFLRMMCATPCEEYKVNDVVERALDRIFILHADHEQNASTSTVRLCGSSGTNPFAAIAAGVACLWGPAHGGANEACLQMLEELQANGGVAKVGEFMEKVKDKNSGVRLMGFGHRVYKNYDPRAKLMQETCKEVLVALGLENDPLFKLAMELERIALEDDYFVQRKLYPNVDFYSGIVQRAIGIPTSLFTAIFALARTVGWIAQWNEMLSDPDYKIGRPRQLFTGSVTRDVPGMDKR

SEQ ID NO: 51130 - protein, 588 aa, Bordetella pertussis
MNSLPRRQFDVVVVGAGGAGMRCSLQLAQAGLSVAVLSKVFPTRSHTVAAQGGVSASLGNMSEDNWYWHMYDTVKGSDWLGDQDAIEFMCREAPNAVYELEHFGMPFDRNADGTIYQRPFGGHTANFGEKPVQRACAAADRTGHALLHTLYQRNVAARTQFFVEWMALDLLRNEAGDVLGVTALEMETGEIYVLEAKTTVLATGGAGRIWAASTNAFINTGDGLGMAARAGIPLQDMEFWQFHPTGVAGAGVLITEGVRGEGGILLNKDGERFMERYAPTLKDLAPRDFVSRSMDQEIKEGRGCGPDGSYVVLKLDHLGADVINKRLPSIREIAIKFGNVDPIKEPIPVVPTIHYQMGGIPANYHGQVLERANGENKIVNGLYAIGECAAVSVHGANRLGTNSLLDLIVFGRATGNHIVDSHPERQHAHQPLPKEAVDRSLARVDELESRTSGEKTQDVANAIRMSMQRHCGVFRTLELLNEGVGQIEDLAQTAQHIYFKDKSKVFNTARVEALELANMTEVARATIKSAANRTESRGAHALNDHPERDDVNWLKHTLWYSEGSRLDYKPVQMKPLTVESFPPKARTF

SEQ ID NO: 51131 - protein, 285 aa, Bordetella pertussis
MFARTAIAPPFAAMAAGRIPNTHDSDMAEARPDSLTRSRAAKPAGEGAAFSPLYRQIKELLVQSLDRGEWKPGELIPSEIDLAARFQVSQGTVRKAVDELAAEHLLLRRQGKGTFVATHHEARVRYRFLRLAPDEEGEGGRAESRILECRRLRAPAEIARALELRAGETVVTIRRQLSMNHMPTVIDDLWLPGTHFRGLTLELLTASKAPLYGLFESEFGVSMVRADEKLRAVAASPEIAPLLGVEPGRPLLQVDRISYTYGDRPMEVRRGLYLTDHYHYRNSLN

SEQ ID NO: 51132 - protein, 284 aa, Bordetella pertussis
MQHNDYILTLSCPDRTGIVFRVSGLLFELGCNIRDSQQFGDEETGRFFLRVHFDLPRAAAESALREQFAALANGYDMQWQIHDAHRKARLLIMVSKQGHCLNDLLFRVSSGQLRAEVAAIVSNHNDYASLAASYGIPFHHMPVTPDTKAAQERQVLELVEREQIDLVVLARYMQILSADMCQALAGRAINIHHSFLPSFKGARPYHQAHARGVKIIGATAHYVTSDLDEGPIIEQDIERVDHTMTAADLTQVGSDIESLVLSRAVRSHVEHRILLNRSKTVVFR

SEQ ID NO: 51133 - protein, 400 aa, Bordetella pertussis
MSTSQKKPTVQQKKPAAQPAEKAAFKPKKSVALSGVVAGNTALCTVGRTGNDLHYRGYDILDFAGSAEFEEIAHLLVHGKLPNKAELKAYKEKLRALRGLPAQLQNVLECLPASSHPMDVMRTAVSVLGCVLPEKDDHNTPGARDIADRLMANLGSALLYWYHYSHNGRIIDVQTDDDSIGGHFLHLLHGAKPSDEWVRAMHTSLILYAEHEFNASTFTGRVIAGTGSDMYSSITGAIGALRGPKHGGANEVAFEVQKRYETPDEAEADIRQRVENKEVIIGFGHPVYTVSDPRNKVIKDVAKKLSRKAGSTKMFDIAERLETVMWDIKKMFPNLDWFSAVSYHMMGVPTAMFTPLFVIARTAGWSAHIIEQRIDNKIIRPTANYVGPEDQTYVPISKRA

SEQ ID NO: 51134 - protein, 163 aa, Bordetella pertussis
MNGSPASTLAYVGLGASLGDAAATLRSVLAELAAAPGILACKASRLYRTAPVEAQGPDFVNAVAALDTTLAPLDLLDLLQALEQRHGRERPYRNAPRTLDLDLLLYGEQAIDHPRLSVPHPRMHERAFVLAPLCELVPALRLAQGDCAALLAALEDQAIEPLR

SEQ ID NO: 51135 - protein, 451 aa, Bordetella pertussis
MITETIRKFVGRLFAPALRGPQRIGAERHGIDRRNVSRHAIKVCDVLRQHGYEAYIVGGAVRDLIVGLEPKDFDVATNATPEQIRPLFRRARIIGRRFQLVHVVFGQEIIETSTFRAPASDDQETDEHGRILRDNVFGSQEEDAARRDFTMNALYYDPHTEEVIDYHQGVQDLKKRQVRIIGDPVKRYREDPVRMLRAVRFAAKLNGSIDTATRQPIRTMASLIENVPASRLFDEMLKLLTCGHAMDCLRQLRNDGLHHGLLPLLDVVLEQPGGENFVELALERTDARVRAGKTISPSFLFAALLWQLVDVRWKQLRAQGEHNIPALVQAADSVLDEQTEKLAIQRRFSSDMREIWFMQPRFERRAGKTIYRMLEQPRFRAACDFLQLRAAAGEFDSVLAQWWMDLANGDDATRAEMIEETAHLPRETGDAPAQKRRRPRRRPSNRPREPQ

SEQ ID NO: 51136 - protein, 262 aa, Bordetella pertussis
MNDILAKILAVKAEEVATARQMRSEAELLREAQARQDVRGFAQAIEDKISQGKAGVIAEIKKASPSKGVLRENFDPAEIAASYAMHGAACLSVLTDVQFFQGSHDNLRRARAACSLPVLRKDFIIDPYQIISARAMGADCVLLIVATLAPAQLRDLETLAIDLGMDVLVEVHDAKELDAALALRTPLIGINNRNLRTFETTLQTTLDLLPMIPAGKRVVTESGILKPEDVRLMREHDVQAFLVGEAFMRANDPGVELARLVA

SEQ ID NO: 51137 - protein, 343 aa, Bordetella pertussis
MTIAATEALTRCIEHREIFHDEMLHLMRLLMRGELSPQIASALLMGLRVKKETVGEITAAAQVMREFATPVVTPNPQDLLDMCGTGGDGSHTFNISTTAMFVAAAAGVPIAKHGNRSASSSSGSADVLEALGANLQLTPEEVAECVAATGIGFMFAPAHHGAMKNVAAVRKELGVRTIFNILGPLTNPAGAANQLMGVFHPDLVGIQVRVLERLGSRHVLVVHGKDGMDEASLGAATMVGELKDGVVREYEIHPEDYGLSMMSNRGIKVSNREESRALVIEALDNVDGVARDIVALNAGLAIYAGNKADSIPEALALAFETISNGSARAKLEEFCAYTRKFQK

SEQ ID NO: 51138 - protein, 304 aa, Bordetella pertussis
MTDLLKKYLFEDRSVRIQAVRLHETWLQAQVNHQHPPAVTRLLGELVAASTLLAANIKFDGSLVLQIQGDGPLALLVVECRSDLSLRATVKVREGQSIPDNGTMQSLLNANGNGRFMVVLDPQRKVPGQQAYQGIVPLEGETVAEALGHYMKASEQLDTQLWLAADEQHAAGLLVQRLPDHGGTTQGDAAESWSRATHLAATLQPAELLATDTDTLIHRLYWEEPLMAFEPHAVRWFCPCTRERVSSMLRSLGQAEVESILAEQGRVEVSCDFCGKPYEFDKVDCAGLFAPNSPMPEQDPPTVH

SEQ ID NO: 51139 - protein, 389 aa, Bordetella pertussis
MKPQIVICGAGIVGLASALALARRGQRVAVLAPRAPVPAAEPDRYHPRVYAISPASQQFLAGLGVWDAMPAARLTPVQAMEIHGDGDGLVRLNAWQAAQPQLAWIVESGEIERVLMQAVQMFGIPWIAERCVGWRAGEVETDGGQRLRAELFVGADGAASPLRKAAGLRHDATPYDDTGLVTHLDAERAHHGTAFQWFRDDGVLALLPMPDTADGPQVFMVWSMRTPQAQALQAMEPAVRAAELERLLACASQGRLGRLRVRSPVLGFPLTLERAQMVAPGIALAGDAAHRLHPLAGQGLNLGLGDVEALACAVGDREPFRGPGDLRVLRRYQRARAEPVLAMRMATDGLHRLFGARGAPLAWLRNAGMQWVDAVPFIKRQLIEGASRN

SEQ ID NO: 51140 - protein, 298 aa, Bordetella pertussis
MGGCRAVHQAATHRRGLAQLSGPSFSGAGMNFRITVWCAAAAVWSSGALAQDGAGQAAPGTPDKVYSTTGSAPAKPGDKVYSTRSAQAPDPQADAVKERFAQRFEGFDVTAVRRTPYGLFEVQIGTDLLYTDEKVTWVMEGPLIDALTRRDVTRERQEKLSSVPFEELPLDLAVKQVKGDGSRVMAVFEDPNCGYCKQLHRTLEDMDNITVYTFLYPILSPDSTTKVRDIWCASDPAKVWKDWMVRGQRPPTAECDAPVDQWLALGRQLMVRGTPAIFFKSGGRVSGALPRDELEARL

SEQ ID NO: 51141 - protein, 428 aa, Bordetella pertussis
MSAIVDIIGREILDSRGNPTVECDVLLESGAMGRASVPSGASTGSREAIELRDGDKGRYLGKGVLRAVENLNTEISEALMGLDAQEQTFVDRTLIELDGTDSKERLGANAMLAASMAVARAAADESGLSLYRYFGGSGPMSMPVPMMNVINGGAHANNTLDLQELMILPVGAASFREALRWGAEVFHMLKKLIHDQGMSTAVGDEGGFAPNVASHEAAIQLILKAITEAGYEPGTQIALGLDCASSEFYRDGKYTLAGEGGVSLSSQEFANLLATWCDKYPIISIEDGMAENDWDGWKLLTDQLGKKVQLVGDDLFVTNTRILREGIQKGVANSILIKINQIGTLTETFAAIEMAKRAGYTAVVSHRSGETEDSTIADIAVATNAMQIKTGSLSRSDRMAKYNQLLRIEEELAEVASYPGLEAFYNLR

SEQ ID NO: 51142 - protein, 284 aa, Bordetella pertussis
MKACGFDIGLDHPFFLIAGPCVIESRELAFETAGRLKEITGKLGVPFIYKSSFDKANRSSGKSFRGPGMDEGLKILADVRAQLDVPVLTDVHDIDQVAPVAAVVDMLQTPAFLCRQTDFIRACAATLKPVNIKKGQFLAPHDMLQVARKARDAALEAGGDGNNILVCERGASFGYNNLVSDMRSLAIMRETDCPVVFDATHSVQLPGGQGASSGGQREFVPVLARAAVAVGVAGLFMETHPNPACAMSDGPNAVPLDRMAELLESLVALDRVTKRSGFLENQFV

SEQ ID NO: 51143 - protein, 550 aa, Bordetella pertussis
MTKYVFVTGGVVSSLGKGIAAASLAAILESRGLQVTLLKLDPYINVDPGTMSPFQHGEVFVTEDGAETDLDLGHYERFISARMRKVNNFTTGQIYESVLRKERRGDYLGKTVQVIPHITNEIQDFVARGAEAAWNGATDVAIVEIGGTVGDIESLPFLEAARQMSLRMGRNNAAFVHLTLVPYIASAGELKTKPTQHSVQKLREIGIYPNVLLCRADRRIPDDERAKISMFSNVPLDAVISVWDVDSIYKIPAMLHKQGVDNIVCEALGLTPPPADLSMWDNLVDALEHPQDSVTIGMVGKYVDLTESYKSLSEALVHAGIHTRSKVNIEYIDSEDIETRGTDQLKHLDAILVPGGFGKRGTEGKIAAIRYARENGVPYLGICLGMQLAVIEFARHVAGLGGANSTEFDPAAPHPVVALITEWMDREGRVERRDNSSDLGGTMRKGAQRCPIRPGTRAQSIYGDDVNERHRHRYEVNNVYVPRLEDAGMVISARTPTENLPEMMELPSHPWFVGVQFHPEFTSTPRDGHPLFSSYIRAALEHKAQRAKEA

SEQ ID NO: 51144 - protein, 451 aa, Bordetella pertussis
MPMATLRGLPFAARPRHETLDVDYGEDVTVDSPILTDTLVVGGGQAGIAMSEHLTGQGVPHIVLERDRIAQRWRTGRWDSLVANGPAWHDRFPGLEFEGLDPDGFASKDAVADYLEAYARKFNAPIRTGVEVVRAERNGGRYGFTVETSAGTYEAQRIVVATGPFQRPVIPAIAPRDPALTQIHSADYRNPGQLPEGAVLVIGAGSSGVQIADELQRAGREVYLSVGPHDRPPRRYRGRDFCWWLGVLGLWDQETVQPGREHVTIAVSGTDGGRTIEFRALAHQGITLVGVTKSFRDGVVAFENDLAENVARGDANHFALLDAADAYIARNGLSLPDEPQARRVPPDPACMTEPILQLDLAAANVTSIIWATGYAAEYGWLNVDAFDANGKPRHQRGVSSEPGVYFLGLPWLSRRGSAFLWGVWHDAKHIAGHIAMQRNYLSYPDFGQSQQ

SEQ ID NO: 51145 - protein, 610 aa, Bordetella pertussis
MCGIVGAVAQRDITPILIEGLKRLEYRGYDSCGVALYMDGHLRRTRSTKRVAELSEQVAEDKLGGFTGIAHTRWATHGIPATYNAHPHFSAQGKDEPRIALVHNGIIENHEELRQELQGVGYVFESQTDTEVIAHLVNHLYAGDLFEAVQQAVRRLQGAYAIAVFCRDEPHRVVGARQGSPLVVGLGQNENFLASDALALAGTTDQIIYLEDGDVVDLQLARVWIVDQAGKQVERKAHTVQVHTGAAELGPYRHFMQKEIFEQPRAVGDTLQDIESITPELFGDGAYKVFKEIDSLLILACGTSYYAGLTAKYWIESIARIPVAVEIASEYRYRDSVPNPNALVVTISQSGETADTLAALKHVRSLGMQHTLTVCNVVTSAMVRECELAYITRAGVEIGVASTKAFTTQLTALFLLTLALAQTRGRLTEEQEAEHLKALRHLPAAIGAVLALEPQIMAWADRFASKENALFLGRGMHYPIALEGALKLKEISYIHAEAYPAGELKHGPLALVTEHMPVVTIAPKDALLEKLKSNMQEVRARGGELYVFADADSKIANAEGMHVIRMPEYYGALSPIVHTIPLQLLSYHTACVRGTDVDKPRNLAKSVTVE

SEQ ID NO: 51146 - protein, 299 aa, Bordetella pertussis
MSHTNTAAVAAQAAKEDVRTPASEFWRKFKKQKLAVGAGLFVLLLALIAILAPWIVPFDPENFFDYDALNAGPSATHWLGVDSLGRDIFSRIVMGARISLAAGFLSVAMGAVVGTFMGLMAGYYQGWWERITMRISDVLLAFPGMLLAIGVVAILGSSMVNVIVAVAVFSVPAFARLVRGNTLAIKQMTYVEAVRSVGASDWTIIMRHILPGTISPIVVYGTMRIATSIITAASLSFLGMGAQPPTPEWGAMLSEARADMVIAPHVAIFPALAIFFTVLAFNLLGDGLRDALDPRIDRK

SEQ ID NO: 51147 - protein, 594 aa, Bordetella pertussis
MRTACSSRFTYRTPDNRPCAAGAAPAAIQSPIILPAISGLTEGNCVMSERESMEYDVVVVGGGPAGLAAAIRLKQLAAEKNHEVSVCVLEKGSELGAHILSGAVMDPQALTELIPDWKEKGAPLNVPVTQDKFLFLSATGARSTPNWLLPACFHNEGNYIVRLGDVVKWLGEQAEALGVDIFPGFAAAEVLYDENGAVHGVATGDMGVARDGTHTDHYQPGMELLARYTLFAEGSRGQLGRQLIGRYKLDEGRNPQSYGIGIKEMWEVDPAQSRPGLVVHTAGWPLDSDTYGGSFLYHLDNNVVVVGLIVGLDYANPWLSPFEEFQRYKTHPAIRGTFEGGKRIAYGARAITAGGLLSLPKLAFPGGALIGCEAGFLNASRIKGSHAAIKSGKMAAEAAFDAVASDRSHDELASYASAFESSWLHAELNKARNFKQWFKKGRTVGTFMTGIEQWLLKGKFPWTLRHNKPDHACLQPASQCARIDYPKPDGKLTFDKLSSVFISNTNHEENQPVHLTLKDDSVPVAVNLAKYGGPESRYCPAGVYEFIKDDHGADRLQINAQNCVHCKTCDIKDPTQNIVWVAPQGGEGPVYSGM

SEQ ID NO: 51148 - protein, 705 aa, Bordetella pertussis
MTNPDFEHIKPVVSVARHRNVAVLSVDNPPINALSDTVRAGLCSALREAEADPAVRAVVLACEGNTFVAGADIREFARAKGAAEAIDVPAVIESCRKPVVAALHGQALGGGLELALACHGRVALAGCRLGLPEITLGLIPGGGGTQRLPRLIGLEAAAELILSGATIDAETARESGLLDAVWPDRLRERAIEFAASLADSPAGVRRASTLAHPPMSPQTGQDLRKIAESRPAALRAPQAGAAAVEALSAAAQPDFARGRALERELFARLRDGEESRALRALFFAERSARRVGLDDATSAPPMAHDAAVVGAGTMGRGIAIALADAGLRVRFIDVEQASLDRALEAIRAHYRSLAARGRMTEAAARDAVARISPASDMQAAAEADVVVEAAFEDLAIKQAIFRQLDSIVRPGAVLATNTSTLDVDAIAAATRRPQDVVGTHFFSPANVMRLLEVVRGARTAPRTLGAVLALGRRMGKVCVTVGVCDGFVANRMSAHRARQIELLLQHGALPQDIDQAAREFGFSMGPCAATDLAGLDISWRIRRGKGARSPIADALCELGRFGQKVGRGYFSYAPGSRVAVPDPEVEALIRRMAEQLGIRRQSFDLATITDRLILPVINEGARVLQDGVARQARDIDLIWVHGFGWPARRGGPMFHAERVGLASVCDRLARLADALEDASLQPAPLLRDLATRGAGFASLHAARQA

SEQ ID NO: 51149 - protein, 424 aa, Bordetella pertussis
MSVAVLAFGLNHTSAPVSVRERVSMPVDLVKPALEGLRATFGGAVREAAILSTCNRTELYCAAEGQVAEHLPAWLAEHNRLEAAALRPHLYRHQHDDAVRHAFRVASGLDSMVLGEPQILGQMKDAVRAANEAGALGTLLHQLFQRTFSVAKEVRSQTAIGAHSVSMAATAVRLAERVFGQLEDARTLFIGAGEMIELCATHFAAQRPRSMVVANRTIERAETLAGRFSAQTMKLADLTERLAEFDVIVSCTASSLPILGLGMVERATRQRRHRPMVMIDLAVPRDIEPEVGRLDDVYLYSVDDLGRLVQSGTDARRAAVVQAEAIIETRVQGFMHWMQSREVVPVIRDLHQAADDVRAAELERARRMLARGESPEAVLEQLAHGLTQKYLHGPLAALNRSEGDERRQLLAWVPRLFPGRDSRR

SEQ ID NO: 51150 - protein, 659 aa, Bordetella pertussis
MSNAIQSVLVENRVFPPPASAVQGAAISGMDAYWALCEEADKDFNGFWSRLARENLQWTKSFTQVLDESEAPFYRWFGDGELNVSANCLDVHLHNGNADKTAIIFESDDGKVDKISYRELLARVCRFANGLKAMGYKKGDRAIIYMPMSIEAVVAVQACARLGVTHSVVFGGFSAKSLQERIVDVGATVVITADEQVRGGKTIPLKPAVEEAFAMGGCEAVSKVVVYRRTGGKIAWQEGRDVWMHDVEAGQADTCEPQAVNAEHPLFILYTSGSTGKPKGVQHASAGYLLWALLTMKWTFDARADDVYWCTADVGWVTGHTYITYGPLAAGVTQVVFEGVPTFPNAGRFWDMIARHKVSVFYTAPTAIRSLIKAAEANQEVHPRQYDLDSLRIIGSVGEPINSEAWIWYHKNVGRERCPVVDTWWQTETGGHMLTPLPGATPLKPGSCTLPLPGIVAAIVDETGGDVAQGNGGFLVIKRPWPAMIRNIWGDPERFKKSYFPPELRGYYLAGDGAQRDADGYFWIMGRIDDVLNVSGHRLGTMEVESALVAHEMVAEAAVVGRPDDTTGEAVVAFVVLKRSRPEGDEAQAIARQLRDWVGKEIGPIAKPKDIRFGDNLPKTRSGKIMRRLLRVVAKGEEITQDVSTLENPAILEQLAKPL

SEQ ID NO: 51151 - protein, 360 aa, Bordetella pertussis
MKPSMRSRLEQLAHRLIEVDALLAEPETAADMDRFRKLSRERAELEPVVEAFNAFLGVEADVATAQEMLSDPDMKAMAEDEIKTGRARIEEMEAALQLLLLPRDPDDGRSLFLEIRAGTGGDESALFSGDLLRMYTRYAETRGWRVEIMSESESELGGYKEVIARIDGDGAYGRLKFESGAHRVQRVPATEAQGRIHTSACTVAVMPEADAMSDIVINPSDLRIDTFRASGAGGQHINKTDSAVRITHVPTGLVVECQDDRSQHRNKDKAMQVLAARLKDKEMRERQSKEAAERKSLIGSGDRSERIRTYNYPQGRVTDHRINLTLYKLQQIMEGDLDELTGALLAEHQAEQLAALGHDL

SEQ ID NO: 51152 - protein, 270 aa, Bordetella pertussis
MTLLKDLLADPGLPRLEARMLAEHVLGRSRAWLLAHDTDPVEPAHEAAWRQLAARRLAGEPMAYLLGGREFMGHWYALTPDVLIPRPDTELLVETALHWLQGRAAPRVLDLGTGSGAIAVSVALGCPQAEVTATDLSAAALAVAEGNAQRLGARVRCLAGDWYEALPAQDRYDLIVSNPPYIAREDAHLAQGDLRFEPRGALTDENDGLAALARIAGGAPGRLLPGGAIWMEHGWDQAEAARALLRQAGLREVHSRRDLAGIERISGGYL

SEQ ID NO: 51153 - protein, 793 aa, Bordetella pertussis
MTDATSPGLGRSAPRIEDDALLRGQARFLDDIEVEGVLHACFVRSPHAHARLVSIDLSAARAVPGVAAVYGARDLFGQLTSWRMPLGFPLAALPDDTTPFVLAEREVAFVGEAIAVVVADSRHIAEDAAARVAIEYEVLGAVVDCRDALRPDAPLVRGELASNILQQYTLAYGDCETAFAQAHRVLEDDFWVHRGCAHPMEGRGVLARMDRATDTLTVWSSTQMAHELHYTLALMLGQPEDRLRVVTPDVGGGFGAKFMIYPEEMAIPAAARKLGRPVKWVEDRREHFTTSIQERDQYWKVAMAIDDQGHVLGIRGNFVHDNGAYTPQGTNVPYNAASSMTGPYVVPAFSLDVSVAYTNKVPVATVRGAGYPQAAFVMERMMDRVAAELGIDPGECRRRNLIGPAKIPYTKPLKSRAGMPLTIDSGDFPALQACALQASDYDGFAVRRDAALARGRWRGIAVANSVEPTGRGPFEVARVRVQPSGQVSIYTGALAMGQGIKTTLAQICAGHLGVPVAAVEVQAGDTAYVGYGMGGFASRQAIMAGSAVDQAAAQVRRQALETAAAVLKAEAETLELADGEVRAPDGQSVSLARLAMLRKGVPGYALVSPGDPGLDATAYFHCDAQTYAGASHVCEVEVDPATGAIEIVRYVAAQDSGRIINPQLAEGQVHGGVVHGIGNALFEWMGYDAAGQPLSTTFAEYLLPTAPEVPPIEVVFQPSPTPLNPLGVKGVGECATIPVAVAVVGAVEHAVAHCGVRVTEFPLTPVRLLELLTQAEARAAAPTDSGEFVDGVH

SEQ ID NO: 51154 - protein, 499 aa, Bordetella pertussis
MEFSTQTTASLHQIKTAALAVGVFADGVLSAAAEVIDRASHGAVAAVVKSEFRGRTGSTLVLRSLAGVSAQRVVLVGLGKQAEYNARAHASAEQAFAAACVAAQVGEGVSTLAGVAIEGVPVRARARSAAIAAGAAAYHYDATFGKANRDARPRLKKIVQVVDRAASAQAQLGLREGAAIAHGMELTRTLGNLPGNVCTPAYLGNTAKKLAREFKSLKVEVLERKQVEALGMGSFLSVARGSEEPLRFIVLRHAGKPAKKDKAGPVVLVGKGITFDAGGISLKPAATMDEMKYDMCGAASVLGTFRALAELELPLDVVGLIAACENLPSGKANKPGDVVTSMSGQTIEILNTDAEGRLVLCDALTYAERFKPAAVIDIATLTGACVVALGNVNSGLFSKDDALADALLAASRQSLDPAWRLPLDDAYQDQLKSNFADIANIGGPPAGAVTAACFLSRFTKAYPWAHLDIAGTAWRGGKDKGATGRPVPLLMQYLLDQAG

SEQ ID NO: 51155 - protein, 290 aa, Bordetella pertussis
MLRVVLITGISGSGKSVALRLLEDAGFTCIDNLPVRFLAEFIANARDDAMERVAVAIDVRSPGELAELPDVITASRAMGTSLSVIFLDANTDTLVQRYSESRRRHPLTDRLARGGKTPSLAECIALERELMAPLRDQEHVIDTSDLTPGQLRAWIRDLIQADRPPLVLTFESFAYKRGVPSDADLMFDVRCLPNPYYDRTLRPLTGRDEPVATWLGGFDIVTQMIDDIAAFIRRWLPQYTQDTRNYLTVAIGCTGGQHRSVYVVEQLARRFSDHDPLLVRHRTQLPDDPA

SEQ ID NO: 51156 - protein, 308 aa, Bordetella pertussis
MLTVQELVDDNADKIPFSWIAGHDAADRAISDDGMAAADLVGHLNLIHPSRIQVFGQEELAYYTRFDLRRRMHHMDELLIGGVPAILLADGLTPPQDLIDQCAQHQVPLLSTPVAAAQLIDLLRIYLGKKLAPTTTVHGVFLDVLGLGVLITGESGLGKSELALELISRGHGLVADDAVELSRTAPGVIEGHCPQLLQNLLEVRGLGLLDIRTIFGETSVRRKMRLKLIVHLVRATAQDKFERLPLQDITQDMLGLPIRKVMLQVAAGRNLAVLVEAAVRNTILKLRGIDTLGEFMERQAMAILQSSK

SEQ ID NO: 51157 - protein, 154 aa, Bordetella pertussis
MTRMNHLSRILPAGNVVLDMLATSKKRAFEQAGLLFENHHGLARSVVFDSLFSRERLGSTALGQGVAVPHGRVKGLDQALAAFIRLAQPIPFDAPDGQPVSMLLCLLVPEAATQQHLDILAELAQLMSNKPLREALASETDPAAVHRMLTTGQL

SEQ ID NO: 51158 - protein, 436 aa, Bordetella pertussis
  MISC_FEATURE (434)..(434): X=any amino acid
DYDGWAAQGNPGWGWTDVLPLFKASEDHHGGASAFHGAGGEWRVERQRLSWKLLDAFRAAAAQAGIASIDDFNQGDNEGCDYFEVNQRRGVRWNTAKGFLRPAMDRGNLKVLTGARVARVVFQNRRAVGVRFMAEGGGEQYAQARGEVVLAAGAIGSAQLLQVSGVGPAALLQARGVPVLHDLPGVGANLQDHLQLRLIYRVRGARTLNGVAGTLWGKAWMGLQYAVQRRGPLSMAPSQLGAFARSGPEQSRANLEYHVQPLSLEKFGDPLHDFPAFTASVCNLRPTSRGHVRIVSPDPGDHPEILCNYLSTEADRKVAADSIRLTRRIVAQPALARYQPQEYRPGEQWQSEEDLQRLAGEIGTTIFHPVGTCRMGDDAQAVVDAALRVHGLQGLRVIDASIMPTITSGNTNSPTIMIAEKGAQLLREARRQTXRP

SEQ ID NO: 51159 - protein, 596 aa, Bordetella pertussis
MRTCYTGQVCRDHLGQTVTLYGWVNRRRDHGGVIFIDLRDRTGLAQIVFDPDNAEAFGTAERLRNEFCISITGLVRLRPEGTANAELASGEVEVLCQQVEILNASVTPPFQLDDDNLSETTRLTHRVLDLRRPQMQHNLMLRYRVSIEVRKYLDQLGFIDIETPMLTKSTPEGARDYLVPSRVNAGYFFALPQSPQLFKQMLMVSGFDRYYQITKCFRDEDLRADRQPEFTQIDCETSFLNEVEIREIFEGMIRHVFKVVQDVDLPTPFPIMSWTEAMQRYGSDKPDLRVNLEFTDMTDVMRDVDFKVFASAATTAGSRVVALRVQGGGEMSRSEIDAYTQFVGIYGAKGLAYIKVNDVAKGREGLQSPIVKNLHDAALAELVKRTGAQNGDIIFFGADRAKVVNDAIGALRVKIGHSEFGKKAGLFSGGWKPLWVVDFPMFEYDEEENRYTAAHHPFTSPKDGHEDFLESDPGKAVAKAYDMVLNGWEIGGGSVRIHREEVQSKVFRALKIDAEEAREKFGFLLDALQYGAPPHGGIAFGLDRIITMMAGAESIRDVIAFPKTQRAQCLLTGAPSEVDEKQLRELHIRLRNVEVK

SEQ ID NO: 51160 - protein, 294 aa, Bordetella pertussis
MPRRDLLDLLALAAVWGGSFLFMRVAVPEFGPAALMELRVGLAALFLLPLALWRGKPALIARHWKAILVVGTLNSALPFLLYAYAAQSLGAGFLSVANAVTPVWGAVIGWLWLGDRLPRMRALGLLISLSGIIVLVWDKLDFHDGGTGPAVLAAISAPVFYGMAANWTKRYLGHVDALTNATGSMVAASLVLAPLAIIHWPEQAVSFEAWRATVLLAIVCTGAAYIVFFRLIARVGPTAAVSVTFLVPVFGVLWGVWFLDEAVTPRILAGAGVILVGTALALGLVGARRVAAAD

SEQ ID NO: 51161 - protein, 506 aa, Bordetella pertussis
MTDQSPAPTAQDENRLIAERRAKLARLRETGVAFPNNFVPDAHAADLHARYDGLDQEALTAAAVTVKVAGRMMLKRVMGKASFATLQDGSGRIQIYLERGTLGEEAYAAFKQWDIGDIIAIEGPVFKTNKGELSVHANSARLLSKSLRPLPDKFHGVADQELRYRQRYVDLIMTDATRRTFEARSKAVGGIRQAMLNAGFLEVETPMLHPIPGGAAAKPFVTHHNALDMQMFLRIAPELYLKRLIVGGFERVFEINRNFRNEGVSPRHNPEFTMMEFYAAYADYRWLMDFTEDLIRQAAIAATGSAVLSYQDRELDLSQPFDRLTICEAILKYAEGYTQAQLDDPAFVRAELRKLGANVEGPPLARAGLGALQLALFEETAEAKLWRPTYIIDYPVEVSPLARASDTRDGITERFELFITGREIANGFSELNDPEDQAERFRAQVEAKDAGDEEAMYFDADYIRALEYGMPPTGGCGIGIDRLVMLLTDSPSIRDVILFPHLRRED

SEQ ID NO: 51162 - protein, 367 aa, Bordetella pertussis
MEAERQNQLVARLEDYAEREQALRRYLDYDAKSERLQVVNAELEDPAIWNDPKHAQDLGREKKSLEDVVETLTELGSGLADSCELVELALADSDDATLEAIEHDADRFQEKLETLEFRRMFANPADPLNCFVDIQAGAGGTEAQDWASMLLRQYLKYAERKGFKAEILEESEGDVAGLKSATIKIEGEYAFGYLRTETGVHRLVRKSPFDSSGGRHTSFASVFVYPEVDESFEVEVNPADLRIDTYRASGAGGQHINKTDSAVRITHAPSGIVVQCQNDRSQHRNRAEAMQMLKSKLYELEMRNRMTEQQKLEDSKTDVGWGHQIRSYVLDQSRIKDLRTNVEISNTQKVLDGDLDPFIQASLKQGV

SEQ ID NO: 51163 - protein, 578 aa, Bordetella pertussis
MAARAQAQLERLVVSPRLIIRTADLQACQHLEAAGIHPLLSRLWAARGVIHPEQTRMAWPALLPPDRLTHSAHAAAVLADAIEQGKRLLIVADYDCDGATACAVGLRALSAMGADVDFLVPNRFETGYGLSPAVVELACRHRRGKPDIIITVDNGIASVDGVAAANAAGIGVVITDHHLPGDTLPEALAIVNPNQPGCGFGSKHLAGVGVIFYMMLALRAELRRRGVYAPDGGPRLDALSDLVALGTVADVVKLDANNRLLVTQGLQRMRAGRMQPGVRALFAVAGREPRTASGFDLGFALGPRINAAGRLADMSLGIACLTTDDEAQTLEMARELDNINRERRTIEAEMRDQALAAMEAPDAAAGATVCVFDPGWHQGVVGLVASRLKEKFWRPTLAFAPAGEDELRGSGRSIPDVHLRDALDLVSKRHPGLIRKFGGHAMAAGLTLGSGDFAAFAPAFDAAVRELTGRDRFEPLLETDGSLESGYANAEVAGLLQQQVWGAGFAAPLFLDEFTVRSQRLVGGKHLKLALERGHQRFDAIWFGHDQSLPERIQAAYRLEQNIWNGMVSVQLVIEHAA

SEQ ID NO: 51164 - protein, 1306 aa, Bordetella pertussis
MNKNIYRVVWSLVRGAWVVAGEWARAGRKSSSPRRQNRQRARRGVAAMVGGSILAQALLPLSALAQGAPTLRPARVAQEEAGQDAAWTRKLAAQAESLARRQAERQPGARVDGDYLKREAQAQVNDVLRDGVNLARESGLPFLRNLQGGLSHDFESGRTSLQLNTIDEVYRAGRNTGLLQLGAHNQNDRPTANAGAVYRREVNDALMVGANGFLDYEFGKQHLRGSVGLEVIAPEFSLYGNVYAPLSDWKGAKRNNRREEKPASGMDVGVGYRPAFAPGLSLSATHFRWNGAEVDYFDNGRTQAGAKGFKVGVEYRPVSLVSVGLEQTKVIGGGRETRMQLGLNINLSEPLSKQLRRDASGTPAFSPDARRHALVERENRIVLNTRRKEIILPLVVSKVSTLQADGRVTVIGATQPFATVTVRMPDGMTGTATADASGRFAYTSAGDQPSGVLALRARNAEGDSSREVTYRYVDEVVLGDLQVAVMALVPLPADRALEVRGKTEPKVDVKVSFSNGESVLAKADAKGLFTVRSTRKVTQGKVLVQATHPQTRKEARAVADYLPPATLAPTIDAVTAQADTGRVTVTGQAEPGAQVDVHFPDGTAKTVDAGADGAYAATSDGDMVSGDIHAQATDKAGNQSPEATRHYGDTTDITPPAAPTIANVATDATSGRVTAAGMAEPGANVTVNFPDGTRKTVVAGGDGAYTATSDRDMVSGDIRVQATDKAGNQSPEATRAYADAVDRTAPEVPTVTHVATDAKSGRITVTGMAEPGANVTVNFPDGTRKTAVAGGDGAYTATSDGDMVSGDIRVQATDKAGNRSPEATRAYADTVDTTPPAVPTITDVTTDATNGRITVTGVAEPGANVTVDFPDGTRKTVVAGGDGAYTATSDRDMASGDVRVQAIDKGGNRSPEATRAYADTVDKTAPAAPTITNVTTDAASGRITVTGMAEPGANVAVNFPDGTRKTVVADGAGAYAADSDGDMVAGDIHVQATDKAGNRSPEGTRAYVDTVDKTPSAAPTIVRVTTDRSSGVVTVAGTADPDNDVTVQFPDGGRKTVKAGKDGSYSVTSDNDIFSGIIQVSARNPAGNASPEVRQDYRDEFVPANAITNIETNSRNGIVTVSGKTSPDATVVVSFPGGDEARTRAKGDGTFSVSSPMDIPRGVVSLSTEVNGVQTVVATRTYEDKFTKGGLDFTAFLPYTPKFNGVSTSDTSAVLLSIPRYFYSGGAPVAKIMPPEADGSEFAKRAAAAMRAQVTPGRDSSEYDVRVSWPAGTFTPADVGQRADLAVKVFDKGTGKYMLAPGAGQF

SEQ ID NO: 51165 - protein, 281 aa, Bordetella pertussis
MNIAAPNVDLHCHSTVSDGSMPPAAVARRAHANGVDVWALTDHDEIGGVAEAAQAAAALGMRFVAGVEISVTWAGLTVHIVGLRVDPANEALVQGLRDTRAGRAARAVQIGERLAGLGMPGAYEGALPFAGNPELISRTHFARFLVEAGYCPDVQTVFNKYLGDDCPGHVPMQWASLAEAVGWIRGAGGCAVIAHPGRYKYSPMQFDALYDEFLQLGGTGIEVVTGSHTSEEARRYAEVARRHGFLASRGSDFHSPTESRVDLGRLPPLPPDLKPVWHDWF

SEQ ID NO: 51166 - protein, 219 aa, Bordetella pertussis
  MISC_FEATURE (25)..(25): X=any amino acid
PAGLAAAMNQGASDFRRPGTNAHPXRKTTLPISPPRSLALAGLSAQAAPVDYRIDPEHTEVVVTWDHLGFSKPTAHAGGVTGVVRYDAASPADSAVDLRIPVSKLTSHVPKLDGMLQGVQFFEAARYPDIRFKSTSVTDRGDGRLQIDGILRIKGIDKPVVLQARRNGQGMHPMAQRPAIGFDATTTLKRSDFGVDAFAPDVSDEVQLRITIEAVAEAA

SEQ ID NO: 51167 - protein, 760 aa, Bordetella pertussis
MDENLTKLALDYHAYPTPGKISVTPTKTLANQDDLSLAYSPGVAAACMAIFDQGNDAASKYTSRSNLVGVITNGTAVLGLGNIGSLAAKPVMEGKGCLFKKFAGIDVFDIELAENDPDKLVDIIAALEPTLGGVNLEDIKAPECFYIEKKLRERMNIPVFHDDQHGTAIISSAAILNGLKVVGKDIGQVKLACSGAGAAAIACLDLLVHLGIKREHIYVVDSRGVIWEGRDENMEPNKRRYAQKTEARTLADVVNGADVFLGCSTAGVLTPEMVKTMAAQPLILALANPEPEIRPELAKAARPDCIVATGRSDYPNQVNNVLCFPFIFRGALDAGATRITEEMKLACVKAIAELAQAEQNDEVARAYAGQELSFGPDYIIPKPFDPRLIVQIAPAVAQAAADSGVATRPIEDIEAYRQKLMGFVYHSGQLMRPLFQQAKQAPKRVVYADGEDERVLRAVQTVIDEKLAEPILVGRPSVIEMRIKKFGLRMVPGQNVEIVDPEDDSRFNDTWNGYYQLRGREGVTPAIAKAMIRKHNTLIGAMLLRRGDADALLCGVASKYDNQLKYVEEVIGRKPGQTYGALNVLMLPNQTLFVTDTHVNENPSADEIANITIQAAEEMLRFGVMPKIALLSHSNFGSRPTDSSRKMAHARKLVAERAPHLEVDGEMHADAALSESIRLQAYPDSTLKGRANLLVMPNLDTGNITYNMLKMTGSNGIAMGPILLGSARPVHILTTSATVRRIVNMTALAVVDAQQEAAEG

SEQ ID NO: 51168 - protein, 956 aa, Bordetella pertussis
MSTESESLSTSYLFGGNAPYVEELYESYLDNPGSVPDNWREYFDQLQHSPATDGQEATRDQAHAPIVESFAQRARANAFVQRVAEPDLSVASKQVSVQSLIAAYRSLGSRWADLDPLKRQERPAIPELDPAFYGLTEADLDQVYSATNTYFTTASTMTLRDILKALRDTYCRSVGAEFMHISDPAAKRWIQQRLESTFSAPVFSTEEKRHILQQLTESEGLERFLHTKYVGQKRFSLEGGESFIASMDEVVNHAGESGVQEIVVGMAHRGRLNLLVNIMGKMPGDLFAEFEGKHAEGLTDGDVKYHNGFSSDLSTRGGPVHLSLAFNPSHLEIVNPVVEGSVRARQERRGDGEGKQVLPVLVHGDAAFAGQGVVMETLNLAQTRGYGTGGTLHIVINNQIGFTTSDPRDSRSTLYCTDVVKMIEAPVFHVNGDDPEAVVFATRLALDYRMQFRHDVVLDIVCFRKLGHNEQDTPSLTQPLMYKRIGHHPGTRKLYADKLTTQGVLAEGDADQLVKDYRQLMEDGQRTIEPVLTDYKSKYAIDWSPFLGAKWTDQADTAVPLAELKRIGERITTVPEGFTVHPLVAKLLNDRRNMAKGEVNLDWGMGEHLAFATLVASGYAVRITGQDSGRGTFTHRHAVLHDQNRERWNDGFYVPLQNVSEGQAPFTVIDSVLSEEAVLAFEYGYSSAEPNTLTIWEAQFGDFVNGAQVVIDQFITAGEAKWGRQSGLTLMLPHGYEGQGPEHSSGRIERFLQLCADHNIQVVQPTSAAQIFHLLRRQMIRPFRKPLVIFTPKSLLRNKDAGSPLTDLAGGSFRPVIGEVDESIKAASVKRVLACSGKVYYDLVNARRERGADHVAIVRVEQLYPFAHKAFETELRKYPKATEVIWVQDEPQNQGPWFYVQHHLYENMADGQKLGYAGRAASASPAVGYLAKHQEQQKALIEQAFAAKYKGFMLTK

SEQ ID NO: 51169 - protein, 825 aa, Bordetella pertussis
MFSRSQKHPSWRLSPCVLAAALCAVAVGSADTARAQAPAASAQHYEIAAGPLADALTRFARRAGVVLSFDPALVQGRSTAGLQGVYGVRDGFAALLAGSGLQARAGGGNNWSLAALPRGGDAQTLAPVTVLGLEGALAPTVGYVASASLSGTKTDTPLIETPQSISVVTRDQITEQGAQTLNQVLRYTAGVATETRGATATRLDQFSVRGFSAATYLDGMRVFGGRDALPQVDAYRLERVDVLKGPASVLYGQGGPGGVVNQVSKRPLDEPLREIEVQAGNFDFRRVNMDFSGPVDEDRRFLYRVTGAAYMSDGQVDHTRERRYFVSPSFTWRPSADTTLTVLTNFQRDPDMGSYGSISAMRTLLSAPDGRRLGPNHYDGDADFEKSDRRSYSLGYQLEHRFNDTFKASQNLRFQHAEGVYRSIYGASNNNYGYLDKDYRYSQRGLAISDVDVDAFTIDNNLQARFDTGALAHTVLVGFDYQRVQTDTLSGYGSAPPLDVFDPDYHMGIERPPFTSDQTQYNYQTGLYLQDQIRLDRLSLLLGGRYDWSRTHTGTDNLANGSHSSSALAAEAFTGRVGAIYNFDNGVAPYASYSESFEPQTGTGWNNTPFKPTEGKQYEVGVKYQPPGSATLLTLAAFDIRRKNLPTTDPDPTHMCGVSRCSIQAGEVRTRGIELEAKTEPLRGLSLIAAYSYLDNEYEKAYPNTTGLDLKGKKPVAVPAHQASAWARYQLQEGPLAGLGMGAGVRYIGSSYANETNTLKVPSVTLVDMMLDYDLGRASPALKGMQVALNVSNLFDKEYIGSCLSDSWCWYGYQRSIKASLRYRW

SEQ ID NO: 51170 - protein, 451 aa, Bordetella pertussis
MNTRVLTGITTTGTPHLGNYAGAIRPAIQASTQPGVDAFFFLADYHALIKCDDPARVARSRLELAATWLAAGLDPERVTFYRQSDIPEITELCWLLTCVTPKGLMNRAHAYKASVDQNAAKGVEPDDGVTMGLFSYPVLMAADILLFNANQVPVGRDQVQHLEMARDIAQRFNHLYGREFFVLPEVVIAEEVATLPGLDGRKMSKSYNNTIPLFEGGAAGLRNATQRIVTDSRLPGEPKDAEASHLYMLYRAFSTQQESMAFRRQLEEGMGWGDAKQALYERLERDLAPMRERYVELISNPGLIEDILQVGAAKARKLAQPLVRTLRDAVGLGVLQPAAAKAAQPARKAAKDARFVSFRDEDGSFRFRLLAADGEELLCSVPFANPKEAGALMRRLQDEAPEQALRGHDDVSYAAWLDGKEVAYGPQAADAGARDALLAKAREALAQLAAA

SEQ ID NO: 51171 - protein, 791 aa, Bordetella pertussis
MPETSATTNAAPGVDHARIIAQLATEIGARASQVASAVELLDDGATVPFIARYRKEATGGLDDGALRTLEVRLGYLRELEERRGAILESITQQGKLTPELQQEIATAETKQRLEDLYAPYKPKRRTRAQIAREAGLEPLADAILADPACDPAALAAQYLNPEASINDAKAALDGARDILAERHAENADLLADIREHLWSTGLLYSKMVEGKETDGANFRDWFDFNEPLRTLPSHRILALMRGRQQGVLELRVGLEADLEAETPHPCVVRIASFLKLGNGLFALDATPRARWLGEVCRWTWRVKLLTAFESELFGRLRESAEAEAIRVFAANLKDLLLAAPAGPKTVLGLDPGIRTGCKVAVIDRTGKVVDTATVYPFEPRRDREGTIKTLAALAARHKVELIAIGNGTASRESEKLVGDMMARFPDLALTRVVVSEAGASVYSASETAALEFPDLDVTLRGAVSIARRLQDPLAELVKIDPKAIGVGQYQHDVNQRELARSLDAVVEDCVNAVGVDVNTASAALLARVSGLNTLLAKNIVAWRDENGAFPTRDMLRKVPRFGEKAFEQAAGFLRIPNGDNPLDASAVHPEAYPVVERIVARIKADVRHIIGQREALKGVSPSDFTDERFGLPTVRDIFAELEKPGRDPRPEFKTAQFKEGVETLNDLFPGMVLEGVVTNVANFGAFVDIGVHQDGLVHISALAEKFVKDPRDVVRVGQTVTVKVLEVDVARKRVALTMRLNDAAEPARRGNGAGAGAARGADRGARRPQADNGKGAPANSAMADAFAKLKR

SEQ ID NO: 51172 - protein, 374 aa, Bordetella pertussis
MAIIKSIEVCVARVPMDKVTYLSNRTVVDRHYGLVKVRSADGVEGIGFCYVGNQAGEIFRVAVEQLLGPVLIGRDSLAVEGLWREMYQEALLQGRMGMVMRALSALDIALWDLNARAANLPLHKYLGAVELDSVAAYASGGYYVEGKTAGQLGEEMASYVELGFKAVKMKTGRWSPQGEESRVRAAREAIGEDVELMLDCNNGWVDTVQAMEYLRRMEPYNPYFIEEPFSPDDVESHARLARLTRIPVATAEIGYGRWYHKQLLDMGAAAILQTDAAVCGGITEWKRIAAMAAGYGIQMCPHWFHDVHAPLAAATPNARYVEFFWDDQVLNFRRLVDRQLEHKDGRVILHQTPGLGFGFDENAVARYGRWTTVS

SEQ ID NO: 51173 - protein, 632 aa, Bordetella pertussis
MCLDACLTPGLADRDPVGRACDRAYVIDRPVFRSAMGNCRPSHFRGNGTHAAMNGESCAQRGKRTHKMQESEFFQLSGTTAVLLLVAFYGATFLMSLMIGQKKENVDGYMVSNSSVGFGLSAASMIATWIWAASFYASATSGFKYGLSGPIQYGFWGALMILFIYPFGKRFRQLAPKAHTLAEVIHARHGASSQMIMAVSNIVGSCISLMVNFTAAGALVSVLSPLSFIQGVLIAGLGVLSYTLWSGFRASVMTDFAQLVAMILAAVIIIPLIFFNAGGPDMLQANMWRLSSEQADFFSTTAILEQGAPYFVAVLAYAIGNQTIAQRLFAVREDLIKPTFLTATIGYGAVVIGLDMLGLLALFVGLEPVNGNMNNIIPQMASTYLPPVGIALFFILVVGSLSSTADSDLAALSAIVITDIYAKNLAGGRPDPRRMLWWGRATMIVATMVGVIFASLRLDILVMLVFVGALWGAIVFPVIASFYWDRVSNSAFFWSVISAVVLFTIVRFELVPIEGAVAVFYEICAAIGGGVVIGLMSFAFFGRVTALTLGTLATLILLPCFVGTLREYIVLLGSLTAYGVSTVVCVALSLRNQERFDFSLLAERVTSFHYEKARMMGAKPAAPAAQPQPARG

SEQ ID NO: 51174 - protein, 353 aa, Bordetella pertussis
MSGNTLGTLFCVTNFGESHGPAIGCVVDGCPPGLPLEAADIQAELDRRRPGTSRHVTQRQEADQVEILSGVYEGVTTGTPIGLLIRNTDARSKDYSNIADTFRPGHADFAYWRKYGVRDPRGGGRSSARLTAPTVAAGAIAKKWLASQFGVRVRGYMSQLGPIAIPFSSWDDVPGNAFYAPNAAVVPELEAYMDQLRRDGDSVGARIEVVAEGLPAGWGEPIYDRLDADIAHAMMGLNAVKGVSLGAGFESIAQRGSEHGDEITPEGFASNHAGGVLGGISTGQPITVSLAIKPTSSIRVERRSVNRAGEPVMVQTLGRHDPCVGIRATPIAEALLALVLIDHALRQRAQCGG

SEQ ID NO: 51175 - protein, 305 aa, Bordetella pertussis
MMQTLGFVGLGMMGLPMLENLAGDERWQILAYDRSPAPFERLAGHPAWGKRLRAAAGLQELAACDTVITMLPNSAITNAVVLGGDGQPGLIDLLESGAAIVDMGSSNPADTRRLSEQLAARGLTLIDAPVSGAVAKASTGTLAIMAGAAEADLRRVRPILERMGAAIIHTGAVGSAHAMKALNNYVYAAGLLAVSEAMVIARRMELDLEVFTDVLNASSGRNVASETKLRQFIIPGTYNGGFALALMAKDLGTAQSLQALTGVQADQLALCAELWRQALAQLPGGADNTEIHRFLAQRTPATEPA

SEQ ID NO: 51176 - protein, 989 aa, Bordetella pertussis
MLLTKKTSGAAAGASESHFIQSLRRGMAQALPTMDRRTFLRRSGLGVGAGLAATQLSLVKRAEAAEGDGKVAIGNTKIEVRRTVCTHCSVGCAVDAVVENGVWVRQEPVFDSPINLGAHCAKGASVREHGHGEHRLRYPMKLVNGKYQRISWDTAYEEITAKLMQLRKESGPDSVYWIGSSKHNNEQSYLLRKFVSFWGSNNCDHQARICHSTTVAGVANTWGYGAMTNSYNDMQNSKVALYIGSNAAEAHPVSMLHMLHAKETGCKMIVVDPRFTRTAAKADQYVRIRSGTDIPFLFGLLYHIFKNGWEDQAYIDARVYGMDEVKADILAKWSPDKVEEACGVDEATMYSVAKTMHENRPGTLVWCMGQTQHSIGNAMVRASCIVQLALGNVGKSGGGANIFRGHDNVQGATDVGPNPDSLPGYYGLAEGSWKHFANTWGVDYEWIKDRYASPAMMTKPGITVSRWIDGVLENPDLIDQDTNLRAVFYWGHAPNSQTRGLEMKRAMDKLDLLVVVDPYPSATAAMAAMPGKAEDLNPNRAVYLLPAATQFETNGSCTASNRSLQWREKVIDPLWESRTDHMIMHQLAEKLGFGKELSKNYKMQKVKGMDEPVVEDILREINASVWAIGYTGQSPERLKAHMRNMHVFDVKTLRAKGGKDAETGYDLTGDYFGLPWPCWGNPSLKHPGTANLYDTSLHVMDGSGNFRANFGVERNGVNLLAADGSHSKGADLTTGYPEFDHVLLKKLGWWEDLTPEEQKAAEGKNWKTDPSGGIIRVTMKVHGCHPFGNARARAVVWNFPDAIPQHREPIYGTRPDLVAKYPTHNDLKTFWRLPTLYTSLQQKNVAEKLYEKFPIILTSGRLVEYEGGGEETRSNPWLAELQQESFVELNPKAAADRGIRNGDRVWVLTPTGARLNVQALVTERVGPDTAFMPFHFSGHWQGVDMLASYPEGAAPIVRGEAVNTGTTYGYDSVTMMQETKTTICNIEKA

SEQ ID NO: 51177 - protein, 385 aa, Bordetella pertussis
MIRSLFAALLASALLATAGAQTAAPSADAPAMGGIQSANIFEVKPDASEQPGYAEQTNAERAKVQPGNNAPMWRQVNSGQPGYSSLPASEAPEAGVLIQRFVQYPGSQYTTAGEAWRQVRNNWLIPYGGGLLLIVLVAIALFFLAKGPMKLREAETGRRIERFTYFERAAHWVNATAFVILALTGIVIAFGKFFLLPIMGSAAFGWMTWLLKTVHNFVGPVFAVSLLVVILTFIKDNLPRRDDLIWLRKGGGLITGAHVPSHRFNAGEKIMFWVGMLFLGALAVASGLFLDQVFPGLSYVRGNMQIAHMVHAASVVLMMCMIMGHIYLGTIGMRGAFKAMKTGYVDETWAREHHELWYDDIKAGKIPAQRTPDKSAKRLTRPAGA

SEQ ID NO: 51178 - protein, 477 aa, Bordetella pertussis
MPDVPLKSASMAQTLYDKLWDAHVVHQESDGTCMLYIDRHLLHEVTSPQAFEGLALAGRQPWRVGANLAVADHNVPTLNRAQGIEDPISRLQVDTLDDNCAKYGITEFRMNDLRQGIVHVIGPEQGATLPGMTVVCGDSHTSTHGALGALAFGIGTSEVEHVLATQTLLMKKAKSMQINVEGELPFGCTAKDVVLHIIGIIGTAGGTGHAIEFSGSTIRGLSVEGRMTVCNMAIEAGARSGMVAVDDKTIDYFRGRPFAPVGVLWDQAVGYWRTLHSDAGARFDRVINVDARDIKPQVTWGTSPEMVLPVDGRVPDPDREKDDVRRSGMERALEYMGLKPNTPLVDIRVDRVFIGSCTNSRIEDLRAAAVVARGKRVAANVRQAMVVPGSGLVKQQAEREGLDKIFIEAGFEWREPGCSMCLAMNADRLEPGERCASTSNRNFEGRQGQGGRTHLVSPAMAAAAAVAGHFVDVRSFR

SEQ ID NO: 51179 - protein, 496 aa, Bordetella pertussis
MLTQIKGEWVLGFADGNHRMLCDASVVYEGERIVHVGTEFDGVADRVIDARGCLVAPGFIDTHVHSGHRALHKLLADGGRPDLFGQPYMDVTIARDGTRIKGYPNYLSREEAAVDPGIALHAAFTVAELLRNGVTTFVELGGHVMVQEALWRECERLGVRGYLGPGYDSGRWAADDQGRLRRVPYPDGGDHLFEEAVAFIKRVQAAGNDLVNGILVPREVENCSVDILRRTVQAAQELGVPMATHAGYNVIEFYETVREHRMTPIELLHSVGMLGPRLNIGHANLISDSPRLNYSGGRDLALMGEHRVSISHCPINIVRRARVLDSWKKYREAGVNLTIGSDTYPRDMVMNMRTASYHGKVMSHDLNAASAAEVFEAATLGGARSLGRTDIGRLEPGARADVIAINVGRQDVLRYGPIWDPIRSLVECGVGDDVELVVTNGQVRMEQGRIAGVDLGALRAEAQQFADNVWRDLQDWDPLRRTAQAMCPPSFCPDCM

SEQ ID NO: 51180 - protein, 393 aa, Bordetella pertussis
MSMYYIHTATLRMSQPHPLRIAHAEAAIGFGGQEQRILKEALAMRERGHHVELICRPQARLIERALDAGIRVHTVPMGGLRNFVRGVPRVRRILREGGFDVLNTHSRIDTLLAGAGARLAGTPLVVRTRHLSNRVNSMLSYTWIPHRVSTVSDHVRRYLIERGVSPAHIETIYSPINLPPPGLRSTLRDELGLPADAVVVACVAIMRATKGHRELIEALRPLMASRPQVHLVLVGNGSPLFEQLQALIAELGLGERIHMLGFRDDVPNVLAGSDIFALPTRKEASGTVFVEAAACGLPVVGVDVGGVSEMLRNGETGLLVPPDDAAALQGALRSLIDDASLRARMGGAGERMVRDEGKFSLARLAERTELVYRKWLAERRDAPTAASRSARQS

SEQ ID NO: 51181 - protein, 376 aa, Bordetella pertussis
MTQAVGLVGWRGMVGSVLMQRMRDENDFALIEPVFFSTSNAGGAAPAWAEGAGSLQNAYDIDALKKLPIIVTAQGGDYTSEVYPKLRGAGWQGIWIDAASTLRMADDAIIVLDPVNRPVIDAALKRGVRNFVGGNCTVSCMLMGLAGLFNNDLVEWMSSMTYQAASGGGAQHMRELLTQFGLLNQAVKPLLDDPAAAILDIDRGVLARQQDPSLPQEHFGVPLGGNLIPWIDKDLGDGMSREEWKAEAETNKILGRGAAFGTPATPIDGLCVRIGAMRCHSQALTIKLKRDVPLDEIEDLIAAGTQWAKVVPNTKEDTVKALTPVAVTGTLDIPVGRLRKLSMGLQYLGAFTVGDQLLWGAAEPLRRMLRIALAEA

SEQ ID NO: 51182 - protein, 865 aa, Bordetella pertussis
MRFDKLTTKFQQALADAQSLAARNDHPYIEPVHVLAALLGDPDSGAASLLARAGVAVNRVQPAIDSALKGLPQVQGDDNVQVGRELQSVLVRTDKEAARRGDTYIASELFLLALADDKGDAGRILREAGLQKKALEAAIDAVRGGENVSGAEGESNREALSKYTLDLTERARQGKLDPVIGRDDEIRRTIQILQRRTKNNPVLIGEPGVGKTAIVEGLAQRIVNDEVPETLRGKRVLSLDLAALLAGAKFRGEFEERLKAVLKELAQDDGQNIVFIDELHTMAGAGKAEGAMDAGNMLKPALARGELHCIGATTLDEYRKYIEKDAALERRFQKVLVGEPDVESTIAILRGLQERYELHHGVEITDPAIVAAAELSHRYITDRFLPDKAIDLIDEAGARIRMEIDSKPEVMDRLDRRIIQLKIEREAVKKETDDASMRRLAVIEEELEKLQREYNDYEEIWKAEKAAVQGTQAIKEEIDRVRAEMAELQRKGQFDKLAELQYGKLPELEARLKAADSAEREAGESDSGKPRLLRTQVGAEEIAEVVSRATGIPVAKMMQGERDKLLRMEDFLHKRVVGQDEAVRLVSDAIRRSRAGLADPSRPYGSFLFLGPTGVGKTELTRALADFLFDSEEHMIRIDMSEFMEKHSVARLIGAPPGYVGYEEGGYLTEAVRRKPYSVILLDEVEKAHPDVFNVLLQVLDDGRLTDGQGRTVDFRNTVIVMTSNLGSQHIQSMAGKPYEVIKEVVWDELKHTFRPEFLNRIDEVVVFHGLEAQHIESIARIQLKRLGERLEKQEMRLDVSDAALAEIARSGFDPVFGARPLKRAIQQQIENPVAKLILEGVFGPRDVVPVDWQDGKFVFTRTLQ

SEQ ID NO: 51183 - protein, 270 aa, Bordetella pertussis
MSRIALGLAYDGSAWQGWQTQPHGVTVQDQVEAALASFAGGGGPVATVCAGRTDTGVHAAMQVIHLDTDLQRRDESWVRGVNAFLPPSIVVQWARPVSEAFHARFSARSRTYVYLLWRGRVRPALWAGRAGWAFQPLDVPAMRAAARALLGEHDFSSFRSSQCQARHPVRTLHRLDIDERGAFLVFTLRANAFLHHMVRNLIGALLQVGQGREPVAWMDALLCARDRRLGAPTFMPDGLYLSAIEYPAEFGFDELDGGITLLSPFTGALG

SEQ ID NO: 51184 - protein, 361 aa, Bordetella pertussis
MAGEHMAPNSKHLSLHMPVDFIDALAQAESIDEILKVVATWFMEMFVADRASITFPVNDSHLRVVALEGNRVIDVDAPVPIHGTMVGRVFSRGQAEICDDLAASTDLDCLILASRGLGSCLDAPLRSGRDCYGTINVGRRDRNGFTLADMRKIEALAMWIATLIRVHRQVERLTHLSRTDPLTQIMNRRAFTESFQTRRLEGERRRAEVGTGLGFAVVDIDHFKQINDTYGHDVGDVVLAFVGKMMNEFFRESDCVARFGGEEFCVLMQDVDEGGMQRLLERFRVALGDCVVTHSAGTVSITASIGAVLVKTSVAGIDRAFRSADLALYKAKADGRNRVRIAPSAEQSHAGNPANRLCYPG

SEQ ID NO: 51185 - protein, 258 aa, Bordetella pertussis
MPHRLSHAAPVLAGQACAAHPPATYPSSAQPAVASARRYMLLSRPSRRLRVAILDDHPAVAVGLSAYLGEHGDFEVALTETNAVALAHQLKRHPCDAAVIDFFMPAQSWDGVDFIRRLRRLCPDMAVITISAGKAHETEYAAFRAGANGFLPKGAPLSLLAELIRTTVVSRRAFFSARTGQLRATIPDPPDSRLTNAEREILRQIAKGFSVTQISGRLLRSKKTVSTHKRRAMKKLGLADDLALALYLSEKFEQNVYG

SEQ ID NO: 51186 - protein, 649 aa, Bordetella pertussis
MVQITLPDGSQRQYPGPVTVAEVAQSIGAGLAKAALAGRVAFDGAEPRLVDTSFRIDNDAQLAIVTAKDADGLDLIRHSTAHLLAYAVKSLFPDAQVTIGPVIDNGFYYDFSYKRPFTPEDLQAIEKKMAELARKDEVVTREEWSRDEAVAYFKGIGEVYKAEIIASIPSNETLSLYREGDFIDLCRGPHVPSTGKLKVFKLMKVAGAYWRGDSKNEMLQRIYGTAWASKDDQDAYLHMLEEAERRDHRKIGRELDLFHFQDEAPGLIFWHPKGWALWQQVEQYMRKVYQDNGYQEVKAPQILDLTLWKKTGHWDNYRENMFTTESENRVYGLKPMNCPGHVQIFNAGLHSYRELPLRYGEFGQCHRNEPSGSLHGMMRVRGFTQDDGHIFCTEDQLQDECAAFTALLQKVYKDFGFTEVLYKVATRPEKRIGSDEIWDKAETALMESLRRTGCEFEISPGEGAFYGPKVEYTLKDAIGRHWQCGTIQVDFSMPVRLGAEYVDQNDQRRPPVMLHRAILGSLERFIGMLIENHAGAMPPWLAPLQAVVCCISEHSAEYAAQITQSLKKQGFRVQADLRGEKITRKIREHSLQKIPYLLVVGDKEMQNGTVAVRGLGGLDLGVIALDDFIARLAEDISTRRNVTQLASAA

SEQ ID NO: 51187 - protein, 149 aa, Bordetella pertussis
MGLLNFIKEVGEKLFGASEAKAATADELKKELDKHGLSAEGLDISVDGDKVTVKGSAASTEAAEKIVLALGNTVGVAQVDNQLQTAQAAPAAVMYTVQKGDTLWKIAEANYGKGKGAKYPTIFEANKPMLSDPDKIYPGQVLRIPPLAE

SEQ ID NO: 51188 - protein, 164 aa, Bordetella pertussis
MRLIGLDGEQLGIVKIADAFRLSEQSDVDLVEIAPNADPPVCRLMDYGKFKYQEQKRQAEARSKQKVIQVKEVKFRPATDEGDYQVKLRNLRRFLEEGDKAKVTLRFRGREMAHQELGMRVLERVRDDLIELAQVEAMPKLEGRQMVMVLAPRKKAVGKPDAAG

SEQ ID NO: 51189 - protein, 132 aa, Bordetella pertussis
MTGIVIVVHAPLGSAMRESVAHVLGDATEALAVHDIHPEDLPDDAAPRVLADILRVDQGQGVLVLTDLIGATPANIAKRAVADAQAQGIQCCVLAGLNTPMLLRALTYRNLSLAETREKALAGGVQGCLRVD

SEQ ID NO: 51190 - protein, 118 aa, Bordetella pertussis
MAQQFRRAGPAVRPGGHGIAAAAIARSELMPSSDIVISNKLGLHARAAAKLTQLASRFSSEIFISRGAQRVNAKSIMGVMMLAAGLGVTVKLEASGSDADQALSEIQTLFDNKFGEQE

SEQ ID NO: 51191 - protein, 609 aa, Bordetella pertussis
MSRNSKTSGSGSPPSARAASSTRSSIPSLSPDIAAGPVVCLHGKGVARGYAIGRAVVMGAAALEVAHYRIAPEDAAAESQRLTEALAKAQADLLQMADTLPEDAPRELGAMLNVHRLLLGDPLLAEQALALIAERHYNAEWALTAQGQILGQQFEAMEDEYLRERGGDVRQVIERALHVLAGTSAMLPDGAQLDGNDPLVVVAHDISPADMLRLRGGRFAAFVTDLGGPTSHTAIVARSMGVPAVVALGNVRELVRDGDMLIVDGADGVVVLNPSARILAEYQARQRVYADERAELALLRDEPAVTLDGIDIVLHANIELPEEASLSLACGAHGIGLFRSEFLFMGRPDLPGEEEQYEAYASVVKVMAGRPVTIRTLDIGADKTLDDEATVATNPALGQRAIRYCLARPEMFATQLRAILRASAHGPVRVLIPMIAHMHEVHATYAALESARRELDARGQPYAARVEVGAMVEIPAIAIAIEPFVQALDFLSIGTNDLIQYTLAIDRGDHDVAGLYDPLHPAVLRLVANTINAGERAGKPVAVCGEMAGDARLTRLLLGLGLTEFSMHPQQLLDVKREVRRAHSNALRVKVAAALNRALPIDPDTLDAL

SEQ ID NO: 51192 - protein, 316 aa, Bordetella pertussis
MLQIDAEHTRRALRFTAVIDALRDAFRGGAHVPPRHVHAIESGGAQGTTLIMPAWNDAGYFGVKVINIFPANTHQGLPGLHATYTLYSARTGVPLAQVDGDVVTAYRTAGAVALGASYLARADARVLLILGSGRIAGLVAQAMRAVRPIERVLVWNVRPAGAQRLAAELREQGFDAQAATDLQAAVGQADIVSCATLSTEPLVRGEWLRPGVHLDLIGSFTPEMKETDPQCFAGTSVYVDTDEAPTKAGDLLEAFAAGTLARTQIRGTLADLAAGRAAGRRDAAEITVFKAVGSALEDLTLAAQVYEARQGDVQAQ

SEQ ID NO: 51193 - protein, 396 aa, Bordetella pertussis
MAKILCVLYDDPVGGMPATYARDSLPAIARYPGGATLPTPLALDFTPGHLLGCVSGELGLRPFLQARGHTLVVTADKDGPGSVFERELPDADVVISQPFWPAYLTAARIAKAPRLKLAITAGIGSDHVDLQAAAQHGLTVAEVTYSNSISVSEHVVMMVLALVRNYLPSYQCVLDGGWNIADCVARSYDLEGMQVGAGRIGSAVLRRLKPFDVGLHYTDQHRLPAATEQELGARYHPDAAALAGACDVISLHCPLHPGTEHLFDAAMLARMKRGAYLINTARGKICDRDAVVQALASGQLAGYAGDVWFPQPAPRDHPWRSMPHHGMTPHISGSSLPAQARYAAGTREILECWLDGRAIRTEYLIVDQGRLAGAGAHAYTPGDTTAGSENAARFHP

SEQ ID NO: 51194 - protein, 336 aa, Bordetella pertussis
MPTIEDRYARLDAARWLAALAVVLLHSAAQTVSDPAAYGSHAWLAANLYDSAARWCVPVFVMVSGALLLDPDQPHDARRFYSRRMARVCAPLLFWTLFYLAWRTALDWWDDGRLDFSFWPRKVAEGAPYYHLWYLYMIVGLYLFAPLVRLLYARSQPRARALWVVGILGVAVLDALYRRALGGGNGLFLTWFLPYLGYFVAGRLIFDGELRMPRPGLVLAASVAATAWGVSALSDSRALDLYFYDYFSVTVPLMSLAAFQLIVGSPRLPALPALAPLTFGIYLIHPLFLDLAHRIGAARAWRPDAWGVPAITAAVFALSALASWMLRRHRLTRRLV

SEQ ID NO: 51195 - protein, 490 aa, Bordetella pertussis
MTQSSATPKPPATPRRLDPEDAQHALAEVQECLRRQHLVEDLVHRQEQGDDKAHLVEDLVHRQHEAELATLINGLHPADIAFILESLPKDERQTVWRLVSTEHDADVLIEVEDWVRESLIEAMDRQDLVAATGSMDADELADLAPDLPPDVVAEVQKGLTEEERAQLLEAMGYPEDSVGAIMDFEMVRVREDVSLEVVLRYLRRLHELPDHTDQIFVVDRQDKLQGVLPIATLLVSEPDTEVRAVMNSDFLTLGPLDSDADAASAFERYDLVSAPVTDEQGRLIGRVTIADVVDVIQEDSQEQALSRAGLQEEDIFAPVLMALRNRAPWLLFNLCTAATASFVASRFEDTVSHIVILAFLMSIVAGIGGNSGNQTMTMIIRALAVGRITGRNLWQLVKREMLVTLLVGLCGSLVAALFAWAISDSLSIAVVMMAAMICNMLVGASVGVMVPMLRARFGKDPAIGSSVLLTFATDSLGFFIFLGLATIFLL

SEQ ID NO: 51196 - protein, 354 aa, Bordetella pertussis
MALVSMRQLLDHAAEHGYGIPAFNVNNLEQVQAIMEAAAETDSPVIMQASAGARKYAGEGFLKYLIQAAVESYPHIPVVMHQDHGQSPAVCQGAIDLGFSSVMMDGSLKEDGKTIADYDYNVDVTKKVVDMAHKLGVTVEGELGCLGSLETMQGDKEDGHGADGKLTMEQLLTDPEQAADFVRRTQLDALAIAIGTSHGAYKFTRKPTGDILSIARIKEIHARLPNTHLVMHGSSSVPQDLLAEIREFGGDMKETYGVPVEEIQEAIKFGVRKINIDTDIRLAMTGAIRRFFAENPSKFDPREYLKPARAAAKAICVQRYTQFGTAGNASKIKPLPLADMAQQYAAGKLAQVVQ

SEQ ID NO: 51197 - protein, 304 aa, Bordetella pertussis
MRAPDFSLRQLSYFLAAAECESVQQAAQALHVSAPAVSTAIAHLEALLGVQLFRRRHARGLILTEQGSAFAVQCCGILQEAWGLGSLQGRGELHGQVRVGCLTTFAPFVIPPLLTRVQQHLPGVRLAWFEGHHEYLLEGLRTGTLDIAVLYDFEIPSGIKLVALRAAPLQVVLPASHALAAKETLATSDLNTEPLILLDLPRTREYMLTAFSSNGAIPRIAHSVLSINMLLGMVAAGHGFSLLNFCPPNALPGMGGIVSRAFESHVRQPNIVAAYSFRYHYPRAAAAIVEHISELVDELVIQAH

SEQ ID NO: 51198 - protein, 136 aa, Bordetella pertussis
MTNPPKSPFTSLPSGREPVLRVMPMPADANIHGDVFGGWIMAQVDIAGSIPAARRAAGRVATVAVNAFQFKQPVFVGDLLSFYTSITRTGTTSVTVSVEVYAERQRLDAEVVKVTEAVLTYVATDEARRSRPLPTL

SEQ ID NO: 51199 - protein, 342 aa, Bordetella pertussis
MQLVPPIIGARRFRSPAACAVAAPRLPYPIPIALTDALDRSVSAELVAVLVAVTQGEPRVLTTEDARALPAGPFELAHRSLQAGLRAWVETQTHHPLGYVEQLYTFADSDRSNEAGARVISVSYLGLTREAGATGVAQVGWQHWYRYFPWEDWRAGRLAIIADEIAPRLLAWAGAGADAAARAQRRQRVALTFGLDGAGWNEDMVLQRYELLFEAGLVPESRHPDASGLPVAGQSMRHDHRRILATGIARLRAKIKYRPVVFELMPPEFTLLQLQMAVEALAGRGLHKQNFRRLIEQQELVEETGGMASGAAGRPAKLFRFRRDVLLERAIAGSKLPLARQF

SEQ ID NO: 51200 - protein, 301 aa, Bordetella pertussis
MGVPARRPAGEAALACVLGIPFDCGTHPFRVGARQGPDAIREQSRLLRPYDLARRAGVDNPVEFLRLLDLGNVACVPGDPQASYPAIEQAVAQVLQAGAIPITMGGDGAVTLPQLRAVARRWPGVAVLHFDSHTDTYPIAGYNTATTFTRAAEEGLIDLSHSFHVGTRGNSFMGGVIEYGREVGYTVIPYDDFDRDQAGTLARLRGQLGDRPVYLCFDMDIFDPSCAPGVCTPEWGGLSPKEGLNLLRALSGLNFVAFDVNTVSPPQDVGGATAFLAASVMQEFCALAAAAVQAYPQGRPD

SEQ ID NO: 51201 - protein, 265 aa, Bordetella pertussis
MSTKFLKTLAAFALGAAVFAQPALAQDKPLKIGVTAGPHAQIFEVVKQEAAKQGLNIQVIEFSDYVQPNVALASGDLDANSYQHQPYLDNANADRGYKLVSIAKTVIFPIGVYSKKVKNLNELKDGARIGIPNDPTNGGRALLLLQEHGLIKLRPEAGLKATPIDVVENPRKLRFIELDAAQLPRSLDDTDASAVNTNFALEAGLDPSKDALVRESAESPYANVLVVREQDKDRADLRKLVSIYQSAPVREFILGKYKGAVVAAW

SEQ ID NO: 51202 - protein, 440 aa, Bordetella pertussis
MKITVVGTGYVGLVSGACLADMGNEVLCLDTDAAKVAMLREGHIPIYEPGLEDLVKRNVAGGRLQFTDDIAASVAFGDVQFIAVGTPPGEDGSADLQYVLAAARSIARHMTARKVVVDKSTVPVGTADKVRAAMQEVLAERGVEVPFSVASNPEFLKEGAAINDFMSPDRIIVGTDDEHTIDTMRRIYAPFQRTHERVMVMDVRSAELTKYAANAMLATRISFMNEMANLAEALGADIEQVRRGIGADPRIGYHFLYPGIGYGGSCFPKDVQALMRSAGEHALPMRVIEAAETANQAQKLRLAHKVVARYGADLQGRTFALWGLAFKPNTDDMREAPSLSTIADLTRRGARIRVYDPVAMPQAAKVLDDNPAVELVDDMYQALDGADGLLIATEWKVFRAPDLTRVKQLLKAPLIIDGRNLYVPADMRAQGFDYQGIGRA

SEQ ID NO: 51203 - protein, 382 aa, Bordetella pertussis
MFEFCTHARTLVGAGASDALGETLAARWGASRVLLVTDGALVSLGLAGRLRDALTSAGHTVAMFDEVVADPPESVVERAITAARDARAQMIVGFGGGSSMDVAKLAAAFAGTTQDLRQAYGIGLVAGPRLPLVQVPTTAGTGSEATPIAVVTTGEGAKAGVISPVLYADLAVLDASLTLGLPPAITAATGIDAMVHATEAYTSRVLKNPISDALAREALRLLFRALPVACRDGGDLAARQDMLLGAMLAGQAFANAPVGAVHALAYPLGSAFHVPHGLSNSLVLGPVLRFNSLRCETQYAELADVILPGHAGGVAEKAAAFVQAMAEVAGALELPTRLAQVGVTAADIPALAGLALQQQRLLANNPRDVTLADATRLYEEAF

SEQ ID NO: 51204 - protein, 461 aa, Bordetella pertussis
MIGEDASAARCGSRNSPPDGLPTPRRYWAAATVLTGMSLAVLDATIANVALPTIARDLNAAPSDAVWVINAYNVAVVVMLLPMSALAERVGFRRMFTFGLLLFTLSSLACVFAGQLWHLTLARVCQGVGAATLMCMFGGLVRNIYLLRMLGRGISINATTVAVMSVLGPTLGSLILSVASWRWIFAVNLPIGIVIMCGLRFLPEVPRNKMPLDWLSALLAMLTLGIFISGVDLLGHDVLRGIGMIAVAVAIGWLLVRRASGQTAPLVPVDLLRIQAVAYAVAASACTFAAQMASYVALPFYFQQVLERPYLQIGLLMAAWPVGTAVVAPVAGRLSDRYAASTLSGAGAGIMALGMACLTLLPTTVSNPWIMAGMFLTGLGFGLFQTPNNRAMLSSAPRQRSGAAGGVQATTRVFGQSFGTALVAIAFSVYPQHGPTLALALGTVCASLGVVVNVVRRRAEA

SEQ ID NO: 51205 - protein, 457 aa, Bordetella pertussis
MLNVVILAAGLGKRMQSDLPKVLHTLAGRPMLDHVIGSARQLQPARIIVVVGHGADRVKAAFEGQPGLQFALQQPQHGTGHAVQQAVPQLLEGDGEDDVTLVLYGDVPLVQPATLQNLLQARGRGVAVLTEVLADSTGYGRIVRDAQGQVCRIVEHKDASEAERAIKEVNTGILAAPTARLKDWLGRITNDNAQGEYYLTDVIGLAVGDGVPVGAAQPGASWETLGVNSRVQQAQLERAWQSELARRQLEAGVTLADPARFDVRGTLSCGRDVFIDVGCVFEGTVTLGDGVRVGPHCVLRDVAVQAGARIEAYSHLQQAKVGQEAVVGPYARLRPGADLGERSHVGNFVEIKNSVLQADSKANHLAYIGDADIGARVNVGAGTITCNYDGVNKHRTVIEDDAFIGSDTQLVAPVRVGKGATLGAGTTLTKDAPAGQLTISRARQSTIEGWKRPVKKS

SEQ ID NO: 51206 - protein, 310 aa, Bordetella pertussis
MSSSAPLASQADLDAFIDAVWLEDGLAANTLAAYRRDLSAFAQWLENLACHPGLATGASLREAGKGDIEAWFAARHAESRATTANRRLAALRRFYAWALRERLTPSDPCLTLVTAKQPPRLPKTLSEAQVDALLQAPDLDTARGLRDRAMLETLYATGLRVSELVSVKALDVSLNEGVVRVVMGKGGKDRLVPLGAEAAHWIERYAGSARPELLGARVADALFVTARAEPMSRQAFWQLVKKYALAADIHAPLSPHVLRHAFATHLLNHGADLRVVQMLLGHADISTTQIYTHVARERLKALHAAHHPRA

SEQ ID NO: 51207 - protein, 292 aa, Bordetella pertussis
MARPACAGKFRYGENPVCPGAILSDSAAPVRADAPAVLVQLTDMHLFDEPHTAMLGVDTEASLQAVLRQVGEDGLNPDALLLTGDLSQDGSPASYQRLHALLAQTGLPVRCLPGNHDAPATLRAELGAWSDPVLDLGAWRIVLLDSTVPGSNGGHLADDQLDLLSRAARLAGDRPLLVAVHHNPVQGDPDWHDTMMLDNAQLLFQRLQRLPQARVLLWGHVHQEFDCRRHNLRMLATPSTCFQFVVRDGKHCVDDAAPGYRWLKLYADGSLATGVRRLDGDRWRALLRQNAG

SEQ ID NO: 51208 - protein, 282 aa, Bordetella pertussis
MAVLELVSQHRCFDGWQRYYRHASKEIGLPMRFSVFVPPQAAHGPVPVLFYLAGLTCTEETFMIKAGAQRLAAQHGVMLVAPDTSPRGAGLPGEDEHWDFGVGAGFYLDATAEPWRSHYRMYSYVVDELHGIVTGELPGDAGRVGIFGHSMGGHGALVLALRNPDKFRSVSAFAPVVAPAQVPWGHKAFERYLGPDRQAWEAYDASALMRTLRQPYPEGILVDQGLADGFLVEQLRPELFEAACRHAGQPLTLRRHKGYDHGYYFISTFIEDHIRFHVERLG

SEQ ID NO: 51209 - protein, 206 aa, Bordetella pertussis
MAERGRPRSFERTEALRQAMEVFWSKGYEGASLADLTSAMGINAPSLYAAFGSKEALFREAVQRYADTEGARTRRALLEAPDARAAIEGMLLAGAQTCTLNGKPPGCLMVLGATAGPAQHAPVRGWLCEHRRTMQDLILQRLEQGRRDGEIGPGADLAALAAFYATVLHGMSIQARDGADRAALQAVARQAMHAWDALAHPPAAAR

SEQ ID NO: 51210 - protein, 2066 aa, Bordetella pertussis
  MISC_FEATURE (1583)..(1583): X=any amino acid
ERVMPYTKSSDSCRPVAATPIDASRIGLPAPQGLYHPHNEHDACGVGFVAHIKGRKSHSIIQQGLKILENLDHRGAVGADKLMGDGAGILIQIPDALYHDELAQQGIVLPPPGEYGVAMVFLPKETASRLACEQELERSVRAEGQIVLGWRDVPVDVEMPMSPAVRGLEPVIRQLFIGRGADVMVPDALERKLYVIRKTASHAIQNMRLAHSKEYFVPSASVRTVVYKGLLLADQVGRYYRDLADPRTVSALALVHQRFSTNTFPAWPLAHPYRMIAHNGEINTVKGNFNWLRAREGMMQSAVLGDDLKKLYPIVYEGQSDTATFDNCLELLVNSGYSLAHAMMMMIPEAWEQHTQMDESRRAFYEYHAAMMEPWDGPAAVAFTDGRQIGATLDRNGLRPARYLITDDDMVIMASEAGTLSIPENRIVKKWRLQPGKMFLIDLEQGRIIDDGEIKLQLANSRPYRQWIERLQVKLESLPAPRTASPATQTAVPLLDRQQAFGWTQEDFKFILEPMAASGEEVIGSMGNDAPLAVLSNRSKPFYNYFRQLFAQVTNPPIDPIREQMVMSLVSFIGPKPNLLDINNVNPPLRLEVTQPVLDFAAMAQIRDIDQVTGKKFRSYELDITYPAAWGSEGIEARVAALCARAVDAVQSGYNILIVSDRLVDADRVAIPALLATSAVHQHLIRAGLRTNAGLVVETGSAREVHHFALLGGYGAEAIHPYLALESLGHLADPDKAIKNYIKAIGKGLNKVMSKMGISTYMSYCGAQIFEAVGLQRALVDKYFTGTASNIEGIGIFQVAEEALRMHHAAFGNDPVLANDLDAGGEYAFRIRGEEHIWTPDSIAKLQHASRSNNYRTYKEYAQIINDQSRRHMTLRGLFEFRFDPTRAIPLDDVEPAKEIVRRFATGAMSLGSISTEAHSVLAVAMNRIGGKSNTGEGGEDELRYRAEMRSGGSAIKDGDTLASVLGNDRVEADVALRAGDSLRSRIKQVASGRFGVSAEYLSSADQIQIKMAQGAKPGEGGQLPGHKVSEYIAKLRYSVPGVGLISPPPHHDIYSIEDLAQLIHDLKNVNARASVSVKLVSEVGVGTVAAGVAKAKADHVVIAGHDGGTGASPVSSIKHAGTPWELGLAETQQTLVLNRLRSRIRVQADGQMKTGRDVIIGALLGADEFGFATAPLVVEGCIMMRKCHLNTCPVGVATQDPELRKKFQGKPEHVVNYFFFVAEEVREIMAQLGIRRFDDLIGRTDLLDMRASVEHWKAQGLDFSRVFHRIVSDADVRQTEEQDHGLAGALDHQLIERSKPALERGEKVSFIVPVRNRNRTIGAMLSGAVAARYGHDGLPDDTIHIQCNGTAGQSFGAFLAHGITMDLVGEANDYVGKGLSGGRIVVRSPNDFRGFGPDHIIAGNTVLYGALSGEAFFNGVAGERFAVRNSGAATVVEGTGDHGCEYMTGGTVVVLGTTGRNFAAGMSGGVAYVWDPDRTFRERCNSAMVELEPVLPHAEQQSANEIESWHSAQRGGERSTDETILRRLVEDHFRYTGSFRAREILGDWEASCGKFVKVMPTEYRRALGELWRAANPQQMAAXGLAWERSLALWNSSACRRPAEAPQKRLKHWREFVLHLNDEQAKQQAARCMDCGIPFCSNGCPVNNIIPDWNDLVYRQDWRRALDVLHSTNNFPEFTGRICPAPCEAACTLNINSDAVGIKSIEHAIIDKGWAEGWVTPQVPVRKTGKKVAVVGSGPAGLACSQQLARAGHSVTLFEKSDRIGGLLRYGIPDFKLEKSQIDRRIAQMEAEGVEFAPSTYIGNPDDAAADGLTVRTPQSLLADFDAVVMTGGSETPRDLPVPGRELSGVYYAMDFLRQQNKAVAGDRLSGQTLAKDKHVVVIGGGDTGSDCVGTSNRHGAASVTQFELLPQPPECEDKPMVWPYWPLKLRTSSSHDEGCERDWSVATKALAGSDGQVEKLVGVRVEWFKDEATGQMKMREIEDSEFEIPADLVLLAMGFVSPVATVLDAFGVDRDARGNVRANTDDYRTNVDKVFAAGDMRRGQSLVVWAIREGRQCARSVDEYL

SEQ ID NO: 51211 - protein, 744 aa, Bordetella pertussis
MTGMYRDPGGSHHSWLRRPFCIPAGAFARRSVNQRAVPGARNWLYNPPMTYLVLARKWRPRSFDTLIGQDHVVRALTHALDTQRLHHAWLFTGTRGVGKTTLSRILAKSLNCENGITSKPCGQCRACTEIDAGRFVDYLELDAASNRGVEEMTQLLEQAVYAPGAGRFKVYMIDEVHMLTGHAFNAMLKTLEEPPPHVKFILATTDPQKIPVTVLSRCLQFNLKQMPPDAIVGHLQAVLGEEQIGFEVPALRLIGQAAGGSMRDALSLTDQAIAYSAGNLSEEAVRGMLGTIDQRHLVRLLDALASGDAAGVLAVADELAVRGLSYAGALADLAVLLSRVAIEQRVRGALPQDDPLTEDITRLAAALHPDAVQLFYSVAVHSRGELTLSPDEYAGFVMACLRMLALNGEAGPATAVQAPRADTTPRAAAPAAAAPAETRPEPTPAPALAPQAAAAPRAVARSESKPQPAPEPEPEPEPAPRPAATPVAATPPAVAEPEPVAAPAAQARAAEPAPAPVPPWEDLPEAVAAPAPAQPAAAPAPVAADDDGPPAWVDEAIPDEAGGGFVPEHSFTADPDDEFETLAPAAAAMPAPRAPTPRRESGGRGRAARSRLADMSPTGWPELAARLPVTGLAAELARQSEWAGVQGDAVLLRVAVRTLAESESRVRLQTVLCEHFGQGLRLEIEVGVTGDGTAHAVAQIERAARQQAAEDAVAVDPFVQALVADFGGRVVPGSIRHVDNPPAA

SEQ ID NO: 51212 - protein, 212 aa, Bordetella pertussis
MYTLYRQGRATLGAALLAAGLLAAPARAHEAGDWLLKVGASQVRPKSNNGSVLNGSVDLDANNSVRPSFTVTYMATRNIGIELLAAWPFEHDIRGSGLGRIASTKQLPPTLSVQWHFLPDSTVQPYVGVGLNYTTFFDTKTHGALEGSDLRLGDSWGLAGQLGVDVKLNERWFLNADLRYIDISSKVKLDGQRIGTARIDPWVATVAVGYRF

SEQ ID NO: 51213 - protein, 108 aa, Bordetella pertussis
MMKGQLAGLMRQAQQMQENMKKAQDALAEIQVEGAAGGGLVKVTMTCRHDVKRVAIDASLLGEDKDMLEDLVAAAFNDALRKAEATSQEKMASVTAGMPLPPGMKLPF

SEQ ID NO: 51214 - protein, 202 aa, Bordetella pertussis
MDPQLPEPEPLIALIEALRRLPGVGVRSARRMAYHLLQHDLQGADMLGRALSAAVQHLRHCARCNSFTEDEVCATCANPKRDPGLLCIVETPADQNMIESSHGYRGLYYVLMGRIAPLEGVGPRELDFQRVIERACDGVVQEVILATNFTAEGETTAHFLDDALSERGLKVTRLARGVPAGSELEYVDAGTIAWALMERRST

SEQ ID NO: 51215 - protein, 278 aa, Bordetella pertussis
MSVPTAAKRITTRQLRMRTPDEPIVALTAYTAPIAGLLDAHCDLLLVGDSLGMVIYGMETTLPVTVDMMIQHGRAVMRGSQRACVAVDMPFGSYQEDERQAYRNAARIMAETGASCVKLEGGAEMASTVAFLVERGIPVMGHVGLKPQSVHGHGGFRTVGRGAEAEQVMADAQAIAAAGAFTVVIEGTLEPVARAITEALPVPTIGIGASPACGGQILVSDDVLGLFSDFTPRFVKRYAQLGPIIEQAAAAYASEVRARTFPAPEHCTGMPAPDGRPA

SEQ ID NO: 51216 - protein, 446 aa, Bordetella pertussis
MRRLRTIFILLVAALSVLWLSQNPPGAWGEGFWVMRKPLIYYTGILALGMMSLGVILAARPARFEGALGGLDKFYRLHKWLGLGGVALALTHWLLKIVPPWMAAQGWTVRPPRVPAPAGQAALYDPFQAWHGVAKSLGEWGLYALLLLAALALYKRFPYRHFFRTHRLMPALYLVFVFHAVVLMAPAYWRGPIGPVMAVVMAAGGAGALLSLLGLIGRPRQAAGRIARLERFADNAVMQVDVQLETRWPGHKAGQFAFVAFDRAEGAHPFTISSAWRDDGLLRFSIKGLGDYTRSLPARLRVGDGVTVEGPYGRFDFRANGRPQILVAGGIGITPFLARLQDMAAARSDGAPAHEVDLVYSTNAPDPDFIGELRALAERARVGLHVLVTQRDGKLSAERLVDMLPRAAQSEVWFCGPAGFGQALREGLAARGMPPACFHQELFEMR

SEQ ID NO: 51217 - protein, 263 aa, Bordetella pertussis
MTKHSAARIATIAAAGVLLAGCAAPKNPDPRDPWEGFNRGVYKFNDTVDRALFKPVAQAYTFVTPQPVRSCVHNMFSNVGDLWSATNSFLQGRGHDFVNTIGRFLFNTTMGIGGCFDVASTTGARKIPNDFGVTLGVWGFGQGPYLVLPIWGASSLRDGVGLIGDWTGNQGATIGAIDNVPLRNSLWGLEAVDLRASLLDTTDTVDRVALDPYSFVRDAYLQRRAAMVRGTKTGDDTLPTYEDEGDDDAAPAAPAAQPAAQPQ

SEQ ID NO: 51218 - protein, 422 aa, Bordetella pertussis
MDKLRITGGSPLRGEVTVSGAKNAALPILCASLLTAEPLVLGNVPQLNDTSTTLRLLGRMGVRAERAGDGTVTLQADQVDNLEAPYELVKTMRASILVLGPLLARFGQARVSLPGGCAIGQRPVDQHIKGLAALGAEIEIEHGFVVARATRLKGASIRTDMVTVTGTENLLMAAVLAEGQTVLENAAREPEVVDLAELLIKMGARIQGHGTDRIVVDGVARLHGARHDVIADRIEAGTFLCAVGAAGGDITLRGAAPDTMGATLDKLVEAGLTIETGPDWIRGAMHGRPRAVGARTHEYPGFATDMQAQLMALDTVADGTAVIVENIFENRYMHVQELCRLGADIDIDGHTAVVRGVARLSGATVMATDLRASASLVIAGLAAEGETLVDRIYHLDRGYDRMEVKLRALGASIQRVTGKETA

SEQ ID NO: 51219 - protein, 223 aa, Bordetella pertussis
MNPAAAPLTLALSKGRIFEETMPLLAEAGIEVPENPESSRKLILPTSDPGLRLIIVRASDVPTYVQYGAADLGIAGKDVLIEHAAQQSGRLYQPIDLNIAKCRLCVAVRQDFDYQAAVHQGARLRVATKYVQSAREHFAAKGVHVDIIKLYGSMELAPLVGLADAIVDLVSTGGTLRANGLAAVEDVMPISSRLIVNQAALKTRGARLQPLIDAFRRASERIA

SEQ ID NO: 51220 - protein, 289 aa, Bordetella pertussis
MLDGDCIRGTFYRPAGAGAPVPAVVLAHGWSMVAGGDLEDYAAAVVNRGLAALTFDFRNLGKSGSLPRQEIDPYRQVEDFRAAISYVRGRPEVDRERIGIWGSSYSGGHALTVAAIDRRVKCVVSQVPTTSGFSAAQRRVRYDKAQALQAAFEADREARFAGAEPATLRMVDPDPEAPVAYPGPDSYRYMTGEARRCPQWVNAVTLRSLELARTYEPGVYARRIAPTPLLMIVAASDGLTPADLQQDAFNNAQQPKELLLLPGGHYSVYTDHFDRTSQAAADWFALHLR

SEQ ID NO: 51221 - protein, 808 aa, Bordetella pertussis
MTCASCVGRVERALKAVPGVSDAVVNLATERADVRFAGAPDVGAAVQAVEQAGYAVAASTMELAVSGMTCASCVGRVERALKAVPGVRAASVNLATERAHVEVAGAVAPQALVQAVAAAGYEARPLDPGGAAADAAARRQAAELQGLRRALIVAAVFALPVFVLEMGSHMIPAFHHAVAGSIGVQNSWYIQFVLASIVLFGPGLRFFRKGVPALLRGAPDMNSLVAVGTAAAYAYSVIATFAAGVLPPGTVNVYYEAAAVIVALILLGRYLEARAKGNTSEAIKRLMGLQAKTARVRRDGATVEVPIAQVAAGDVVEVRPGERVPVDGQVTEGTSFVDESMISGEPVPVEKQPGAEVVGGTVNQNGALALRATKVGGDTVLAQIIRMVEQAQGSKLPIQALVDRITMWFVPAVMAVALATFAIWFVFGPDPALTFALVNAVAVLIIACPCAMGLATPTSIMVGTGRAAQLGVLFRKGEALQALKDARVVAVDKTGTLTKGRPELTDLVLAEGFERAAVLGKVAAVEAKSEHPIARAIVDAAQVEGARLGAIEAFESITGYGVAARVDGARVEIGADRYMARLGLDVAVFAAEAARLGDEGKTPLYAAIDGRLAAMIAVADPIKDTTAAAIRALHGLGLKVAMITGDNRRTGEAIARQLGIDEVIAEVLPDGKVDAVKRLKAEHGALAYVGDGINDAPALAEADVGIAIGTGTDIAIEAADVVLMSGDLGGVPNAIALSQATMANIRQNLFWAFAYNVALIPVAAGVLYPVNGSLLSPVFAAGAMALSSVFVLSNALRLRRFAAPFAAR

SEQ ID NO: 51222 - protein, 317 aa, Bordetella pertussis
MSGSSHYPVANWNLDGIVSGLRGARQEWRGPRGRLREESESGVREFPSQESLRDIMRQLFGALFPMRLGPIDLREEVEDFYVGHTIGAALDALLHQVCLELQHLGRDDPQPYGQVLERAVDIVRRFGAELPAVRKALDLDVTAAYQGDPAARSVDEVLLCYPGVTAMIHHRLANVLYRLGAPMLARIVAEIAHSDTGIDIHPGATIGRSFFIDHGTGVVIGETAIIGERVRLYQMVTLGAKRFPPGENGELKKGLPRHPIIEDDVVIYAGATILGRITIGQGSTIGGNVWLTHSVPPNSTVTQAGVINDMPDCGLGG

SEQ ID NO: 51223 - protein, 913 aa, Bordetella pertussis
MLRNASSRDTMAARRLPHGGPRGRPDTILPMSSTPKQTTGDALAGHTPMMQQYLRLKAEAGPLLLFYRMGDFYEMFYEDAERAARLLNLTLTKRGNSNGTPIPMAGIPVHAMEQYLARLVALGESVAICEQIGDPAAAKGPVERRIVRIVTPGTLTDEALLPAKADRALAAVCVTGKREPRAGLAWLNLASGAFHVTECAPAQLESELHRIAPAELIQAESAELHMAFEGARTRVPDWHFEADGARAQLLAHFKTDSLGGFDVEDMPAAVCAAGALLRYAARTQSQALAHVQTIAAERSGQYVLLDPVTRRNLELTQTLSGEESPTLFSLLDGCRTPMGSRLLRRWLHHPLRENEPVLARQHAIATMLTARQEGEQTFAAAGLLETLRDALNAFPDIERIAARVALRSVRPRELASLRDALAALPALHASLTPLSGSPRARELAAQLAMPPDIGELLARAVASEPAVAIRDGGVIAAGFDSELDELRALATDGGDFLVQLEARERERTGIGNLRVEFNRVHGFYIEVTKGQTDKVPEDYRRRQTLKNAERYITPELKTWEDRVLSAQDRSLAREKWLYEQLLDALAQYVRPLSQCASALAELDTLAALAEHARRHDWVAPELIDGAEIDIEAGRHPVVERAIERFTPNGCRLDQTRRMLLITGPNMGGKSTYMRQVALIALLARTGSFVPATRARVGRLDRIFTRIGAADDLAGGRSTFMMEMTEAAAILAASTPASLVLMDEIGRGTSTYDGLALAWAIAYRLLTHNRALTLFATHYFELTRLPAEQPTAANVHLAAAESAGGIVFLHEVREGPASRSYGIQVAQRAGVPAAVIRQASRELERLEAQGAPTPQLGLFAAALDADVQSQAMTEQAEDAAALAQLRDQLVAIDPDSLTPREALDALYRLKQHLT

SEQ ID NO: 51224 - protein, 489 aa, Bordetella pertussis
MTQLTQPLSRAELLRDACYIDGKWVGAGNGPSIPVDNPSTGKTIISVPKLGRKEAEQAIDAAEAALPAWSARTGKERAAILLKWAQLMMENQQDLAVIMTSEQGKPVPEAAGEIAYAASFLEWFAEEAKRIDGDILQSPKGGQRLMVLKQPIGVTAAITPWNFPAAMITRKVGPALAAGCTMVVKPAQQTPLTALALAVLAVLAGVPAGVFQVVTGSSREIGAALCESEVVRKLSFTGSTEVGRTLMEQCAPTIKKLSLELGGNAPFIVFDDADLDRAIDGILASKYRNAGQTCVCANRIYVQAGVYEEVAKRLVEKVNAMKVGDGFEQGVTQGPLIDTAAVAKVQEHIADATAHGAKVIAGGEPHALGGSFFQPTVVRDVTQSMRFAVEETFGPVAPLFKFDSEDEVIGMANNTIFGLAAYFYTRDYARIWRVSEALEYGIVGINTGIISNEVGPFGGVKQSGLGREGSKYGIEDYLELKYLCVDLGA

SEQ ID NO: 51225 - protein, 233 aa, Bordetella pertussis
MFTGIVQGTATIAGIADRQGLRTFTIDFPAGFCVDLAIGASVSVDGVCLTVTRIVSADTATFDVMLQSLDITTLGGYAVGARVNVERAARDGAEIGGHPLSGHIDFAAAVERVRSMDNNRVLRIGIPPAFRKYVFAKGYIAVNGASLTVSEVDRGEGWFEVWLIPETRRMTVFEEKQAGDALNIEIERSTQVVVDTVREAVQESLGKLQPVLEAILKEKGLSLEDFVRPPALK

SEQ ID NO: 51226 - protein, 300 aa, Bordetella pertussis
MDGLPPLNAVRTFEVAGRLCSITEAAAELCVTPSAVSRQIRLLEEHLGRKLFIRQHRGVVLTTIGHQYLGDISKALVEVRRATSEAAKPRQRAVFTVRAPHSIAMRWLLPRLARFHAAHPHIDVKLHTSLTPPDFEREDLDAGVMLGRGQWKGLLSHMLIRNELIPVCAPHKARALRTPADLADETLLHVFGRPDDWVAWLGAAGVEHVDVHRGMKYESSALAYEAALEGYGIAIAQKALIDKDLQEGRLVTPFDLSVDQSDYTYYFVLPPEGYKRRSPALDTFRRWVRDVSLPRQAAPP

SEQ ID NO: 51227 - protein, 570 aa, Bordetella pertussis
MKRTIATDLFCCSLVAGLAALPAASRADGPLRGNPVDALPQLERPTAPAAPAPALQAPTPEQRAVQARLAQRIVPRNFDVAGVHALPFDQVAAFLTPLAGKEITVAQLVQQVDRITELYRSSGYPLSFALVQNQDFANGLVVVTVVEGHIGNVRIDGDIGNAKRRLETLAGPLLAEKPLTQATLERQLNLMRIVPGVKITPSLDLPRRADGATELVIAATHGKFTSNGGVADLGTGMQPLVDLGAHSLTPLGEQLKLTTSIPLNSDDVKYVAGEARLPIGADGFSIKVDGYHYQAKPQDDAIEYLGFDRKVTNDRIGVGVSYPFLLNNQRSLTGTLGMYAVNAKDRYTHRDSDRWLQQDTRVRAATAELRYIDILPQRSTDLTVSVSKGFDAMGAKKSIDTNYGYSAIPDVDLDFTRFNLNVRQAFTLPAQFGLVLSGAGQYSSDILPSSEQVSFGSWRFAMGYPQGEQSGDKGVGVSAEVNRRFGLGWRYLSAVQPYAMADYARTWYNNKGLQELNERHLSSLSLGVRFTDDKFYLFDFNVAKPVGSSTVNGDRDVRFNANYSLFYDAL

SEQ ID NO: 51228 - protein, 289 aa, Bordetella pertussis
MLDPVLLRSFVTVVDTGNFTRASEHLHLTQSTVSQHVIRLEENLGCRLLDRGQRHVLPTEEGERLLGYARSILRLADEARESVAAAQGNAVLRLGAPEDFMGAALMPVLAPLLARYPLLRLEFDSGLSHQLLRRYRDGELDLLLVKQWEVDADCQAHWPEPLCWVAARDGPTLPAGEAVPLAVFPAGALYRQEMTRTLEASGRPWHIRYASTSLAGLVAAVGAGLGVSLMPAASAGGELRVLRKRDGFPAVDGLQLGLYARARLGAAGRDLRDALAAHCGRRAAAMNQA

SEQ ID NO: 51229 - protein, 473 aa, Bordetella pertussis
MVKSPGLQPLPSYTDMQIADQLTQLNALSPLDGRYASRAGALRGLLSEAGFMAHRVEVEVAWLVALSDAGLPELPAFPAAARERLAALVRNFSEADAARIKDIERVTNHDVKAVEYWLKEQVADDAELARAAEFIHFACTSEDINNTSHALMLTRARAEVVVPQLNQVLAKLNELARTHADQPMLSRTHGQPASPTTLGKEFANVAARLQRAVAAIEAVEPLAKLNGATGNYNAHLSAYPEIDWPAFSRNVLAGLGLIQNRHTIQIEPHDWMAALFDAVARANVIVLDLDRDIWGYVALGYFKQRLKEGEVGSSTMPHKVNPIDFENSEGNLGLANAVLRHLSEKLPVSRWQRDLTDSTVLRNLGVGLGYALVAWDACLRGLNKLEVNAAAIDADIDACWEVLAEPVQTVMRRYGLPQPYEQLKTLTRGKGITEEALREFIGGLALPDEPKARLLAMTPRSYIGLAAQLARAV

SEQ ID NO: 51230 - protein, 297 aa, Bordetella pertussis
MSLAASDPAGFSVFRTLAGAGTARLERAATLGDGVAAAQWRRAGHEVVDYDHPGHHTLSLYLHGGEKSFRVGNDGYGGAGKFCVLPSEHRSRWNMNDTVRFLHLYIAPQRLAREAVWRLDCEPRELALRDRTYIQDPALGQACHILLDADWTDPSQRLAASAASETVLHHLLVQGTGRRPGMPARGGLAPVVRRRMRDYIEAHLHEPLTLERLAAQAALSTYHFARMFHVSFGVPPHLWVQARRLARAQALLRAPGQAGLDAVAQASGFGSASHLSRVFRQATAATPGQYRAGARAH

SEQ ID NO: 51231 - protein, 203 aa, Bordetella pertussis
MKLIGSLTSPYVRKVRVVMAEKKLDYQLELENVWSPDSQVQKYNPLGKVPCLVMEDGGALFDSRVIVEYLDTLSPVARLIPQPGRERAAVKCWEAIADGLLDACVTVVRERLRPAAQQSPEWIERQYGKVRASLDAMDHSLGENAHCMGVNYSLADIAVGCALGYLNLRFADLDWRADHANLARLYEKLSARPSFVDSMPPTA

SEQ ID NO: 51232 - protein, 629 aa, Bordetella pertussis
MSDRRPIATLPDLLISQIAAGEVIERPASVLKEILENAIDAGARAIEVRLEGGGIRRIAVTDDGSGIPPEELPLALTRHATSKIRSLDELESVASMGFRGEALASIASVADLTIISRTRGAEHAWQIDGGSLQVSPASGPPGTTIDVRQLFDRVPARRKFLRSEATEFGHCVDAMERIALAHPEVAFRLFHHDRAQRQWLPADHGQRIRDVLGAEFVGHVLPVLAAAGAIALMGMVTRPTAARARADRQYLYVNGRFVRDRTVSHALRSAYADVLHGDRQPAYVLYLDIDPGAVDVNVHPAKHEVRFRDSGAVHRFVSQVVGQTLAQTGGAEAVPAGVPDGAAPDTAYAGEPAAAAPGLAEPRAPYPAAYPSPGQSPYQGSPARPHTQVPFRLHGEPAGIPATDWQSLYRPLPGDAAPAATALRAAPATPLPTADEHPLGQALAQLHGIYILAQNSRGLVLVDMHAAHERVVYEQLKRALDDRALPRQDLLVPVVFHAAEKDVALVEEHETQLNELGFEMRPSGPASIAVRSVPALLARGDIESLARAVLRDLGAVGVSRLLTEQRNELLSTMACHGSVRANRRLTLEEMNALLRQMEITERADQCNHGRPTWVQWSVNDLDKLFLRGQ

SEQ ID NO: 51233 - protein, 371 aa, Bordetella pertussis
MPSNPTRKGRVVVGMSGGVDSSVTAWLLKQQGYEVVGLFMKNWEDDDDSEYCSTRQDLLDAASVADLVGVEFEYVNFAAEYKDRVFAEFLREYSAGRTPNPDVLCNAEIKFKAFLDHAMALGAEHIATGHYARVRTVETPAGPRHQLLKALDDTKDQSYFLHRLNQVQLARTLFPLGELRKTEVRRIAHEIGLHNAAKKDSTGICFIGERPFREFLNRYLPSEPGPILTPEGQRVGTHHGLSFYTLGQRKGLGVGGVKGRQRDDGTAEAWYAARKDLARNVLYVVQGHDHPWLLSAQLQAQDASWIAGEPPAAGAYGAKTRYRQADAACRLDQAGGERFALAFEQAQWAVTPGQSAVLYDGEVCLGGGIII

SEQ ID NO: 51234 - protein, 461 aa, Bordetella pertussis
MVERDCPPAHGALSPRAAARRRLISVAATLLVLPVVPRLAHAATILAVRTWPADEYTRVTLELDSELKAEHFTLENPHRLVVDIEGLSVNAALNDLVSKVRHDDPYIQGLRVAQNRPNVVRLVFDLKQSVAPQVFTLKPVADYQYRLVLDLYPKVAQDPLMAILNKQSGPDVDDPLARVLDEIARNQPAPDQPAAPLARGQEPAPALPAPPIKPLPAPGRSASRKRMLTIALDPGHGGEDPGAIGRSGLREKDVVLRIARRLKTLIDAQPYMRAYLTRDDDYFVPLHVRVQKARRVRADLFVSIHADAFIKPTANGSSVFALSERGASSTQARWLADKENAADLIGGVNLGSHDRQVAKVLLDLSTTAQINDSLKVGSAFLDEIKKINRLHKNRVEQAGFAVLKAPDIPSILVETAFISNPKEEALLRSAAHQEKLAQAMMTGIDRYFTANPPLARVGDVS

SEQ ID NO: 51235 - protein, 584 aa, Bordetella pertussis
MPLRTLLAALCAAAICQAPAWAREAPGVAREDVNPEIASARSERAQAHAQRYMIATANPLASEAGYRILRAGGSATDAIIAAQLVLNLVEPQSSGIGGGAFMVHYDRGAGELRVYDSRETAPAAARPDRFLREGKPLSYAESVNNGRAVGTPGLLRGLELAHRQHGKLPWQALFEPAIAMAEQGFAVSPRLHESIAGDKALAAQPAAARYFYGPDGQAWPVGHRLRNPEFAATLRSIAREGADAFYRGPIARDIVAAVRAHPTPGDLAEADLAGYRAVVREPVCGLYRGYRLCGAPPPSSGPLAVLQMLGELEQYPLARMRPGSVEAVHYFSEAGRLAFADRDFYVADPAFVDVPVRALLDPAYLRQRGALIRPDRSMKTALPGDPQGLLAERARDDAIEVPSTSHLVAVDAAGNVVSMTSTIEAAFGSKIFVRGFLLNNEMTDFSSSYRDPEGRLVANRVEPGKRPRSSMAPMIVFRAGKPVLALGSPGGSAIINYVAKTLVGVLDWKLDVQQAIALPNLGSRNKETELERGTALEALAPALRRMGHEVRITDFPSGIQGIVIGPHGLAGGADPRREGLALGD

SEQ ID NO: 51236 - protein, 372 aa, Bordetella pertussis
MQIGVPKETRDGETRVAATPETVKKYIGGKHSVIVERGAGVAAHYPDSAYEEAGATLGTAETALGCELVLKVRAPADNELPHMKRGAVLAGMLDPFDADDLQRLAAAGLTAFALEAAPRITRAQSLDVLSSQANLAGYKAVLLAANYYGRLLPMMMTAAGTLKAARVVVLGAGVAGLQAIATARRLGAVVEASDVRPAAKEQIESLGAKFIDVPFETDEEREIAQGVGGYARPMPPAWMARQAELVAQRCKQADIVITTALIPGRPAPTLLTAETVQAMKPGSVVVDLAVERGGNCPLTQKGLVADHHGVTLVGLTNLPGMLPTDASALYARNLLDFLKLIVDAEGALAIRRDDEIVTACLMCEGGQVTRRS

SEQ ID NO: 51237 - protein, 539 aa, Bordetella pertussis
MSAVRAGLPSGSVSMIDLDVVNLSRFQFAATALYHFLFVPLTLGLSFILAIMESVYVMTGRQIWKRMTMFWGTLFGINFALGVATGVAMEFQFGMNWSYYSHYVGDIFGAPLALEGLMAFFLEATFVGLFFFGWNRLSKVGHLVVTWLVAFGTNFSALWILIANGWMQNPVGAMFNPDTMRMEMTDFAAVLLNPVAQAKFVHTVSAGYVAGAMFVMSISAWYLLKGRHIDLAKRSMAVAASFGLASALSVVVLGDESGYLTTEHQKMKIAAIEAMWHTEPAPASFNLIAIPNQEERRNEFAISIPYVMGLIGTRSLTTPLLGIDDLVRRAEVRIREGITAYEALQRVRANPKDVDARMLFERTWPDLGYALLVKRYQPDLSKATDEQIAQAALDTVPNVAPLFWAFRVMVAVGFYLILFFGVAFWLASRGRLDSRPGLLKVALWSLPLPWVAIESGWFVAEYGRQPWVIEGVLPTYYAASGLTITDLAISLAIFLVLYTVLLVIGVKVMLHAVKAGPKGEASEPAGRRADPVQAAVDAY

SEQ ID NO: 51238 - protein, 513 aa, Bordetella pertussis
MQLNPSEISELLKSRIEGLGASTDVRTQGTVVSVTDGITRIHGLSDVMQGEMLEFPNNVFGVALNLERDSVGAVVLGDYTGVSEGDQVKTTGRILEVPVGPELKGRVVNTLGDAIDGKGPINTTQTDIIEKVAPGVIARRSVSQPLQTGIKAIDSMVPIGRGQRELIIGDRQTGKTAVAVDTIISQKGKGVTCVYVAIGQKASTINNVVRKLEEHGAMEYTIVVAAAASDSAAMQYMAAYAGCTMGEYFRDRGEDALIVYDDLTKQAWAYRQVSLLLRRPPGREAYPGDVFYLHSRLLERAARVNEEYVEKFTNGAVKGKTGSLTALPIIETQAGDVSAFVPTNVISITDGQIFLETDLFNAGVRPAINAGISVSRVGGAAQTKVIKKLSGGIRTDLAQYRELAAFAQFASDLDDATRRQLERGKRVVELLKQPQYQPLQVWELAVSLYAVNNGYLDDVDVAQILAFEKSLKDHLKAKHAALIQRIEDTKELSKDDEAELAAAVQDFKKHGAF

SEQ ID NO: 51239 - protein, 863 aa, Bordetella pertussis
MLETYHQHVADRAALGIPPLPLSAQQTADLIELLKNPPDGEAQNLLELLTYRVPAGVDDAAKVKASYLAAVAFGTESCALIDRAKATELLGTMLGGYNIGPLVQLLDDAEVGTIAADALKKTLLMFDAFHDVKEKADKGNANAKSVLQSWADAEWFTSRPEVPQSLTVTVFKVPGETNTDDLSPAPDATTRPDIPMHALAMLKNKRDGAAFEPEEDGKRGPVQFIESLKEKGHLVAYVGDVVGTGSSRKSATNSVLWFTGEDIPFVPNKRFGGVCLGSKIAPIFYNTMEDAGALPIELDVSKMEMGDVVELRPYDGKAIKNGETIAEFTVKSDVLFDEVRAGGRIPLIIGRGLTAKAREALGLPPSTLFRLPNNPADTGKGYTLAQKMVGRACGLPEGQGIRPGTYCEPKMTSVGSQDTTGPMTRDELKDLACLDFSADLVMQSFCHTAAYPKPVDVKTHHTLPQFISTRGGISLRPGDGVIHSWLNRMLLPDTVGTGGDSHTRFPIGISFPAGSGLVAFAAATGVMPLDMPESVLVRFKGKMQPGVTLRDLVNAIPLYAIKQGLLTVAKQGKKNIFSGRILEIEGLPDLKVEQAFELSDASAERSAAGCSVRLHKEPIIEYINSNIVMLKWMIANGYEDERSLGRRIKAMEAWLADPKLLEPDADADYAAVIEIDLADIHEPIVACPNDPDDVKTLSDVAGAKIDEVFIGSCMTNIGHFRAASKLLEGKRDIPVKLWVAPPTKMDAQQLTEEGHYGVFGTAGARTEMPGCSLCMGNQAQVREGATVMSTSTRNFPNRLGKNTNVYLGSAELAAICSRLGRIPTREEYMADMGVINKSGDQIYQYLNFDRIPDYKDVADVIEV

SEQ ID NO: 51240 - protein, 689 aa, Bordetella pertussis
MSASDTSIGSGLNPSQKEAVLYLDGPCLVLAGAGSGKTRVITQKMAYLLRECGYMGRNIVALTFTNKAAREMAERVKTLVDPKLAKGLTISTFHALGVRLLREEAAHAGLKPQFSILDADDAMSIIQELLATTDRGRLREVQSIISLWKNALLTPDQAAAAAITPTEVEAVTVYRGYAATLAAYQAVDFDDLIRIPAELLERNKEVRTRWQNRVRYLLVDEYQDTNVCQYRLVQLLTGVRAMFTAVGDDDQAIYAWRGATIENLAKLTTDYPNLKLIKLEQNYRSVQRILAAANNVIERNPKLFEKKLWSDLGHGEPIIVSPMNGDEHEAESIAMKVSAARFERQAQWKDFAILYRSNHQSRVLEQALRNLKIPYTISGGQSFFDKAEVRDILAYLRLVANDEDDPAFIRAATTPKRGIGQGTLQTLGQYAAQRQCSLLAAVDEAGLESLLAPRQLEPLRTFAEFVRRIQWRAGRGVEGQPARAPEPAGQILDDLLSAIQYERYLYDMLEERPAQTRWQNVLELTGWLKRKAEEDGMTLFDLVQHVALVTMLERGEEEEPDAVKLSTLHASKGLEYPHVYLAGVEEGLLPHLGKDDEDSGDPARAAETLATRIQEERRLMYVGITRAQRSLNLSWCKKRRRAREDVVREPSRFIEEMGLGDAKVQEDEATRAMSPKERLGMLKALLKKD

SEQ ID NO: 51241 - protein, 203 aa, Bordetella pertussis
MMVLYSGTTCPFSQRCRFVLFEKGMDFEIRDIDLYNKPEDISVMNPYGQVPILVERDLVLYESNIINEYIDERFPHPQLMPADPVMRARTRLFLYNFEKELFVHVCALEDRSAKPDDKKMVQARQSIRDRLAQLAPMLLKNKYMLGDEFSMLDVAVAPLLWRLDHYGIELPKNAAPLQKYAERIFSRPAYIEALTPSEKVMRR

SEQ ID NO: 51242 - protein, 389 aa, Bordetella pertussis
MRRLWLIFAQAVTVSLAILFVVITLRPDWLRLSGPAPATRAPAAAASGQAGASYADAVARAAPAVVNVYTTKHVNVPLVPLPDDPVLRQLFGQVPGLSRREASTSLGSGVIVSAEGYVLTNYHVVEAADAIEVALADGRQAAAKVVGADPETDLAVLKLAGKLGELPVATFADKRAPRVGDVVLAIGNPFGVGQTTTQGIVSALGRNGLGINTYENFIQTDAAINPGNSGGALIDAHGDLVGINTAIYSETGGSLGIGFAIPVDSARRVMEDIVRTGAVRRGWFGIEPQDMTPELARAFQLPREARGVIIAGVMRDGPAGKAGMRVGDIVQALNGAPVIDTRGLLGQIASLQPGQQAVASVLRAGKPADRLLPACMPLRCPPWPAIRPG

SEQ ID NO: 51243 - protein, 528 aa, Bordetella pertussis
MNYRHIRGTLRALLLASAAIATLAGAPAQAQTRGGTLRAIVHPEPPILITAINSQSPTQFVGGKIFQGLLTYDADLKPQPSLARAWRISPDGLVYTFELQPDVKWHDGKPFSADDVVFSIDKLVREVHPRTKLILNAYVESVRAVDPATVEIRLKEPFAPFISMFETGTMPMMPKHLYEGTDYRNNPANQHPVGTGPFKFKEWVRGSHIALVRNDEYWKPGLPYLDGIRFQVIPDSASRAVAFEQANVDLVYGDDVDSVDIKRLRALPGVQYTTKGWEMFGPMGLMVLNQREAPFDNVLVRRAVMHALNRDFIVKNIFFGMGRVPTGPFSSATLFHDKDLPVYDYNIKKARALIKESGVDVGQRTLRLLAFPYGANWERVGEYTRQTLEQLGFKVDIQATDAGGWASRMSQWDFDISFNHPYQYGDPVLGVQRLYLSSNRVKGTPFGNNQGYHNPKADALWQQAARSVDPAERQKLYSELQRILVDDAALGWLLEIDYPTLYRGNVHNLVTSAIGVKESFDTVYLDAR

SEQ ID NO: 51244 - protein, 330 aa, Bordetella pertussis
MNARDTAMPHPVVAELYASMTLPVVCSPMFIVSNPKLAIAQCVSGVMGSFPALNARPQSLLGDWLDEVEAGLAEHRRAHPDGIVAPYAVNQIIHQSNDRLEHDLDVCARHRVPYIITSLRAPGDLVAGVHAWGGKVFHDVTTVRHAEKALEAGVDGLILVCAGAGGHAGTLSPFALVSEVRRFYDGPLVLSGAITSGQGILAALATGADFAYMGTRFIATAEANASEAYKQAIVDASASDVLYTPFFTGIPGNYLKASIVAAGLDPADLPAAEAASSNFGTTRAKPWKDIWGAGQGVGGIASVLPARELVASLRAEYAQAQARLGARNLG

SEQ ID NO: 51245 - protein, 136 aa, Bordetella pertussis; identical to SEQ ID NO: 51108
  MISC_FEATURE (77)..(77): X=any amino acid
  MISC_FEATURE (129)..(129): X=any amino acid
  MISC_FEATURE (131)..(131): X=any amino acid

SEQ ID NO: 51246 - protein, 131 aa, Bordetella pertussis; identical to SEQ ID NO: 51107

SEQ ID NO: 51247 - protein, 273 aa, Bordetella pertussis
MSEIQTIGIVGAGAMGRGIAQIAAQAGVLVRLYDTNAAAVEAARDALRQTWDKLAQKGKLSEADAQAALARIAPAAALADLADCQLVIEAVIERLDVKRDLFAALEEIVAADCVLASNTSSLSITAIAAACKRPQRVVGYHFFNPVPLMKVVEVIDGLRSDPAVGDALAELARRMGHTPVRAKDMPGFIVNHAGRGMNTEGLRVAQEAVAPFDQIDAIMREQAGFRMGPFELLDLTALDVSHPVMESIYRQFFDEPRFRPSPITTVRLAVKIQ

SEQ ID NO: 51248 - protein, 92 aa, Bordetella pertussis
MRSRYSAFVLDQLDYLLQTWHPDTRPSELEPNAADVKWLGLQIKASQQQDDTHATVEFVARLRQAGRATRLHELSRFVKEEQRWYYVDGDIR

SEQ ID NO: 51249 - protein, 619 aa, Bordetella pertussis
MPHYRSRTSTHGRNMAGARALWRATGMKDGDFGKPIIAVVNSFTQFVPGHVHLRDLGALVAREIEAAGGVAKEFNTIAVDDGIAMGHGGMLYSLPSRELIADSVEYMVNAHCADAMVCISNCDKITPGMLMAAMRLNIPVVFVSGGPMEAGKITSPVDGKVIAKLDLVDAMIKAADPNVSDAEAEEVERSACPTCGSCSGMFTANSMNCLTEAIGLALPGNGTIVATHAWRKGLFEQAGRLVVELCRRYYEQDDASVLPRSIATKSAFENAMTLDVAMGGSTNTVLHLLAAAQEAGVDFTMSDIDRISRRVPCLCKAAPATDKYHIEDVHRAGGILGILGELGRADLLDLSCGNVHSGTLGEAINQWDINGGAGEAAQKFFRAAPGGIPTTVAFSQDATFLTLDMDRQTGCIRDKAHAYSQDGGLAVLYGNLAEKGCIVKTAGVDESQWVFTGRARVFESQEDAVEGILGDRVQAGDVVIIRYEGPKGGPGMQEMLYPTSYLKSKGLGKTCALFTDGRFSGGSSGLVIGHASPEAAEGGTIGLVEEGDTIEIDIPNRRIHLAVGDTVLAERRAAMQARGEQAWQPVDRERVVSQALRAYAALATSADRGAVRDLSQLKR

SEQ ID NO: 51250 - protein, 419 aa, Bordetella pertussis
MSSIETYMQSVGEQARTASRAMMRATGAAKNQALLAMAEAILAQRAELQAANAKDVAAARANGLEAALLDRLTLSDRSIELMAEGLRQIAALPDPGGSITATSVRPNGMRVAQMRVPLGVIGIIYESRPNVTIDAAALCLKSGNATILRGGSEALHSNVALGRIVQAGLQAAGLPTAAVQVIDTTDRAAVGKLVTMTEHVDVIVPRGGKGLISRLAQEARVPLIKHLDGNCHVYVDAAADLAKAHDIAFNAKTYRYGVCGAMETLLVHADVAQRLLPALGQALREHGVELRGCARALQWLPEGKPADDADWATEYLGPILAVRVVDTIDEAMDHISRWGSGHTDAIVTENLSAAQRFQREVDSSSVYVNLPTCFADGFEYGLGAEIGISTNRLHARGPVGLEGLTTLKWVLNGEGQVRA

SEQ ID NO: 51251 - protein, 885 aa, Bordetella pertussis
MQERYQPNSVEAAAQQTWQARDAYLVHEHAKNPDGSEKPKFYACSMLPYPSGKLHMGHVRNYTINDMMARQLRMRGYNVLMPMGWDAFGMPAENAAIKSKVPPAKWTYDNIAYMKKQMKAMGLAIDWSREMCACDPKYYKWNQWLFLKMLEKGIAYRKTQVVNWDPVDQTVLANEQVIDGRGWRSGAPVEKREIPGYYLRITDYAEELLDQVSTNLPGWPERVRLMQENWIGKSEGLRFAFPHRIAGADGKLIQDGKLYVFTTRADTIMGVTFCAVAPEHPLATHAAQSNPALAAFVEQCKLGGTTEAEMATREKEGMPTGLTVTHPLTGAEIDVWVGNYVLMTYGDGAVMGVPAHDERDFAFARKYGLPIRQVVALEGKTYSTDAWQEWYGDKQAGRTVNSGKYDGLAYQAAVDAIAADLAAQGVGEKQTTWRLRDWGISRQRYWGTPIPIIHCADCGPVPVPEQDLPVVLPDDLIPDGSGNPLAKNEAFLSCSCPRCGKPARRETDTMDTFVDSSWYFMRYTSPDNDQAMVDARNDYWMPMDQYIGGIEHAVLHLLYARFWTKVMRDLGLLNFDEPFTKLLCQGMVLNHIYSRKTPQGGIEYFWPEEVDNVYDAKGAIVGAKLQRDGSEVNYGGVGTMSKSKNNGVDPQSLIDTLGADTARLFVMFASPPEQTLEWSDSGVEGANRFLRRLWALGYAQREAVGRGLATGADWAQAPAPVKELRREVYGLLKQADYDYQRIQYNTVVSACMKMLNAIDDAPLPEGPAADAARAETLGLLLRVLYPVVPHITWHLWQDLGYAEHLGDLLDAPWPHVDEAALVADEIELMLQVNGKLRGSIRVAAKAPKEDIERIAAAQEEVARFLEGRPPKRVIVVPGKLVNVVG

SEQ ID NO: 51252 - protein, 170 aa, Bordetella pertussis
MKDHVDLVLSQWAHERPDLDVSSMAVLARIFRFNTAALRRIEPLFRAAGLHQGQFDLLATLYRAGAPHALSPQQLTAALLLSSGAMTHRLDQLEQGGLIARSPNPDDRRGVIVSLTPAGLRTIRQILADYLEAIDALLTPLSATERRQLAGLLKRLLAEHDRTTPGGIPQ

SEQ ID NO: 51253 - protein, 78 aa, Bordetella pertussis
MARVCQVTGKGPMVGNNVSHANNKTKRRFLPNLQSRRFWVESENRWVRLRVTAKAIRTIDKNGIDAVLADLRARGEAV

SEQ ID NO: 51254 - protein, 399 aa, Bordetella pertussis
MPPQTISRSMPGWLILMGALTAIGPFSIDMYLPAFPSIAAGLGVERGEVERTLAAYLIGMAGAQIIYGPLADRYGRKLPMMGGLILYVLASLGCALADDIQTLTACRVAQALGGAAGVVIPRAVIRDHYETQEAARAMSLLMLLMGLAPILAPLAGAQLLAFVGWRSLFWLMAAGGLALLLAVALTMKETLAPERVLPLRAGTILSNYRALLAHRGFMGHSLAGGMGQAGMFAYIVGSPRIFIELYGIAPQYYGLLFGANAAALIVGSQISARLLRKSAPATLQQRAQVALAVASLSALALALALLGLMSLPLLMACLMGYMFSQGFVNPNSAALALAEQGRRLGAASALLGTLQLSCGALAGLIISIWPAESVLPLAAVLAGSACLSWQFGRMARRPA

SEQ ID NO: 51255 - protein, 420 aa, Bordetella pertussis
MSKIEVKNIYKIFGPHPGKWLQAARDGISKEDLLAKSGHTLGLRDISLSIEEGSIYVIMGLSGSGKSTLIRHFNRLIEPSAGHILVDGVDVVSLNKRDLETFRQKKMSMVFQRFGLFPHRTVLDNAGYGLAVQGVARAEREQRARHWLDQVGLSGFENQYPHQLSGGMQQRVGLARALATDAEILLMDEAFSALDPLIRREMQDHLLQLQAKLNKTIVFITHDLDEALRLGNRIAILKDGELVQEGTPEDILLNPATEYVQSFLQDVNRTKVLNAAHAVNPPRLTLTMRSRPAHALDRMQALSYEYAPVLDGKRLAGVLMAAAAQQAVDEGARDVSRFVEDLASVPATAGLDQVLAQLVHSDQPVAVTGEGDEFIGMLSRKKVVELVTPVLAESDSADGQGDAADAASDGAGQAHERDAA

SEQ ID NO: 51256 - protein, 395 aa, Bordetella pertussis
MNEVVVVVVAAARTAIGDFGGGLKDVAPCDLGATVIREALARAGVAGPEVGHVAVGHVINTEPRDMYLSRVAAINAGIGKETPAFNVNRLCGSGLQAIVSAAQTIMLGDTEIAVGAGAESMSRAPYIAPAQRWGARMGDSAMVDMMTGALSDPFGRMHMGVTAENVAARYSISRADQDALAVESHRRAAAAIDAGRFRDQIVPVTLKTRKGETVFDTDEHVRRDITIEGMAALRPVFQKENGTVTAGNASGLNDGAGAVVLMSAAAAAQRGIAPMARLVAYAHAGVDPEIMGIGPVPATQAALKRAGLTVDQLDVIEANEAFAAQACAVTRQLELDPAKVNPNGSGISLGHPIGATGAIITVKALYELQRVGGRYALVTMCIGGGQGIAAIFERV

SEQ ID NO: 51257 - protein, 217 aa, Bordetella pertussis
MKTLRFPAGLYGITPEWDDTDRLLAAVRAAAAGGMTALQLRRKLADERLRAAQARALAPLCRELGVVFLVNDHWKLALDVGADGAHLGRDDADPATVRAQAGAGLLLGVSCYNDLRRADALLAAGADYVAFGTVFASPTKPEAVHAPLQTLTEARARVLACPAPRPAVVAIGGITPANVSQVAQAGADSAAVISGLFEAPDIQAAARACAAAFSVNP

SEQ ID NO: 51258 - protein, 265 aa, Bordetella pertussis
MSAHQARKRFGQHFLTDESVVESIVRAIGPARDDRVVEIGPGLSALTRPLLDRIDHLTAVEIDRDLAARLRRQYPAERLTVVEADALTVDFAQFGQGLRVVGNLPYNISSPLLFHLMGAAEQVRDQHFMLQREVIDRMVAEPGSGDYSRLSVMLQARYRMEKLFDVAPEAFDPPPRVVSAVVRMAPLPADRLRPASDAAFETVVARAFSQRRKMLRRVLDDWAALTPWDELGIAPTARAEEVGVAQFIGLADALLAAGAPGLARP

SEQ ID NO: 51259 - protein, 488 aa, Bordetella pertussis
MFSSERAYMPVLRRTKIVATLGPATSTPERLDGLIRAGMDVARLNFSHGSAQDHRERVRLVRELAAEQGRFVALMGDLQGPKIRIARFTDQQVTLQAGQPFTLSRSHSKEAGDATIVGIDYPELVQDCRPGDELLLDDGRVVLVVDSVGAEEVHTTVTVGGPLSNNKGINRRGGGLSAPSLTDKDRTDIKLAAEMELDYVAVSFPRYGADIDEARALLRAAGSQAWIIAKIERAEAVADDDALDALIRASDGVMVARGDLGVEVGDAELVGIQKRIIQHARTLNKVVITATQMMESMVASPMPTRAEVSDVANAVLDYTDAVMLSAESASGQYPIEAVAAMARVCLGAEKHPTTTHSHHRLGETFTRCDETIALAAMYAANHFPGVKAIIALTESGHTPLIMSRIRSGVPIYCYSPHGPTQRRAALFRGVYTVPFAPAEYDPADLSNAAIDELKKRGRVAAGDWVILTKGDFYRDSGGTNGLKILKVE

SEQ ID NO: 51260 - protein, 409 aa, Bordetella pertussis
MLNKLWLAFFLTAAAAALYRWLGLGEPDVFQAMVVSLFDMARVSVEVMVLLFGTLTLWLGFLRIAEAAGLVERLASLLGPLFARLMPEVPRGHPAIGLITLNFAANGLGLDNAATPIGLRAMRELQSLNPNPDTASNAQILFLVLNASSLTLLPVTLFMFRAQQGAADPTLIFLPILLATSASTLAGLLAVAFCQRLRLHDPVVLAWLGSAALALGAFMVMLAGMSAAAIAALSSLLGNLTLFAVLLAFLVAGAWKKVPVYETFIAGAKDGFNIARDLLPYLVAMLCAIGVLRASGALDFALDGMRWLAHAAGWDTRFVDALPTALVKPFSGSAARAMMLETMSHFGVDSFPALLAAVMQGSTETTFYVLAVYFGSVGIVRARHAVGCALAADLAGVLASIGVCYWFFG

SEQ ID NO: 51261 - protein, 296 aa, Bordetella pertussis
MSLFSLLGALEIGLIFSLVALGVLISFRLLRFPDLTVDGSFPLGGAVAATLIAAGYDPFTSTSVATLAGAAAGLVTGWLNVRLRIMDLLASILMMIALYSVNLRIMGKPNVPLITEPTVFTLLQPQWLSDYVARPLILLVVVIIVKLALDWFLATQAGLAMRSTGSNGRMARAQGVNTGAMILAGMALSNALVALAGALFAQTQGGADISMGIGTIVIGLAAVIVGESILPSRRLVMATLAVILGAIVYRFFIALALNSDFIGLKAQDLNLVTAVLVTITLVIPMLKRRLVGRKGA

SEQ ID NO: 51262 - protein, 391 aa, Bordetella pertussis
MTVRTVRIAGGRLIDPASGADARADLYLADGRIAAIGQAPAGFQAQQHIDARGLAVLPGLVDLSARVHGAGLAPLACEMQAALAGGVTRLVVPPDTDPPLDEPGRVEMLRHRAHQAGQAQLHPLGALTEGLRGERLSEMAALAEAGCVAFSQAGLPVADTRVLWRAMQYARTFGLALWLRPLDPWMGRDGVAAAGAYASRLGLAEVPVQAETLALHTIFELQRATGARVHLMRLSSAAGVALVRAARREGLPLTCDVAAHQIHLTDVDIGFFDSRFRLDPPLRGQRDRDAIVAGLADDTIDAICSDHRPVGDTGKLLPFAEAEAGASGLELLLSLTLKWAQRERVPLARALALVTSAPAAILRAATAAPPPCGELAAGAPADLCLVDLDAD

SEQ ID NO: 51263 - protein, 153 aa, Bordetella pertussis
MSSVSAAGATPPASPGCIAGIGMDLLRIERIERALARHGDRFAQKILGPKELAKFQARRRRDPARGVRFLATRFAAKEAFSKAIGLGMRMPMSWRRVQTLNAPGGRPVLVIGAELADWFDARFGAAHVSITDESDMAAAYVIVERKPAPDGRP

SEQ ID NO: 51264 - protein, 242 aa, Bordetella pertussis
MPKPTARRLNWFRVITAVIMAVLCIAILYQLWMFSLVVWYAYRDPGSSAIMRQELARLRERDPEAELKYQWVPYDRISNTLKQAVVASEDANFTEHDGVEWDAIRKAWEYNQRQAERGRTKMRGGSTITQQLAKNLFLSGSRSYLRKGQELVLAYMIEHVMPKERILELYLNVAEWGVGVFGAEAAARHYYNTSAARLGAGQAARLAAMLPNPRYYDRHRNTGYLNSRTATLTRRMRMVEIP

SEQ ID NO: 51265 - protein, 229 aa, Bordetella pertussis
MRDQALPLRTLVITASLALAAMAAPAHAFADDEARRAILDLRQQVQQQNEQNQRARLQLADQLQAMQQEIAQLRDQLELISRQQPNAQGGQPQHAGNPPGVTAVDQQEQAAYDGAIDLFRKGQYKDAAESLAAFIALYPNSQLAPTAQFYLGSSRYAMKDFKGAIEQLNNLVQNAPTNARAPDALLVIAGSQIELNNRAGAKATLQRIVRDYPTTPAANTAKSRLQLLQ

SEQ ID NO: 51266 - protein, 576 aa, Bordetella pertussis
MRASKYHLNTLKEAPAEAEIASHQLMTRAGMIRKLAGGIYTYMPLGLKVIRKIEGIVREEMNAAGAIELLMPVVQPAELWMESGRWEQYGAELLRIKDRHQRDFVLQPTSEEVITDIARNEIQSYRQLPLNFYHIQTKFRDERRPRFGLMRGREFTMKDAYSFDRDEAGAQRSYDIMYAAYQRIFQRLGLEFRAVAADTGSIGGSRSHEFQVIADTGEDLIVYNPESDYAANIELAEAPALLATRAAPGQDLEAVPTPGAAKCEDVAKLLDLPLARTIKSIVLAVDQPEGPAQVWLLLLRGDHELNEIKAGKLPGLAGFRFATETEILDHFGCKPGYLGPIKTARPVHVVADRTVANMADFVCGANREDYHYQGANWGRDLPEPELVADLRNVVEGDPSPDGKGALSIQRGIEVGHVFFLGTKYSEALKATFLDDNGKPAVLQMGCYGIGVTRIVGAAIEQNHDARGIIWPRAIAPYEVVICPVGWGKSETVRDTALALYEALRARGVDVMLDDRDSRPGVMFAEWELIGVPLRVTVGERGLNEGVVELQARREAEAAKVPVDQALAQTLAKLDLL

SEQ ID NO: 51267 - protein, 262 aa, Bordetella pertussis
MTLQARNLTLARGGAPILTDVSLTLAPGALVGLLGANGAGKSTLLAALAGELAPRSGQVFLGDADLATLSARQLARRRAVLPQKPSLSFDLGVSDVVGMGAYPFPELDPAAVRQLVRDALEQAGVTHLAQRRYPQLSGGEQQRVQFARVLAQCHAMHAPGQTRYLMLDEPISNLDPRHQMELLATARALAHEAGMGVLVIVHDINQAARWCDTLALLADGRLAALGPPADVLTPDHMRRVYGIEADVLAHPTLPGRLLVLAR

SEQ ID NO: 51268 - protein, 340 aa, Bordetella pertussis
MSLATAPRPPASRRHPVALLLALGAALLAVGILAAASGAVHIPLADLARLIGGDSTPRDALWRNVLFDIRLPRVLFAATAGAALAICGAAMQALFRNPLAEPGLVGISAGGAMGAVLAIVLTSGGFAITAPAAFAGSLLATGCAYVLGRRAHGVAGLLLAGIAINTVAGSVIGLLTFMASDAQLRDLTFWSMGSLAGARWSLLAFLAPWTLLWSWWLMRQWRAMNALLLGEREAHHLGFALRSVRRQLVLATALIVGPLVAATGGIGFVGLVVPHLIRMTLGADHRWLLPASMLAGALALTLADWLARVVIVPAELPIGLVTSLVGGPFFLWLLARGRRL

SEQ ID NO: 51269 - protein, 377 aa, Bordetella pertussis
MKFVDEATIEVIAGKGGNGVASFRREKFIPKGGPDGGDGGRGGSIYAVADRNINTLIDFRYARLHRAKNGENGRGSDQYGAAAPDITLRVPVGTVVHDADTGEVLFDLDRHDQKVTLAAGGAGGMGNIHFKSSTNRAPRQWTPGKEGEQRRLRMELKVLADVGLLGLPNAGKSTLISRISNARPKIADYPFTTLHPNLGVVRTSPSRSFVVADIPGLIEGASEGAGLGHLFLRHLARTRVLLHLVDISSPDPEADPIEQAVVDANAIVEELRRYDPELAAKPRWLVLNKLDMVPDAQDAQQRFCAEFGWTGPVFAISGLNGEGTQDLIWALQDYLDAEKRKDQDAQDQADGTYVFEDPRFDASRGGAAPATPPGGDE

SEQ ID NO: 51270 - protein, 361 aa, Bordetella pertussis
MNPARQNHTLENAMTEPTFATRAAALRQRNDELAASQPGQRARNLAQALGVSEAEWIAAGCNGARVTALRGKPQAIFRDLGELGEVMALTRNDWCVHERHGRYEDIQAEGPVGLVLGPDIDLRVFFNCWASAWAVEQDGHTSLQFFDGAGVAVHKVYRTEATDGAAWEALVARYAGEPEWPEPQPYPPAADAAAVDDPAALRRDWLAMQDTHEFFPLLRRLKVGRLAALKAAGADLAQQVPAETVEHMLTQAAASGLSIMCFVGNRGMIQIHTGPVEKLRRTGPWYNVLDPRFNLHLNTETVDSAWVVSKPTSDGWVTSLELYTAGGELIVQFFGERKPGKPELTAWRQLLSGLCGQPLAE

SEQ ID NO: 51271 - protein, 86 aa, Bordetella pertussis
MAQKKGGGSTRNGRDSESKRLGVKVYGGQSILAGSIIVRQRGTRFHPGVNVGVGKDHTLFALANGKVHFSVKGALNKPTVSVVAAE

SEQ ID NO: 51272 - protein, 324 aa, Bordetella pertussis
MHPAGPLNPPGDDAPIERRVAREAARWLVRLGSGQASADEIQACDHWRASHAEHERAWQRARRLTSMFDRIPPAVGQAALGRARDRRAMLKSLVALLAAPPAAWAALRGARNSGWLADLRTGTGETRTVALGPGTQLRLNTGTAVSLDDGSGLLSLRLHRGEIYLEADRPCRVLTRGGMIRTQAAHLWLRQDDADGLLGVVAGLAFWQGADNRTHSVAAGQRIAWHDGALQGAAQTLDGSPDWLRGVLRADAMRLDRFLRELSRYRPGTLRCDPRVAGLRLSGVFQLAHTDDILRALPALLPVQLSYVTPYWITVGPRPAGATT

SEQ ID NO: 51273 - protein, 321 aa, Bordetella pertussis
MNLPELIAPIADDMKAVDTVIRDRLNSDVVLIRTIGDYIIGAGGKRMRPAMVLMVARALGYQGTHHQLLAAVVEFIHTATLLHDDVVDESDLRRGRDTANAVFGNAASVLVGDYLYSRSFEMMVEADSMRIMQILSQATTVIAEGEVLQLLNVHDPDVSQERYLQVVRYKTAKLFEAAAQVGAVLAGASPEQETAAAAYGRHVGTAFQLVDDVLDYSGDAHALGKNVGDDLREGKPTLPLIRVMETGTPEQRELIREAIKTGQADFAAVAQAIQATDALAHARQAAENEAELARQALSAFPVSLYQKSLLEFCAFAVNRDR

SEQ ID NO: 51274 - protein, 83 aa, Bordetella pertussis
MDLNSYLNREDATSAAALAREVGVSPALVYQWRTGRRPVPVEHCAAIERATGGEVSRRDLRPGDWPRVWPELAAQAQQEVTHA

SEQ ID NO: 51275 - protein, 306 aa, Bordetella pertussis
MSMSDRDGFIWYDGKLVPWREATTHVLTHSLHYGLSVFEGVRAYETAAGTAIFRLQDHTNRLFNSAHIYQIPLPYDRDTLNEAQREVVRANGLASCYLRPLAFYGSEKMGVSPKGAQVHVAIAAWPWGAYLGETALAQGIRVKVSSFARQHVNVTMPRAKVATTYANSIIANAEALQDGYNEALLLDTEGFVAEGAGENIFIVKDGVLCEPEIASALTGITRSTIHALAADLGLRVVTKRLTRDDVYIADEAFFTGTAAEVTPIREVDNRQIGAGRRGPVTEKLQQAFFDLVNGRNPKYQHWLTPV

SEQ ID NO: 51276 - protein, 279 aa, Bordetella pertussis
MQVVRKAVFPVAGMGTRFLPATKAMPKEMLPVVDKPLIQYAVEEAVAAGITDLIFVTGRNKRAIEDHFDAAPELETDLEAKGKHELLALVRDILPAHVNCLYIRQSAPLGLGHAVLTAAPAVGNEPFAVLLADDLIDADTPVLKQLIDVAVARQGSVLGVQEVPREDTRKYGIVASQPVDARTERVTHIVEKPAPEQAPTTLAVVGRYVLEAAIFDHLRATTVGAGNEIQLTDGIAALLRERDVYAHRYDGKRYDCGSKAGMFQATVALGRKYHGLIPE

SEQ ID NO: 51277 - protein, 364 aa, Bordetella pertussis
MRRLLVVAAMAAGSSSVFWSVAPARAANQLELYGVVDVGLATTRVSGLGTRQQVLGGGQTDNLWGLRGTEELDGGWRASFGLESGFDAANGTRNDDARLFDYGTWVGLGHAGVGELSLGRQQSIGLQYGGQLEIASWRDMGMGALFKASDNYRVNNLVNYLSPEFSGWQWGVGYAFDVESGDTGRFDRSPAFSTGLKYEDGPLLAAFTWDKLNLHDTSATGGRSPQALQAGFTYDFEALKMALAWSRQRNGFVGLNGGGQIGLGPEPFAHGGAINAWLLGLEVPVHGNGAWLVQGSMARPDWHWANGQQASKAYVVTLGYRQDLSARTSLYAYGGYMKGYDPEDPFASDVGRATRFGVGMTQRF

SEQ ID NO: 51278 - protein, 464 aa, Bordetella pertussis
MHRNTTRCTIALPGGSILKLQSLDDFLRRVAARDPQQAEFMQAVQEVMLSLWPFIEKHPHYAEHALLERLVEPERVIQFRVCWTDDQGQAQVNRAFRIQHSSAIGPFKGGMRFHPTVNLSVLKFLAFEQTLKNALTTLPMGGGKGGSDFDPKGKSDAEVMRFCQALMLELHRHLGPDTDVPAGDIGVGAREVGFMAGMMKKLSNSAASVFTGKGLCFGGSLIRPEATGYGTVYFAQEMLQRAGLSFDGMRVSVSGSGNVAQYAIEKAMALGAKVVTISDSCGTVIDEAGFTHEKLLALMHIKNDLRGRLDTYASQFGLRYEAGVRPWHVPVDVALPCATQNELDENDARTLIRNGVKCVAEGANMPATLDAAKAFIAAEVLYAPGKASNAGGVAVSGLEMSQNSARLPWTREQVNARLHAIMRDIHENCVRHGHGAGNYVNYVDGANIAGFVKVADAMRQQGLY

SEQ ID NO: 51279 - protein, 484 aa, Bordetella pertussis
MNWEIVIGLETHTQLSTDSKIFSGSSTRFGAAPNTQANAVDLALPGSLPVMNRGAAERAILFGLAVGGKVAPRSVFARKNYFYPDLPKGYQISQYELPVVEGGTLSFFVGEEEKTVNLTRAHLEEDAGKSLHDEFSLASGAPASGIDLNRAGTPLLEIVTEPEMRSAAEAVAYARALHSLVVWLGICDGNMQEGSFRCDANVSVRPVGQKEFGTRTEIKNVNSFRFLERAILFEARRQIELIEDGGTVVQETRLYDADRDETRSMRSKEDAHDYRYFPDPDLPPLVIGQDWIDAVRAGMPELPAAQRARFEADYGLPAYDAAQLTVSRAMADYFEAVARALPAGQAKLAANWIMGEVAATLNREEKDIDAAPVSAAALAALINRIIDGTISNKIARDVFAAMWAGENGGDADAIIEARGLKQISDSGAIGAMIDEVLAANPAIVEEYRAGKQKAFNSLVGQIMKAAKGKANPQQVNELLKEKLG

SEQ ID NO: 51280 - protein, 512 aa, Bordetella pertussis
MTQSALHTEFGGIAALRDALARRQVSAVELAQSGLDAAQAASGLNAFLHIDPDLTLAQARAADAALAAGTAGPLAGIPIAHKDAFVTRGWRTTAGSKMLAGYASPFDATVVERLAEAGAVSLGKLNCDEFAMGSGNENSAYGPVRNPWDTQAVPGGSSGGSAAAVAARLVAAATGTDTGGSVRQPAALCGVSGIKPTYGTVSRYGIIAFGSSLDQAGPLAPSSRDLLELLDVMTGFDPRDATSLQACDGQANESGRVRRGHDAAQAGYDAAGSQPLKGLRIGVPQEYFGAGLAPDVAAAVEAALAQFEQLGAVRVPVSLPRTELAIPAYYVIAPAEASSNLARYDGVRYGHRAAQYGDLNEMISRSRAEGFGDEVKRRILIGTYVLSHGYYDAYYLQAQRLRRLIAQDFQRAFAGQCDVIMGPVSPTVAKNIGDNRDDPTADWLADVYTLGVSLAGLPAMSVPCGFGGQDGRRPVGLQIIGNYFDEGRLLALADRYQQVTDWHQRAPVSQDA

SEQ ID NO: 51281 - protein, 102 aa, Bordetella pertussis
MALNEQDVARIARLARIELTPDQRGRAQAELNGILHLIERLQAVDTQGVEPLAHPLSAHEDITLRLREDAVSEQATEARRAELLANAPESADGLFLVPKVIE

SEQ ID NO: 51282 - protein, 347 aa, Bordetella pertussis
MFGFLRSYFSSDMAIDLGTANTLIYVRGKGIVLDEPSVVAIRHEGGPNGKKIIQAVGHEAKQMLGRVPGNIEAIRPMKDGVIADFTVTEQMLKQFIRMVHPRNMLAPSPRIIVCVPCGSTQVERRAIRESALGAGASHVYLIEEPMAAAIGAGLAVSDASGSMVVDIGGGTTEVAVISLGGMVYKGSVRVGGDKFDEAIVNYIRRNYGMLIGEPTAELIKKEIGSAFPGSEVREIEVKGRNLAEGVPRSFTVSSNEILESLTDPLNQIVSAVKIALEQTPPELGADITDKGIALTGGGALLRDLDRLLQEETGLPVVVADDPLTCVVRGCGEALEHLEKLGAIFIND

SEQ ID NO: 51283 - protein, 343 aa, Bordetella pertussis
MRMRIGPWSLPNNVLVAPMAGVTDRPYRQLCKRLGAGYAVSEMAASNPRLWDSVKTSRRLNHEGEIDPISVQIAGADPTMMAEAAAFNVAKGARIIDINMGCPVKKVCNVASGSALLRHEDLIVRILEAVVAACAPLGVPVTLKTRTGWDREHRNALRVGRLAEQAGIAALTLHGRTRADLYTGQAEYDTIRAVKAELKIPVIANGDIDSPEKARQVLDYTGADAVMIGRAAQGRPWIFREIDHYLRTGARLAPPSYGEMRDLLLEHLDDHYRFYGEHTGVRTARKHIGWYLDDLPGAAAFCARMNQIDNTREQWRAVADWFDTILREGRDQQAFVAQPLLAA

SEQ ID NO: 51284 - protein, 304 aa, Bordetella pertussis
MKRLLNALTAALAIGAAAAGQAHAADLDGTLKKISDTGVITIGHRETSIPFSYYDANQKPVGYSIDICTRIVDAVKTRIKRDDIQVKYLPVTSATRIPLMGNGTIDLECASTSNTLDCQKQVAFSVTTFVTGNRFISLKSANLKTIDDLKGKTVASTSGTANIRQANEINEARSLGMKVVPVKEHAEGFLMVETGRAAAFIMDDILLYGLAANAKEPDRYQVSGDSLSIEPYAIMLRRDDPQFKALVDDTIKSLYASGDFEALYKRWYQSPLPPKGINLNVAMSEVLKRVVATPTDSGDPVAYK

SEQ ID NO: 51285 - protein, 648 aa, Bordetella pertussis
PRALGVLARVFGYESFRGDQQAIVEHVIGGGDALVLMPTGGGKSLCYQVPALVREGTGIVVSPLIALMQDQVDALTELGVRAAFLNATQDWRVAREVEQAFLAGELDLLYVAPERLLTDRCLQLLERGRIALFAIDEAHCVSQWGHDFRPEYLGLSMLHERWPEVPRIALTATATAATRSEIAQRLALDEARHFVASFDRPNIRYRIVEKNEVRRQLLDLIRSEHEGESGVVYGLSRARVEETADFLCANGVNALPYHAGLSPAVRAANQARFLREDGIVMVATIAFGMGIDKPDVRFVAHIDLPKSVEGYYQETGRAGRDGLPASAWLAYGLQDVVQQRRMIDESPGDDAYRRRLGQQLDAMLGLCETVECRRVRLLAYFGQTITACGNCDVCLEPPQAWDGTVAAQKVLSAVYRLWKERGQRYGAGHIIDILRGKSTDRTRQHDHETLSVFGVGADLSENAWRGVLRQLLAQGLLAVDHEGFGTLALTEGSRAVLKGEHQLMLRREAEKKPRSSRAGARARPDPIDLPAEAKPVFESLRSWRGEVAKSNGVPAYVIFHDATLREIALARPESLDDLSHISGVGARKLQAYGEEILRACSARSGLLAEQLARAAARRGRRGQPQVAPGRQRGGAAARRALQVAVLDQ

SEQ ID NO: 51286 - protein, 244 aa, Bordetella pertussis
MATLANRPLFAPIPPSMNMPLAPMARENIAAVIYRQLKQLLMMGELKPGEILTLRMLTERLGVSQTPVREALLQLVSERALAMSRGKSVSVPAPTREKLQELRDIRLTLEVLATERATPRISDAEIKTLERLHREMVRYKNSEQREGVLKTNYEFHFTLYNASGMPDLVAIIEGLWAQTGPSLTYLYQKPFAHLYDAHPHLPLIEALRRHDVEAAVAAIRRDVAGYGAALMERLPAEAGQPAGG

SEQ ID NO: 51287 - protein, 571 aa, Bordetella pertussis
MELNGADIVVRCLAEEGVEHVFGYPGGAVLYIYDAIFKQDKFQHILVRHEQAAVHAADAYSRASQKVGVCLVTSGPGVTNAVTGIATAYMDSIPMVIISGQVPTAAIGEDAFQECDTVGITRPCVKHNFLVRDVKDLAETMRRAFFIARTGRPGPVLVDIPKDITVAQCKYAPPKGEISMRSYAPVNKGHQGQIKKAVQMLLHAERPMIYTGGGVILSDAAEALRHLVDQTGAPCTNTLMGLGAMPATDHRFLGMPGMHGTYEANMAMQHCDVLLAIGARFDDRVIGNPRHFAQNARKIIHIDIDPSSISKRVRVDVPIVGNVKDVLADLSAQYDLARADAKPAPIEKWWQQIEAWRGKECLKYAGSDEVIKPQFVVEKLWEVTGGDAFVTSDVGQHQMWAAQYYKFNKPRRWINSGGLGTMGVGLPYAMGVQMANPGADIAVITGEASIQMNIQELSTCHQYHLTPKIICLNNRFLGMVRQWQQIDYGSRYSESYMDSLPDFVKVAEAYGHVGLRIERPADVEPALREAFKKHKDRLVFLDFITDRTENVWPMVKAGRGLTEMLLGSEDL

SEQ ID NO: 51288 - protein, 163 aa, Bordetella pertussis
MKHVISVLMENEPGALSRVVGLFSARGYNIETLTVAPTEDATLSRLTVVTVGSDEVIEQITKHLNRLVDVVKVVDLTEGAHIERELMLIKVRAVGKEREEMKRMADIFRGRIIDVTDKSYTIELTGVQEKIQAFIEALDRSAILETVRTGVSGIGRGERILKI

SEQ ID NO: 51289 - protein, 338 aa, Bordetella pertussis
MKVFYDKDCDLSLVKGKTVAIIGYGSQGHAHALNLHDSGVKVVVGLRKGGASWNKAANAGLEVAEVAEAVKRADIVMMLLPDENIAAVYRDEVHANIKAGAALAFAHGFNVHYGQVVPREDIDVIMAAPKAPGHTVRSTYSQGGGVPHLIAVYQDKSGSARDVALSYASANGGGRAGIIETNFREETETDLFGEQAVLCGGTVELIKAGFDTLVEAGYAPEMAYFECLHELKLIVDLIYEGGIANMNYSISNNAEFGEYETGPKVVTDATRQAMRECLTAIQTGEYAKKFILENAAGAPTLTSRRRINAESQIEQVGGKLRAMMPWIAANKLVDKAKN

SEQ ID NO: 51290 - protein, 89 aa, Bordetella pertussis
MSVADIKKSEIVAQFQRAQGDTGSPEVQVALLTARINELTGHFKEHMKDHHSRRGLLRMVSRRRKLLDYLKGRNPDSYRALIEKLGLRK

SEQ ID NO: 51291 - protein, 719 aa, Bordetella pertussis
MFNKVTKTFQYGQHSVVLETGEMARQASGAVLVSVEDTVVLATVVAAKKAKAGQDFFPLTVDYIEKTYAAGRIPGGFFKREGKPSEKETLTSRLIDRPLRPLFPEGFYNDVQVVIHTLSVNPDIDPDIPAMIGASAALAISGIPFNGPIGAARVGYVDGQYVLNPTATQLKSSKMDLVVAGTENAVLMVESEAKQLSEEIMLGGVVFGHEQMQAAINAIHDLVRDAGKPDWDWQPAPKNEALIAAVSAAAQEGLNAAYQIREKQARTTKLREVYAAVQAAMAEQAAQAGQPAPDSVGVDNILFDLEARIVRSQILNGEPRIDGRDTRTVRPISIRLGVLPRAHGSALFTRGETQALVVATLGTKQDEQIIDALMGEYRDRFMLHYNMPPFATGETGRIGVPKRREIGHGRLAKRALLPLLPAPEDFQYTIRLVSEITESNGSSSMASVCGGSLAMMDAGVPTNDHVAGVAMGLILDSGKFAVLTDILGDEDHLGDMDFKVAGTETGITALQMDIKIQGITKEIMQVALAQAREGRLHILGKMRDALEGSRTELSAFAPRMLTIKINPEKIRDVIGKGGATIRALTEETGTQIDISDDGTIVIASVDETQAKEAQRRIVELTADVEVGQIYDGSVLRLLDFGAIVQVLPGRDGLLHISEIANYRIANINDVLKVGQPVRVKVIEADDKGRLRLSIKAIGGIEQQQSGTAEPAAQSEPQAE

SEQ ID NO: 51292 - protein, 293 aa, Bordetella pertussis
MTRPPRRPPSCMCCKPPRAHTLMPVSDATALPGVARQAVERACAEGGIVVAAGGDGTLNAVARAVLGSGVPFGILPQGTFNFFGRAHGIPQDAHAATRCLFDARIEPVQVGLLNDRLFLVNASLGLYPQLLEDREAYKQRYGRSRMVALWSGLVTLLRAPPQLTLQLEHGGQARTLRTPTLVVGNNALQLERLGIAEAAALQQGQLVAMSVRPVGTLALYGLLLSGLFSRLGEADKVVSFGFDRLTVRVRGRRRVKVAMDGEISWLPTPLQFQVSPEPLRLLVPSPGQRLEAA

SEQ ID NO: 51293 - protein, 164 aa, Bordetella pertussis
MLLSEQAYKKIDRELAKFPADQRQSAIMASLAIAQEEKGWLPAEILEDVANYIGVPPIAVQEVATFYNMFDVKPVGTHKIAVCTNLPCALRDGEKAADYLKRKLGVDFRETTADGRFTLIEGECMGACGDSPVLIVNNKHMCVRMTEEKLDALVDGLKSQGESA

SEQ ID NO: 51294 - protein, 455 aa, Bordetella pertussis
MNAPDLYKRLAQGLDPNPLNDLSISMCLHGRHIAPQIMADVDGENWRLQEYVKRGGYEALRKILTTGMTPEDVIAEVKASGLRGRGGAGFPTGLKWSFMPRAFPGQKYLVCNSDEGEPGTFKDRDILRFNPHIVIEGMAIAAYAMGISVGYNYIHGEIFEVYERFEEALEEARAAGFLGDKLLGSDFSFQLHAFHGYGAYICGEETALLESLEGKKGQPRFKPPFPASFGLYGKPTTINNTETFAAVPWIIRNGGQAYLEVGKPNNGGTKLFSISGDVERPGNYEIPMGTPFSKLLELAGGMRGGRKLKAVIPGGSSAPVLPADIMMDCTMDYDAIAKAGSMLGSGAVIVMDETRCMVKSLLRLSYFYFEESCGQCTPCREGTGWLYRMVHRIENGQGRPEDLDMLDSVAGNIMGRTICALGDAAAMPVRSFIKHFRDEFAHHIEHKSCVVPQYL

SEQ ID NO: 51295 - protein, 296 aa, Bordetella pertussis
MSNPQFRAGFVAIVGRPNVGKSTLTNALIGTKISIVSRKAQTTRHRIHGVLTREHEQFVFVDTPGFQTRHGGAMNRMMNRVVTQALADVDVVVHVVEAGKWSEGDAKLLPLLPKSRRSILVVSKIDALKNRDELFPFVSKLMALHAYDAVVPVSATKGQQLDQLLDEIAAGLPQGDPMFEEDTLTDRPVRFIAAELVREKIFRLVGDELPYGCTVVIEQWEETERGVRIAACVVVERESHRPILLGAGGMHMKRIATEARQDIAKLLDMPVHLEIYIKVRKGWSDREGALRDLGYE

SEQ ID NO: 51296 - protein, 294 aa, Bordetella pertussis
MSWNFALILFVLLVITGVIWGLDLALFRKRRERRAQAAAAQVDAAGITDAEQAGRERREAIDAARRAPWWIEYAVSFFPVILFVFVLRSFVVEPFHIPSGSMLPTLQSGDLILVNKFSYGIRLPIIDRKIIETGSLERGDVVVFRYPVDTDVDYIKRIVGLPGDQVAYLDKKLYINGKLVPHERDGDYFEPDRVSYIAQYKEKLGEVEHKILLDEQKIQDFGPIWKFPSIQNCQYARNGVRCTVPPGHYFAMGDNRDNSADSRYWGFVPDGNIVGKAFFVWMNFSDLSRIGRFH

SEQ ID NO: 51297 - protein, 495 aa, Bordetella pertussis
MKAITVSNLFFRRFGAAALVAFMAVTAAGTQVQAQTQVAPPAVALPDFTGIVEKVEPAVVNIRTTATVPVRGGPGGGNDPYELFRWFFGPDFQPPGPAPGQRRKQPQPQPEERTIPRGVGSGFFISADGYILTNNHVISDATDIYVTLTDGREFKAKVIGSDDRTDVALIKIDAKDMTPLTIGDPKTLKKGQWVLAIGSPFGLDSTVTAGIVSAIGRDTGEYLPFIQTDVAVNPGNSGGPLLNLQGEAVGINSQIISRSGGFMGISLAIPIDEAMRVVDQLRATGKVTRGRIGVQIGEVGKDVADAIGLPRAEGALVSSVEAEGPAESAGVQPGDVILKFNGEPIKRWSDLPRIVGETKPGTSAKMDVWRKGRNVTLSVKVAELKSDRSAATADEGKQAEPTAENHLGLGVVDVPSDMQRKLRIKGGAQVRVAEGAAAQAGLQEGDIVLAVNDTDVTDAAQFNKLVSRLDKKKAAGLLVRRGDQTQWVAVQPASK

SEQ ID NO: 51298 - protein, 409 aa, Bordetella pertussis
MKRRVVITGLGIVSPVGNDIASAWDNIVNGRSGISRISRFDPTPLTTHIAGEVKDFDVTQYMPAKEARQMDTFIHYGLAAGMQAWRDCGLEVTETNAERIGVIVGSGIGGLPRIEETQTEMLAKGPRRISPFFVPASLINLISGQLSIAYGMKGPSYAVVSACTTGLHCIGDAARLIEYGDADVMLAGGAESTVSPLGIGGFAAMRALSTRNDDPTTASRPWDRDRDGFVLGEGAGVLVLEEYEHAKKRGARIYGELAGYGMSSDAHHITAPDKDGPRRGILNALRNGGINADEVSYVNAHGTSTPLGDKNETDALKLAFGDHASKLVVNSTKSMTGHLLGAAGGIEAVFTTLAVHNQISPPTINIFNQDPECDLDYCANEARPMKIEIGLSNSFGFGGTNGSMAVRRV

SEQ ID NO: 51299 - protein, 250 aa, Bordetella pertussis
MEKTSTELQGKIALVTGATRGIGRAIAQELAARGATVVGTATSEAGAQAITEALAAQGGRGVVLDVTDAQACEALIEQLGKDGGGPHILVNNAGITRDTLAMRMKDDDWSAVIDTNLAAVFRLSRAVLRGMMKARWGRIINITSVVGASGNAGQANYAAAKAGVAGMARALARELGSRNITVNCVAPGFIDTDMTRILGEDQTAALLQQIPLGRLGAPADIAHAVAFLAGPQAGYITGTTLHVNGGMYMQ

SEQ ID NO: 51300 - protein, 311 aa, Bordetella pertussis
MKLAFVFPGQGSQSVGMLDAWAGNAAVADVVARASAALGQDLGALMAQGPAQQLNLTTNTQPAMLTAGAACFAAWRAAGGPMPEVMAGHSLGEYAALTAAGALALEDAVRLVRVRADAMQAAVPVGAGAMAAVLGLDDDAVRAACQQAAQGEVVEAVNFNAPAQVVIAGHKAAVERACEAAKAAGAKRALLLPVSAPFHSSLLKPAAEVLQGALAGVEVSAPQVPVLNNVDVATPAEPAAIRDALVRQAWHPVRWVETLRAMKELGVTHVIECGPGKVLTGLTKRIDADLTGIAITDPASLEAALAAVNGN

SEQ ID NO: 51301 - protein, 328 aa, Bordetella pertussis
MEKAMKYAKIAGSGGYLPERVVTNDDLAAELATRQISTSDEWIVERTGIRQRHLAERGVTTSQLATEAARRAMDDAGVQADEIDMIIVATSTPDYVFPSTACLVQANLGAKGGAAFDVQAVCSGFVYAMTTADNFIRAGRARCALVIGAEVFSRILDWNDRGTCVLFGDGAGAVVLKAADEPGILAAHLHADGSQTKILCAAGNVAYGDVTGDPFLRMDGQAVFKQAVTVLDRSARDVCAEAGVEVDDIDWLIPHQANVRILNFLARKLRVPTERVVITMDQHANTSAASVPLALDVARRDGRVKPGQLVLMQGVGGGFTWGSVLARM

SEQ ID NO: 51302 - protein, 199 aa, Bordetella pertussis
MPAIPPKLILASSSRYRRELLSRLRLPFTAISPDVDETPQPGEAPADLALRLSVAKAMAVAATHPGSVVIGSDQVATVDGEPIGKPGGFERAREQLRRLSGRAVEFHSAMAVTDGVHTETADIVTLCRFRTLTDAAIDAYLRAEEPYDTAGSAKAESLGIALMDSIRSDDPTAIIGLPLIALTRMLGRFGLDPLTGHPA

SEQ ID NO: 51303 - protein, 585 aa, Bordetella pertussis
MNWGVGDFQFLKSGSDEPCIQPIESSHLDDAYRTLIQRQSAMTEKHQAARDMVLRALPRGGGFREDDRVMLWNMFVDMLQLLDTLVATHTDYASLRRTLAGHDALVFMRDALVKMSLELNRVALDVSRGHKTQYRSSAKAELRAIEYEIEQLKQQGLGEREPEMLALTVQVLRRLRNAARIVDKLAQHTEARSDAIPTSMLRIDKSLTQFISRQELRLGMITSNLRLDSPHFRYAIRVTLAAALAMTLIGIWLAPNMAAHSYWVLLTIVIIMKPGFALTRQRNGWRLMGTLVGCILALILFTLTNNPTILFAVLLGACIMGNSLVQLNYMASAIFNTLFVVLVFHFVAPGTVSLEVIGEQAMDTALGCALALICSYVLPWWEARYMKPLARAASRANREYLRAGLRYIEAMRQPAPGGAAARRRARKRPRPASAPTPTPTWPGLAWPGLAWRLGRKNVHIAFSNFAEAFYRMMSEPTQHQVSVPEFNNLLVQNHILASQITAVVPILVGLPHTPPAVQQALDAMMDLLDPARKPPAALPAQFDTEGEQAALAYPLKQMLRACVMIRQELAGVADPEDPRPAPASA

SEQ ID NO: 51304 - protein, 242 aa, Bordetella pertussis
MSMVEFHNVTKKFGDSTVLDGITLDIDAGEVVVVVGPSGSGKSTFLRCINVLETINDGDLLVGGQSVKGDAAQVREIRREAGMVFQQFNLFPQMTALENVMFGPVHTRGAARAEARRQAEELLGKVGLAERMNHYPSELSGGQQQRVAIARALAIKPKLMLFDEPTSALDPELRHEVLKVMRDLAEEGMTMIVVTHEMEFARKVGSRLIFIDCGKIAHDGPPAELLSNPPSQRLKDFLQHVS

SEQ ID NO: 51305 - protein, 759 aa, Bordetella pertussis
MAFPGLKYASSGLLAALRLGRRTGKKGRTPPSPSPGAQEAVDAAASPVASLAPLTEIISTYLDPKEVERVREAYRFADQAHLGQFRASGAPYISHPIAVTEICAGWKLDANALSAALLHDVMEDQGVGKHELAEKFSPEVAELVDGLSKLDRLDFATKAEQQAESFRKMLLAMARDVRVILIKLADRLHNMRTLDAVNPEKRRRIARETLEIYAPIAHRLGLNLLFRELQDLCFAAMYPNRYQVLYRAVLAARGNRREVISKIEDAVRAALPAAGIEAEVTGREKTLYGVYRKMTEQKKSFSEVLDIYGFRVIVHTLPECYLALGTLHQLYRPVPGKFKDYIAIPKVNGYQSLHTTLVGPYGTPVEFQFRTRDMHHIAEEGVASHWLYKDADLTLNELQKRTHQWLQSLLDIQSQTGDSGEFLEHVKVDLFPDAIYVFTPRGKIISLPRGATPVDFAYAIHTDIGNQAVAAKVNGEFVPLRTELSSGDTVEIITSPASRPNAQWLNYVRTGRARSEIRHYLRTVKYEESVAFGERLLEQAMIELHLPVPSTDDPQWDKLARSSGTSSRDEILADIGLGKRLAAVVARRFAPEHDLIATTAAAVDQITSARAAPILIQGSEGQAVQLAPCCGPLPGDPIIAGMRLGHGLVVHTSDCPVALRARAREPERWINVAWDAQTAKHLPTRLDIVTRNERGVLGRLAAEVTAADANIVHVTMHDDAVSTVSLHLTVQVDSRKHLAQVIRAIRHVPQVQKIVRVKG

SEQ ID NO: 51306 - protein, 734 aa, Bordetella pertussis
MPDPAHFSPAHSRRLRFFAHVLHLLGALFTQHALAQEARTGNDIAQLPAISVTGREISDLTEGTNAYTTEAMSTATGLTLSPRETPQSVSVVTRQQIEDQGLTDTGAILATAPGISVTRSDSNRYSFSARGFTIDNFQFDGLVSPILSQWNYGSTDMDAAIYDHVEIVRGATGLMTGSGNPSAAVNFVRKRPLREFAATFNASVGSWDYVRGDADISVPITEDGRIRSRLVAAYSQGDSYVHFLDTRRRTFYGVVSADLTPDTVLTTSVEYQHNHSNGFGSGFPLFYSDGSRTDFNRSVANNAPWARQDTEATTYFVDLTHRFTNDWKLRAAYSHTDGRYLMKHVYRGGYPDRHTGIIAAPPAFSNYDGNLDRDDIHFSLSAPFEAFGLRHEVALGWMSIDNHSDIQRYAMVGPAPAIGSFFDWRRAHIQEPSWADTLSPADDVRTKQTGAYLVGRFALAEPLHLIVGDRWSDWKTKQMYFGSRREYRIKNQFTPYAGLTYDINDTYTAYASYTEIFQPQNARDTSGGILPPIKSKSYELGLKAAYLEGRLNTSAALFQTRQDNLAQVIPGSSIPGFPNMQASRAASGAKVEGIDLEASGQILPDWNIGASYTHFTTKDASGNPINTNHPRSLFKLYTTYRLPGALHRLTVGGGVDWQSRMYQAAASPRGNVEVEQDSYALVSLMARFDFNKKLSATLNVNNLFDKKYYDQIGFYSQGWWGAPRNVMLNLRAQY

SEQ ID NO: 51307 - protein, 246 aa, Bordetella pertussis
MLRGRRRLAWRRKSADTGCAPMAARKNMGNFVSEILFGYTTLISIINPLGLAFVFLNKTATLTPEERARLAYSVALNAMFLLLVTFFIGAYILHLFGISLEALRVAGGLSVAVSGWAMLNAPEPHPQAQALQQITPSMAREMVFFPLTMPLTTGPGTVAATIALSANRTNELRDFLLASLASVLITMAVAATVYLAYSRAGTLARYLGADGTRIVTRVSAFLLLCVGVQIMLTGLEQFLRPIIGHG

SEQ ID NO: 51308 - protein, 451 aa, Bordetella pertussis
MLDPILLRKDLQTVVDRLKSRGVDFDIARFNELESRRKAVQTETESQQARRNALAKQIGQLKGKGAPEAEVQAVMAESQALPARLKALEDELAQTQAQLNDLLMSVPNLPHASVPQGASSDENVEVRRWLPGAADERGIPAALGFEVRDHVAVGEPLGLDFDLAARLSGARFSFMRGQMARLHRALAQFMLDLQTGTHGYTECYTPYIVNSSTLFGTGQLPKFKDDMFFVTKGGGDDEPKVDEQGNPLAREDQYLISTSEITLTSVVRETIVAGADLPLRLTAHTPCFRSEAGSGGRDTRGMIRQHQFDKVEMVQIAHPEHSYEALEEMVGHAERVLQLLELPYRVMLLCTGDMGFGSAKTYDLEVWLPAQDTWREISSVSNCETFQARRMQARFRNAQNKPEYVHTLNGSGLAVGRALVAVLENCQQADGSVRVPAVLQPYMGGLTVLEP

SEQ ID NO: 51309 - protein, 496 aa, Bordetella pertussis
MPSDYSIAQLHCPDPVPFEAFDSAVAATDRLIELYRRNTGFVRELFHEVVGGRELSGRVRAYYPAIRIGVQTYDPIDSRLSYGHVAEPGEYQTTITQPHLFRDYLIEQIGLLLQNHRVPVEVGESDMPIPLHFAFPDGTYVEGEHIENLRRPLRDLFDVPDLAVTDDAIVNGSWRGQPGEPRPLAPFTATRVDYSLHRLQHYTATAPTHFQNFVLFTNYQFYVDEFCVWARGLMASGGGDYDALIEPGNRITRRGDQAPVEAAAVRLPQMPAYHLVRPNHSGITLVNIGVGPSNAKTITDHIAVLRPHAWLMLGHCAGLRDSQRLGDYVLAHGYVREDHVLDADLPTWVPVPPLAEVQVALEQAVEEVAGLSGWELKRIMRTGTVATIDNRNWELRDQGELVQRFAQSRAIALDMESATIAANGFRFRVPYGTLLCVSDKPLHGELKLPGMASAFYRRQVNQHLEIGIRALERLREMPPERLQSRKLRTFMETAFQ

SEQ ID NO: 51310 - protein, 446 aa, Bordetella pertussis
MSNDLFASDPAHRPYVPLAERLRPRTLSDVVGQSHLLGPDKPLRVAFDSGRPHSMIFWGPPGVGKTTLARLMADGFDAQFIAISAVLGGVKDIRDAVVTAQVAQGQGRRTILFVDEVHRFNKSQQDAFLPYVESGLFTFIGATTENPSFEVNSALLSRARVYVLQSLSAEELMQLVDRAVAALNEGLEDGQQIRFEAEAREQLAAWADGDARRLISAVEVVAESAQAAGRDSVDAAWLETSLSQNLRRFDKGGDAFYDQISALHKSVRGSDPDAALYWLARMLDGGADPKYLARRLVRMAIEDIGLADPRATELAVNGADIYERLGSPEGELALAQAVVYMACAAKSNAVYNAYNAARKFAAEHGSAPVPLHLRNAPTKLMKQLGHGKAYRYAHDQPHAYAADEQYFPDGLNPTFYRPTDRGLEAKIQQKLAFLDELDAQERARKR

SEQ ID NO: 51311 - protein, 308 aa, Bordetella pertussis
MIRSMTAFGNARADLEQGSLALELRSVNSRYLDLYFRLPDELRHVETPLRELLTAKLARGKVEVRVSYTRAASTELSTLDPQWLRSLAAQLDNARAVLPEVAAPRLVELFNWPGQRGNDALDPQAWGAACMQAAQQALAQMQEGRAREGERLAAMMRECADGVGRIVDGVETHLPQLLADHREKLALKLREAVESAFPGGFAHITGPELSERLTQEATLFALRIDVAEELSRLRSHLEELRHLLGDGPAKSDAKRGGSAGKRLDFLFQEMNREANTLGSKAGSLEVTRAAMDLKLLIEQMREQAQNLE

SEQ ID NO: 51312 - protein, 789 aa, Bordetella pertussis
MSRMPRISNATPRASRNTRNGPSPFQARISALLREARWILFAALAAWLTLVLATWSPADPGWSHSVSGDAIHNGGGTLGAYLADILLYLFGFSAWWWVVLLLHRVRAGYRRLASNLRVTSGKQPDALPRVHWEEGIGFVLLLTGSLGIEALRLYSWGMHLPGGTDGESGAGGVIGQMLAGWLSRGVGFTGGTLALLVLLAVGLSLFFSFSWLQIAERVGSWLEGLVRRVRDSYAAREDRKVGEVAKAVRTEQVVAKQEKLVHEQPVRIEPAITVVPRSDRAEKEKQQSLFAPPAGESDLPAIGLLDPPLQNQETVSAETIEFTSRLIEKKLADFGVSVVVVAAQAGPVITRYEIEPATGVKGSQIVNLAKDLARALSLVSIRVVETIPGKNLMGLELPNPRRQMVKLSEILGSQTYHASHSVLTMALGKDIAGNPVVADLAKMPHLLVAGTTGSGKSVGINAMILSLLYKADASHTRLILIDPKMLEMSVYEGIPHLLAPVVTDMRHAANALNWCVGEMEKRYRLMSKMGVRNLAGYNSKIRDAIKREEPIPNPFSLTPDAPEPLQALPHIVVVIDELADLMMVVGKKIEELIARLAQKARAAGIHLVLATQRPSVDVITGLIKANIPTRIAFQVSSKIDSRTILDQMGAETLLGQGDMLYMPPGTGLPVRVHGAFVHDDEVHRVVEALKAQGEPNYIDGLLEGSEGETGDGLSSVTGMGDAESDPMYDQACEVVLKHRRASISLVQRHLRIGYNRAARLLEQMEQAGMVSPMQSNGNREILVPAREEA

SEQ ID NO: 51313 - protein, 233 aa, Bordetella pertussis
MLRRFASRAEAAASHSTMLPMSAEILNPNLRRVVLASNNAGKLREFSALFAPLGIELVPQSELGVSEAEEPHATFVENALAKARHASRHTGLPALADDSGLCVVALGGAPGVHSARYAQQPGGARSDAANNALLVRELAAAGDRRAWYVALLALVRTENDPCPLIGEGLWHGEIVDAPAGEHGFGYDPHFYLPQQGCTAAQLAPEHKNRISHRAQALAQLLDKLRATGPVDRP

SEQ ID NO: 51314 - protein, 499 aa, Bordetella pertussis
MRDLARILLACLLPVGQPRPSTLLSYGDDMASPKDVLKQIADNEVKFVDFRFTDTLGREHHVSVPTSAVDEDKLESGQAFDGSSIPGWKGIEASDMLLIPDLDTANLDPFREEPTLILSCDVVEPSDLKGYDRDPRSLAKRAEAYLKSSGLGDTAYFGPEPEFFVFDGVTWNTDMSGTFVKIKSEEAPWSSGLEFEGGNMGHRPGPKGGYFPVPPVDSFQDMRSEMCLLLEQMGVPVEVHHHEVAAPGQLEIGTKFSTLVQRADWNQVMKYVIHNVAHVYGKTATFMPKPIVGDNGSGMHVHQSIWKDGQNLFAGNGYAGLSEFALYYIGGIIKHARALNAITNPGTNSYKRLVPHFEAPVKLAYSARNRSASIRIPYVGNPKARRIETRFPDPLANPYLAFSALMMAGLDGVQNKIHPGDPADKNLYDLPPEEDAKIPTVCASLEEALAALDKDREFLTRGGVFSNDMLDAYIELKMGEVTRLRMTTHPVEFDMYYSL

SEQ ID NO: 51315 - protein, 721 aa, Bordetella pertussis
MANSPTPLSAQAGLPAASPSLPAATPHRAFGLWSRALAGPALRDTLRKLSPAAQLRNPVMFVVYAGSILTTLLWLLALAGLAEAPAGFILAVAAGLWFTVLFANFAEALAEGRGRQQAAALRGLRTTIEARVLTGFRDSDAAAALPPYWRSRATSRPSGALRRDDVVLIEAGETVPGDGQVIAGIASVDKSAITGESAPVIRAAGSDFCSVTGGTRVLSDWIFVRIAADPGDSFLDRMIAMVESARRQKTPNELALTILLVGLTLVFLLVVASLLPFSMYAVSASGAGQAVSITVLVALLVCLIPTTIGGLLSAIGVAGMSRMMRANVIATSGRAIEAAGDVSVLLLDKTGTITFGNRQAAAFVPAPGVSPAVLAEAARLASLADETPEGRSIVALAERILDTRSEAPAGARFVPFSAQSRMSGVDLDGRLIRKGAADALARWLGEGQGGLPAAVARDVDDVARRGSTPLVVAEGGQALGVIELKDIVKPGIQPRFAALRRMGIKTVMITGDNALTAAAIAAEAGVDDFLAEATPQAKLELIRACQADGHLVAMTGDGTNDAPALAQADVAVAMNSGTQAAKEAGNMVDLDSNPTKLIEIVEIGKQMLMTRGALTTFSVANDVAKYFAIIPAAFMAVYPQLAQLNVMGLATPASAILSAVIFNALIIVALIPLALKGVRYRPLGAAVLLRRNLLVYGLGGLLAPFAGIKLIDMALAALGWT

SEQ ID NO: 51316 - protein, 355 aa, Bordetella pertussis
MTNVDAFDLLATSVFLLNERGHIEYANAAAEDLFGRSRKQLRGLSAATLFDNPEDLQSAIDSAAAGKFADVRQLASLRRVVESVEVTVTTVSLSGQAWPVLIETREIEQRVLADRNQRLVDEIESHRELLRNLAHEVKNPLGGLRGAAQLLEAELPSAALAEYTQVIITEADRLQALVDRLSGPQRVPLAARPVNIHEICERVCALIQAEFRDAVELVRDYDASVPELRGDAARLMQAVLNVARNAAQELVQQKPGADVPAPRVVLRTRVARQVMLAHRQHRLALVVSVLDNGPGVPEHIRERIFHPLVTARAGGTGLGLSLAQDFVQQHGGIIEFESRARHTEFRLVLPMEPPL

SEQ ID NO: 51317 - protein, 199 aa, Bordetella pertussis
MTMHPPLPPAGRPLRAALVIFLALSVLVGLLYPLATTGVARLLWPFQAGGSLLEQDGRVVGSALIGQSFTDPRYFWGRPSAIAPMPYNAAASGGSNLGPANPALAQAVRARIAALRAADPGNPAPIPVDLATASGSGLDPHISPAAAGYQAARVARARGLPTATVEQLIARHTERPVPDILGEPVVNVLALNLALDRLR

SEQ ID NO: 51318 - protein, 898 aa, Bordetella pertussis
RLDPDRLLQTLEQAQSDARRGRLRIYFGACAGVGKTYAMLAAARAQAAQGVDVVAGLVETHGRADTAALLDTLPALPLQTLDFQGRRLREFDLQATVARRPRLLLLDELAHTNAPGARHAKRWQDVEELLAAGIDVWTTLNVQHLESLNEAVGGITGVRVRETVPDSVFDAADEIILVDLSADELLRRLREGRVYVPEQARHASRHFFRKGNLIALRELALRRTAEHVDDDVRAYRHERAIEPVWRTREAVVACIDADPHAEHVLRSAHRLAQQLDCEWHAITIEAPRVAPLPRAGRARLDQALALAETLGAHVETVAGTDMVDAATRYMRRHNITKAVVGRDAWRRRGLSGLLDAALTPGRLLRRRSFADVLASACPEADIVRVGAPSAATAAPRRDPRSWRNASAPAGHAAAGAYLWALAYCAAATLASRLAFPVLHQTNIVMIFLLAVVAAALRHGRGPAALASVVSVALFDFFFVQPLASFAVSDVQYLLTFAVLLTVGLLIGQLTAGLRQQARAAARREADARGLYEFARELSAALQPEQIAGAASAFLNAAFGARGALYILGLDDRLRLAPGAGDAALEPTLAQWAFDHGQACGAGTDTLSNSPVLYLPLRAPMRVRGVLALHHAGPPLYSAAPARRQLDAYATLIAIAIERLHYVEVAQQALLSIESERLRNALLAAVSHDLRTPLTSLLGMAETLQRSPAAMTPAALETVAAMQDQARRMHALVVNLLDMARLQSHDAPLRRQWQSVEELVGSALAAMNAALQDRPVTVAPLSALPLVKCDGILIERVLCNLLENAAKYTPPGSAIHIDALADAHTLQVRVADDGAGVAQADRQRIFEKFARGQRESGPPPGAGLGLAVCRAILDAHQGRIWVEPARRLRGACFVFALPL

SEQ ID NO: 51319 - protein, 418 aa, Bordetella pertussis
MSYQHIKVPTGGQKITVNADYSLNVPDQVIIPVIEGDGTGADITPVMIKVVDAAVQKAYAGKRKIHWMEVYAGEKATKVYGPDVWLPEETLDAVKDYVVSIKGPLTTPVGGGIRSLNVALRQQLDLYVCLRPVRYFKGVPSPVREPEKTDMVIFRENSEDIYAGIEYMAESEQAKDLIQYLQTKLGVTKIRFPNTSSIGIKPVSREGTERLVRKALQYAIDNDRASVTLVHKGNIMKFTEGGFRDWGYALAQNEFGAQPIDGGPWCKFKNPKTGREIIVKDSIADAFLQQILLRPAEYDVIATLNLNGDYISDALAAQVGGIGIAPGANLSDSVAMFEATHGTAPKYAGKDYVNPGSEILSAEMMLRHMGWTEAADLIIASMEKSILSKKVTYDFARLLEGATQVSCSGFGQVMIDNM

SEQ ID NO: 51320 - protein, 641 aa, Bordetella pertussis
MSKIIGIDLGTTNSCVAVLDGGQVKIIENAEGARTTPSIVAYMDDGETLVGAPAKRQAVANPKNTLYAVKRLIGRKFDEKAVQKDIDLMPYSIVKADNGDAWVEVRGKKLAPPQVSAEVLRKMKKTAEDYLGEEVTEAVITVPAYFNDSQRQATKDAGRIAGLEVKRIINEPTAAALAFGLDKTEKGDRKIVVYDLGGGTFDVSIIEIADVDGEMQFEVLSTNGDTFLGGEDFDQRIIDYIISEFKKEQGVDLSKDVLALQRLKEAAEKAKIELSSSQQTEINLPYITADASGPKHLNLKITRAKLEALVEELIERTIEPCRVAIKDAGVKVSDIDDVILVGGMTRMPKVQDKVKEFFGREPRKDVNPDEAVAAGAAIQGSVLSGERKDVLLLDVTPLSLGIETLGGVMTKMIQKNTTIPTRYSQTFSTADDNQPAVTIKVFQGEREIAAGNKGLGEFNLEGIPPAPRGLPQIEVTFDIDANGILHVSAKDKGTGKENKITIKANSGLSEDEIQRMVKDAEANAEEDHRLAELAQARNQADALVHATRKSLTEYGEKLEAAEKESIEAAIKDLEDILKTGDKAEIDAKVEALSTASQKLGEKMYADMQAQQQAQQQQAADNAKPVDDNVVDADFKEVKRDQ

SEQ ID NO: 51321 - protein, 1035 aa, Bordetella pertussis
MILSAPFIVRPVATTLLCLGVVLAGLLAYRLLPVAPLPQVDIPTISVSASLPGASPETMASSVATPLERSLGSIAGVTEMTSRSSQGSTRITLQFDLSRDVDGAARDVQAAINAARSLLPTSLRSNPTYHKANPSAAPIMTLAMTSATLGQGKLYDLASTIVAQKLAQVNGVGEVTVGGSSLPAVRVNLIPGALANRGVSLDEVRQALSSANANRPKGMVENDQYHWQVMASDQLDRAEQYRPLIVAWRDGAAVRLSDVASVEDSVEDLYQTGFYNDRKAILMIVRRQADANIIETVDAVRAQLPQLAALLPGDVDLTVAQDRTPSIRASLHEAELTLVIAVGLVVLVVLLFLRRLRAAFIPSVAVPVSLIGTFCVMYLCGYTLNTISLMALIVATGFVVDDAIVVLENIMRHIERGATPMRAALRGSREVGFTVLSMSLSLVAVFIPILLMGGVAGRLFREFAVTLSASILVSLVVSLTLTPMMCARLLRAEPAAPRPPGRIGRLWTRLYGGMQGGYERSLGWALAHARLMMLILAATIGLNVYLYMVVPKGFFPQQDTGQLLGFFRGDQGTSFQATVPKLEYFRKVILADPAVQSVTAYAGGRGGSNSSFMQIQLKPLEERGVSADTVINRLRGRLQNEPGARMFLVAQQDIHIGGRQSSGSYDYTLMSGDLALLREWMPRVQRAMAALPEITDVDADVEDKGRQIDLVIDRDAATRLGVSMATISAVLNNSFSQRQVSVIYGPLNQYHVVMGVDPRFAQDIESLKQVHVIAADGQRVPLAAFAQLKVANAPLSVSHQGLFVADTISFSLSPGVSLDQATGAIDAAVARIGLPSDQIQAGFQGTAAELQKTLARQPWLILAALVTMYIVLGILYESLVHPLTILSTLPSAGIGALLALMLLGHEFTLIALIGVFLLIGIVKKNAIMMVDFALEAERRDGLDARAAILRACLTRFRPIMMTTMAAIFGALPLMLASGPGVEMRRPLGITIVGGLVLSQILTLYTTPVVYLYLDRFRLWAARRRAARSAPDPTRP

SEQ ID NO: 51322 - protein, 267 aa, Bordetella pertussis
MTIPSFGVGTFRLTGQTVIDSVRNAIDLGYRAVDTAQIYGNETEVGQTIAESGVARSELFVTTKIWTDNYARAKLLPSLRASLEKLRTDYVDLTLIHWPAPGNGVALPEHMEALAEAKALGLTRRIGISNFNIALTRQAIAAVGQGEIATNQIELSPYLQSARLTAFLREQGIAVTSYMTLAYGKVLKDPVLARIADKHRSTVAQVALAWALQQGYAVIPSSTKRENLASNLLARGLALDADDMARIAALERNGREVDPEGLAPAWD

SEQ ID NO: 51323 - protein, 416 aa, Bordetella pertussis
MPESRSVAPPARQGRRRLIAAAIAVLAVLALAWWLWPKDTGGQQGRPGGRGAMRGGPASMMNMAVPVRVGEARTQDIQIVLRALGTATAYNTVTVRSRVDGELVKVAFQEGQHVKAGDLLAQVDPRPFEVALAQAQGQQQQNLAQLENARRDLQRYQTLYKQDSIARQQLDTQAALVRQYEGTIKSDRAAVDSARLQLDFSRITAPIAGRLGLRQVDQGNLISSGDANGLVVITQTQPIAVVFTLPETQLPEVLAQLRAGRQLPVEAYDRADTRRIASGQLETVDNQIDVATGTVKLKARFDNAEEALFPNQFVNVRLYVETRSGMTAIPNAAVQQGSAGAFVFLAQPDDTVSVRQVKLGAINGDWVAVNEGLQPGDKVVVEGMDRLRAGARIEIVTGTTPEAAAPVNTGAPRRTP

SEQ ID NO: 51324 - protein, 253 aa, Bordetella pertussis
MASVILYEYPFNERIRAYLRLEYLFDRLFFFAREGDARLHQIAVSSLFDLLDASERTDIKGAVLQDLERQRMALVGLRDHPGVAQDALEAMLRDMERVVAALAAQGKTGQALRENEWLVSLRGRLAVPGGATQVDMPSYHAWQNKPESVRCADLQSWLAPLLPLHEGLSMALRLLRESGRRADIAAEQGGYQQMLAGKIYHLLRVWVDPSLGVFPEISANKYMVWIRFSTQDGEVKPQQVSRDVAFQMSLCSS

SEQ ID NO: 51325 - protein, 269 aa, Bordetella pertussis
MTQATPQRIAIAGASGRMGQMLIEAVLDTEGVELAVALDRAGSPSIGQDAGAALGRPCGVTITDQLDALAQADCLIDFTRPEGTLQHLQACLRHDVKMVIGTTGFDSSGRAEIKVAAQKIAIVFAPNMSVGVNATLKLLDMAARILNSGYDVEIFEAHHRNKVDAPSGTALIMGETVASAWDVALPDVATWTRHGDTGVRKPGTIGFSVVRGGDIVGDHTVFFCGTGERIEISHRSSSRATYAQGAVRAARFLARQDNGLYDMQAVLGL

SEQ ID NO: 51326 - protein, 351 aa, Bordetella pertussis
MSTVPARIEPVAPLAPQAQDLRCFNTLGLASHAPAFVALTEPSQLPALSALAPRFRQLVVLGGGSNVVLPASIDGLVAQVRLPGVRLVGQCADAWVVEAAAGENWHGFVTACVDNGWDGLENLALIPGTVGAAPVQNIGAYGVELADRFHSLTAWDVKGGRWVEMGAAECRFAYRDSFFKHQEPGAWVIGSVRFALPRPWQPVLDYPDLQRHAALDGAAPTARAVYDAVCAIRRAKLPDPAVVGNAGSFFKNPLVDAGTRQALLGRFPGLVSYPQPDGRYKLAAGWLIDQCGWKGRQLGAAGVHDRQALVLVNRGGAQARDIMALAAAIQGDVERRYGVRLEPEPVVVPAR

SEQ ID NO: 51327 - protein, 186 aa, Bordetella pertussis
MLRSSVVFLTCFHPLDKEHYMAKPTKNSSAAPRINIGISDKDRAAITGELSKLLADSYTLYLMTHNFHWNVTGPLFNTLHNMFMAQYTEEWNALDSIAERIRALGHYAPGTYREYAKLSSIAEPDSVPDALEMVRMLVKGNEAVAKTARAAFDKADAANDQPTADLLTQRLDVHEKNAWMLRSLLQ

SEQ ID NO: 51328 - protein, 261 aa, Bordetella pertussis
MLPGDTPLRPADFIGLAPISPRPVAAGAPLISVIICARDAAPYINNALQSIQAQTYPNIEIIAIDDGSTDNTFQHLSAAAAQNSRINIARTKNHGVYAARNMALQRAKGEFITFLDADDIMLATRLQDQAALLQASGACAAVSRLLRLTADGQLAAPRVFPFVRHNPCSLMIRRDALAVIGQFEEMRFGADEEYEHRMQVLLGFHSIARSRAVQTVALHRPQSLTQHGATGLGSDQGRQRRIAYRETWMRRHASLAPLRTP

SEQ ID NO: 51329 - protein, 508 aa, Bordetella pertussis
MTANEFILALDQGTTSSRAIVFDRAGTVRGMGQREFRQHYPRPGWVEHDAGEIWQSQLEVAREALRNAGASAADLAALGITNQRETTLIWERATGRPLARAIVWQDRRTAAMCEKLLHDGHGRMLQERTGLVVDAYFSGTKLAWLLDHVPGARKMAERGELAFGTMDTWLVWQLTGGAVHSTDPSNASRTMLFDLHAQDWSDDILALLNIPRGILPRIAPSSARIGETLPEWLGGSIPIAGVAGDQQAATFGQACFTPGMAKNTYGTGCFMLMNVGDAPVASRHNLLSTVGWSLPAGNATHATYMVEGGVFMAGAAVQWLRDGLGIIQRSADIEALAASVADTDDVFMVPAFAGLGAPHWDPYARGTLVGMTRGTTRAHIARATLESIALQSAELLSCMNADSGIPLSELRVDGSAARNDLLMQMQADLLGVPVVRPRVPESTALGAAGLAGLAVGFWSSLDEFGAQWQAERTFEPAWPADVREARMQRWRQAVELSKGWSRPAAGHA

SEQ ID NO: 51330 - protein, 248 aa, Bordetella pertussis
METAMDQDTIISLRNVCKGYRSKKGIRRILDDVSFDFRGGENLAILGGNGSGKSVLLRMICGMELPDSGTVQRAVSISYPLGFAGGISSNMTGRDNVRFIARIYGCDVPDVERFVYDFSELGRSFDLPVVTYANSMRARLSYGISMALRCDVYVVDEMAAVGDVNFKRKCLEVFAERSRGATIIMAANAPTTVRRFCSHGVIMQHGAMAHYGPLDETIARYTQSAPAPAPAPAAEAEPAVDTVDAEQS

SEQ ID NO: 51331 - protein, 341 aa, Bordetella pertussis
MHKKIVVPSATDMATRFTQDSFVFDCLSMYYVIDDPWAENCLAAGVNATNVTFGTEQPWDIVLRDFDSGLEKIERSPYLALATNRQEIDAANKQGKLAVIIGTQGSAMVDLEFHRLRTMHRLGMRYFGLAYTGPTMFADGCGESRNAGLSFAGIELIDACNDLGLILDLSHVGHRSREEAVARSRFPVYTHSNSYALNPNDRNTTDETARAIRAKGGIMGICGLPKTVHPENATLNELLDHADHWVKTIDAAHVGFGLDFVEAYKSDRSTMPAASRLWRTRRPDIFGTVEEFHLQDYPLGIASIKQLPNLTQGLFDRGYAEKEVAGIIGGNWLRHFTEVYG

SEQ ID NO: 51332 - protein, 642 aa, Bordetella pertussis
MGTMVVVILGSATLLGAVTYFGKWKYLWTEWFTSVDHKKIGIMYIIVALVMLLRGFADAIMMRTQQAVASADSAGFLPPHHYDQIFTAHGVIMIFFMAMPFITGLMNIVVPLQIGARDVAYPFLNSLSFWLFMVGVVLLMLSLFVGEFAATGWLAYPPLSGLDYSPGVGVDYYLWALQLSGLGTTLSGINFIVTIMKMRAPGMALMKMPVFTWTALVTNILIVAAFPVLAATLALLTLDRYLDMHFFTNDLGGNVMMYVNLIWIWGHPEVYILVLPCFGVFSEIVATYSKKTLFGYKSMVYATASIGVLSFLVWLHHFFTMGAGANVNAFFGIMTMIISIPTGAKVFNWLFTMYRGRVEFSLPMLWTIGFMIIFVIGGMTGVLMAIPAVSFVLHNSLFLVAHFHNTIIGGVVFGCIAGMVYWFPKAFGFKLNERLGKYSFWCWFVGFFLTFTPMYLLGFKGMTRRLNTYDNPEWQPYLLVALVGATLIMLGIFFLLQQVFVSIRDRKENMDVTGDPWGGRTLEWSTSSPPPFYNFAHVPHIDSLDQFWEDKENGRAYQRPAKYEDVHMPRNTAAGIYIGAFGLAMSFGLIWHMWWLAIVGFLGMIVSFVVRSYDRDVDYYVPAKEVEEIENAYFGKLQQKAA

SEQ ID NO: 51333 - protein, 304 aa, Bordetella pertussis
MKHPHLTTIARTLGVGAVLLLGGCTLEVLSPKGDIGAQEKTLILTALGLMLIVVVPVILMTLYFVWKYREGSVHAQREYAPKWSHSNAIEAVVWTVPCIIVAILAVLTWKSSHALDPYRPIESDVKPVNIDVVSLDWKWLFIYPDYDIATVNEIVFPVDAPVQFRITSASVMNSFFIPQLGSQIYSMAGMETKLHLIAREAGSYDGLSANYSGAGFSGMRFKAIATTDQGFEDWIARIRATNNPLTPQAYADLAKPSERTPVTLYSTAPTGMFDFIMHNQMSKLAGVDPFNCTPATKNLIATAE

SEQ ID NO: 51334 - protein, 231 aa, Bordetella pertussis
MDYVFPPSPPAAVPVAGGNARFPVRRVYCVGRNYAEHAKEMGFTGREDPFFFCKPADAILSVGDGATGEMPYPPKTANLHYEMELVVVLGKGGRDLTVEQADECVWGYALGLDMTRRDLQGEAKKQGRPWEVGKAFDLSAPLGPIHPRSAVGTLDKGAIWLDVNGERKQSSDISQMIWNIPESIAYLSGLFELQPGDIIFTGTPEGVGAVVKGDVIVGGVEGLGELRVRIA

SEQ ID NO: 51335 - protein, 314 aa, Bordetella pertussis
MAAVERLTIATRASRLALWQAEHVRDLLRARYPACSVELLTLTTRGDQILDRTLSKVGGKGLFVKELETALLDGRADLAVHSLKDVPVDLHAPFELSCVLERADPRDAFVSNDYGSLADLPPGAAVGTSSLRRESQIRARYPHLVVKPLRGNLDTRLGKLDNGDYAAIVLAAAGLERLGLAARIRALLEPDDSLPAAGQGALGIEILQGRADVRAMLAPLGDAATLACVTAERAVSRMLGGSCQVPLAAYARIDGDELALRALVAAPDGRRIVRAERRGPRDQAQAIGESAARDLLADGADAILAELLPTSPAP

SEQ ID NO: 51336 - protein, 293 aa, Bordetella pertussis
MSILINKDTKVITQGITGKTGQFHTRMCREYANGKAAFVAGVNPKKAGEDFEGVPIYANVKDAKADTGATVSVIYVPPAGAAAAIWEAVEAELDLVICITEGIPVRDMLEVKNRMQAMNSKTLLLGPNCPGLITPDEIKIGIMPGHIHRKGRIGIVSRSGTLTYEAVAQVTELGLGQSSAVGIGGDPINGLKHVDVLKLFNDDPDTDAVIMIGEIGGPDEVNAAQWAKDNMKKPVVGFIAGVTAPAGKRMGHAGALISGGADTADAKLEVMEACGIRTTRNPSEMGKLLKSVL

SEQ ID NO: 51337 - protein, 386 aa, Bordetella pertussis
MNTSTPTDDVSWIRRALALARSVMYSTAPNPRVGCVIVRDGQVLGEGATQPPGGPHAEVCALREAAARGASLAGATVYVTLEPCSHFGRTPPCVDALVAAAPARVVVAMGDPNPRVNGQGLARLRAAGIAVTEDVCRDEALELNAGFAARMSRGLPWVWLKLATSLDGRSALHNGVSQWITGEAARADGHHWRARSGVVLTGMGTVLKDDPQLNARAVQTSHPPRKAVIDGRFEIPEDARLFDDGAQVLIFTARSDAAKARRMADRNARVIELPGVRPDRVDLPAVMRWLASQEINEVHVEAGAGLSGALLAEDCVDELLVYLAPVLLGDAAGMVRLPLLEHLDGARRFEFAELAPVGTDVRLRARVASRWRALQDSVSAASRQRG

SEQ ID NO: 51338 - protein, 415 aa, Bordetella pertussis
MFNRNLTLDQVDPDVWAAIQKEDVRQEQHIELIASENYASPAVMQAQGTQLTNKYAEGYPGKRYYGGCEYVDVVEQLAIDRLKQIFGAEAANVQPNSGSQANQGVYMAVLKPGDTVLGMSLAEGGHLTHGASVNASGKLYNFVPYGLDADEVLDYAQVERLTKEHKPKLIVAGASAYALHIDFERMARIAHDNGALFMVDIAHYAGLVAGGAYPNPVPHADFVTSTTHKSLRGPRGGVIMMKAEFEKAVNSAIFPGIQGGPLMHVIAAKAVAFKEALSPEFQDYAQQVVKNAKVLADTLVKRGLRIVSGRTESHVMLVDLRPKGITGKEAEAVLGQAHITVNKNAIPNDPEKPFVTSGIRLGTPAMTTRGFKEAEAELTANLIADVLDNPRDEANIAAVRARVNELTARLPVYGN

SEQ ID NO: 51339 - protein, 517 aa, Bordetella pertussis
MNWGGGDFQFLKSGSDEPCIQPIESSHLACRTPRRMNAMTNKTLTTAAGAPVADNNNTMTAGPRGPALLQDVWFLEKLAHFDRERIPERVVHAKGSGAYGTFTVTHDISRYTRARIFAEVGKQTPLFLRFSTVAGERGAADAERDVRGFAIKFYTDEGNWDLVGNNTPVFFIRDPLKFPDFIHTQKRDPKTNLRNATAAWDFWSLNPESLHQVTILMSDRGLPQNYRQQHGFGSHTYSFVNDAGERFYVKFHFKSQQGIACYTDGEAAELVGRDRESAQRDLFQNIEQGQFPRWTLKVQVMPEAEAATYHINPFDLTKVWPHADYPLIEVGVLELNKNPENYFAEVEQAAFTPANVVPGIGFSPDKMLQGRLFSYGDTHRYRLGINHHQIPVNAPRCPFHSFHRDGMGRVDGNGGATLNYEPNSFGEWREAKHAAEPPLALDGQAADRWNHRVDEDYYSQPGALFRLMNDDQKQQLFGNIGRHMAGVPEEIQRRQLEHFRRADPAYAAGVAKALGLK

SEQ ID NO: 51340 - protein, 188 aa, Bordetella pertussis
MATFNRRPPSAARAGRRTANPDDEFETLAQSRDDAAAPSRPGRTLKARAVGYLSRREYSRLELARKLQPYAEEGDDIEAVLDDLQREGWLSNARFAQSLAHRRAPRQGASRIVQELKQQGVADDQVAELREQLRATEYARALAVWQKRFGEKPADRAAYARQARFLAGRGFAHDVIRRILGGGDDELD

SEQ ID NO: 51341 - protein, 409 aa, Bordetella pertussis
MSHPEAPITPEVEADLAIARRGCDELLVESEFARKLARSRATGVPLRIKLGLDPTAPDIHLGHTVVLNKMRQLQDLGHNVIFLIGDFTSTIGDPSGRNSTRPPLTREQIETNAKTYYAQASLVLDPARTEIRYNSEWCDPLGARGMIQLASRYTVARMMEREDFTRRFKGGVPIAVHEFLYPLLQGYDSVALKADLELGGTDQKFNLLVGRELQKEYGQEQQCILTMPLLVGTDGVEKMSKSKGNYIGISEAPESMFGKLMSISDTLMWRYYELLSFRSLADIAALKAEIDGGRNPRDAKVALAQEIVARFHSPQAAEAALAAFEARFRDGAIPEDMPEVTVGGAPQGILRILREAGLVASGSEAQRNVEQGGVRVNGDRVEDKSLQLSAGTYVVQVGKRKFARVKLVG

SEQ ID NO: 51342 - protein, 353 aa, Bordetella pertussis
MDDKTSKAAAAEKAKALAAALSQIEKQFGKGSIMRYGDNEVEHDIQVVSTGSLGLDIALGVGGLPRGRVIEVYGPESSGKTTLTLQVIAEMQKLGGTCAFVDAEHALDVQYASKLGVNLTDLLISQPDTGEQALEITDALVRSGSVDLIVIDSVAALVPKAEIEGEMGDSLPGLQARLMSQALRKLTATIKRTNCMVIFINQIRMKIGVMFGNPETTTGGNALKFYSSVRLDIRRIGAIKKGDEVVGNETRVKVVKNKVAPPFKQAEFDIMYGSGISREGEIIDLGVQANVVDKSGAWYSYSGNRIGQGKDNVREYLKEHKEMAIEIENKVRENQGIVSRAATFPASEAEDGE

SEQ ID NO: 51343 - protein, 471 aa, Bordetella pertussis
MNRGPNSLVRSFKRKVAALFAPPVEPTSRGGALLRRTLTVSALGLFAGAAALGMVQQPDRSELPPLRLIDSVLPLEAGQMQVSDASNAPYISETRIRAGDTLAAVLQRLDIDSPRLQNFLTHDASARSIYKLYPGRSVQAATNENGDLVWLRYIHTPGNESGGQVVTRLLHVAPDGANGYKAEEVTQGTEQQTRVAVGTIRSSLFGATDAAGIPDSVTMQMADILSSKIDFLRDLRQGDQFRVVYEVRTHEGRYAGAGRVQALEFINGDKTYNAVWFSPDGKSGSYYDFDGTSLRGAFLRTALKFSRISSTFGMRMHPIHKTWTGHKGVDYAAPTGTPIHATADGTVEFAGWQNGYGNVVIIKHHGKYSTLYAHQSRIASGLKKGQKIAQGELVGYVGSTGWATGPHLHYEFRVNNQPIDPLAVDLPVARKLEPAELRAFTQAVQPYKQQIKLLTEFQQTLPEGSATVASR

SEQ ID NO: 51344 - protein, 518 aa, Bordetella pertussis
MAETFWLALAPAWAGGLVLSWALEALLRPPVQPPWRRPAWMLLLHAGVWTLLFALELALFRRPYFGAINVLAIEAVLVLVSAAKARVLREPFVYSDFEYFTDALRHPRLYLPFLGWPAALLLACGYGLALWAGLALESSATGARTAAWAAHAAPAPFWGATLALAAAGAALAVLAGHRDAGLTYEADQDLRRLGLVATLWLYGRAERQPWTPAMRSGPFGAAPAAAGAGPLPHLVSVQSESFFDARRVFGTLKPEVLAGLDALRAEALEHGQLEVAAWGANTVRTEFAFLTGLAASALGVHRYNPYRRLRQPQPSLASHLRQRGYRTVCVHPFHASFYGRDRVMPWLGFDEFVHLDAFADAPRAGPYVADAALARYVAERLAGQGSQPLYVHVITMENYGPLHWESVDAADAAAVLDGPLAPGCADLVAYARHLRNADAMFTGLAAAMRGLSRPAGLCVYGDHVPIMAEVYRRLGEPDGRTDYLIWQAGGQGSAAPGLRRVDELAQVFLRHMGLAPPG

SEQ ID NO: 51345 - protein, 558 aa, Bordetella pertussis
MSTATLSGQSPSAQRRPMTREERRVIFASSLGTVFEWYDFYLYGSLAAIIAQHFFSGVNPTAAFIFALLAFAAGFAVRPFGALVFGRLGDLVGRKYTFLITIVIMGLSTFLVGVLPSYASIGIAAPAILIILRLLQGLALGGEYGGAATYVAEHAPHGRRGFYTSWIQTTATLGLFLSLLVILGVRTFMGEEAFKDWGWRIPFLISVVLLGISVWIRLQLNESPTFKRMKEEGKGSKAPIAESFGQWRNLKVVILALLGLTAGQAVVWYTGQFYALFFLTQSLKIDSNTANIMIAIALLVGTPFFVLFGALSDRIGRKPIIMAGCLIAALTYFPIFKGLTHYANPALEKAQATAPVTVIADPATCSFQFNPVGTASFTSSCDVVKSFMARNSVNYENQAAAAGSVAKVMIGNDEFASFDGKGLAPAEFKTKATELDKALTAAIRSHGYPAKADPAQTNYFMVVVLLTLLVIYVTMVYGPIAAMLVEMFPTRIRYTSMSLPYHIGNGWFGGFLPPVAFAVVAATGNIYDGLWYPIIIAVMTLVIGTLFVRETKDNDINA

SEQ ID NO: 51346 - protein, 130 aa, Bordetella pertussis
MIGNWNYGTGRRKTSVARVFIKKGSGKIVVNGKPVDEFFARETGRMIVHQPLELTGHLESFDIKVNVHGGGETGQAGAVRHGITRALIDYDAALKPALSQAGFVTRDAREVERKKVGFRKARRRKQFSKR

SEQ ID NO: 51347 - protein, 142 aa, Bordetella pertussis
MKTFVAKPHEVKRDWFVIDAKGKVLGRVASEVAHRLRGKHKPEFTPHVDTGDYIVIINAADIVVTGNKAQDKKYFRHTTYPGGIRETNFEKMQQRFPGRAIQKAVKGMLPKGPLGYAMIKKLKVYAGAEHPHTAQQPKPLEF

SEQ ID NO: 51348 - protein, 453 aa, Bordetella pertussis
MLAMSLYAPIAAIATAPGRGGIGVVRISGPDLAELAQRLFGRPLTPRHAHYLPFRAADGEVIDEGLAIYFRAPHSYTGEDVLELQGHGGPAVLRRILARCLQAGHDLGLRPAEPGEFTRRAFLNERLDLAQAEAVADLIDASSEAAARGAMASLSGEFSQRVNDLSDRIIHLRMLVEATLDFPEEEIDFLEKYQARPTLQALTHDLDTLIAQARQGVILREGLHVVLAGKPNVGKSSLLNALAGDDIAIVTPIAGTTRDKVVQEIHIDGVPLHIVDTAGLRDTDDAVESIGIERTWKEIERADLILHLQDVTQPPDHLDAQIVRRLPARTPVLNVFNKVDLLDAAFQGQPDSLAISARGGIGLDALRQHLLQLAGWNPGAESPWLARERHLHALQQAAQHLEIATEHAREDDRVLDLFAEELRLAHEALTGITGKFTSDDLLGEIFSSFCIGK

SEQ ID NO: 51349 - protein, 352 aa, Bordetella pertussis
MSSKKKTKPVLPPGPVMVDVAGTTLTKDEKRRLRNPLVGGVILFARNFTDRRQLCALTRAIHKARKEPLLIAVDHEGGRVQRFRDDGFTALPPMQELGKLWDRDPLAAMRLATEAGYVLAAELRACGVDLSFTPVLDLDYGVSKVIGNRAFHHDARVVTMLSRALTQGLALAGMAACGKHFPGHGFVGADSHHEIPVDPRPLARILKDDAAPYAWLGDLVMPAVMPAHVIYPKVDAQPAGFSRRWVSEILRERLGYDGVVFSDDLTMEGASVAGDILARAEAALGAGCDMVLVCRPDLADELLDRLQVQHPAASVERIRRLLPRFAAPDWDTLQNDSRYQHARRLQSQIVSG

SEQ ID NO: 51350 - protein, 462 aa, Bordetella pertussis
MTNTSFSSLPLLPALLDNLQGLGFEQMTPIQAQSLPLILEGRDLIAQAKTGSGKTAAFGLGVLQNLDVNRLAPQALVLCPTRELADQVAQELRRLARLIPNVKVLTLCGGAAARPQAESLARGTHLVVGTPGRIQDHLARGSLDLSTLNTLVLDEADRMVDMGFYDDIAAIASHCPARRQTLLFSATYPDNIRKLSARFLRNPAEIKVEAQHDASRIEQLFFEIDEGQRLDAVATLLAHFRPASTLAFCNTKIRSHDLVERLRAQGISAQALNGDLEQRERDEILIQFANQSCAVLVATDVAARGLDIQNLGAVINVDVTKDTEVHVHRIGRSGRGDQKGLALSLCSPEEMRWANLIEQYQGAPLKWADLGSLRPKSDRPLRAPMITLCIQGGKKDKLRPGDLLGALTGDGGLAFEQVGKINITEFNAYVALDRQVAKQAFARLSNSNIKGRRFRMRFLEEF

SEQ ID NO: 51351 - protein, 190 aa, Bordetella pertussis
MPINVPIFLTWLRIAMIPLVVGLFYLPESWMSVPMRDTFAAWAFIIAALTDWFDGWLARRWNQTSAFGAFLDPVADKLMVCAALIVLLDLSRVDAFISLIIIGREITISALREWMAKIGASASVAVHRLGKFKTAAQMVAIPCLLYDQPLFGLSSRLIGDVLIVVAAVLTVWSMLYYLQRAWPAIREKSQ

SEQ ID NO: 51352 - protein, 440 aa, Bordetella pertussis
MSNRETEIRNLQKDWAENTRWQGIKRAYSAEDVIRLRGSVAVEHSLARRGATRLWDSLHSEPFVNSLGALTGNQAMQQVKAGLKAIYLSGWQVAGDANLAGEMYPDQSLYPANSVPQVVRRINNALARCDQIQWMEGKNPGDQDYIDYYAPIVADAEAGFGGVLNAFELMKAMIEAGAAGVHFEDQLASVKKCGHMGGKVLVPTREAVSKLVSARLVADVMGTPTILLARTDADAADLVTSDVDENDRPFITGERTVEGFFRTRAGLDQAISRGLAYAPYADLIWCETSTPNLEYARKFAEAVHRQFPGKLLAYNCSPSFNWKKNLDDGTIAKFQRELGAMGYKFQFITLAGFHALNYGMFELAHGYARRQMSAFVELQQKEFAAAELGFTAVKHQREVGTGYFDAVTQTIEGGQSSTTALTGSTEEVQFEQGGQAVKAA

SEQ ID NO: 51353 - protein, 430 aa, Bordetella pertussis
QHPNVVLILADNLGWGELGCYGGGAIRGAPTPRIDALAAQGTQFLNFNVESDCVPTRSALMTGRHPVRTGAMQSVPAGLPQGLVPWERTLAQAFSEQGYATAMYGKWHLGDKEGRYPKDRGFDEWYGIPRTTNESMFMEAVGFDPDVVEVPYVMEGRKGSPAERRERYDLEMRRRIDEVLTQRSCEFIGRHAGKAPFFLYVPLTQLHFPTIPHREFEGRTGKGDFADSLVEMDARIGQILDAVDQHGIADDTVFIFASDNGPEYRRPWRGSAGMWTGTYHTAMEGALRVPLIVRWPGKVPARQTNEIVHVVDLFPTLAGIAGLQVSQDRPIDGVDQSAFLLGREEKSAREGFVYYIKNELRAAKWRDWKMHVVWEVEPNVGPNHLETPYVFNLMQDPKEETDVNTMQGWVRGPIRRMVNAFQASLKSYPP

SEQ ID NO: 51354 - protein, 493 aa, Bordetella pertussis
MAGACFATSFMEMAQSAERPRPYAFMTANATRPVRTRFAPSPTGFLHLGGARTALFSWAFARHHQGVFVLRIEDTDVERSTPEAVQAILDSMDWLGMQPDEGPFYQMKRMDRYAEVLAGMLEAGTAYHCYCSPEEVDAMREAARAKGLKPRYDGTWRPEPGKTLPPVPADRKPVIRFRNPIDGATSWNDMVKGPISFDNGELDDLIIARPDGTPTYNFCVVVDDWDMGITHVLRGDDHVNNTPRQINILRALGATLPEYGHVPMILGPDGEKLSKRHGAVNVMEYDAQGYLPEAMVNYLARLGWSHGDDELFTREQLVEWFDTRHLSKSASQWDPKKLNWVNAHYIKGMDDAELAGRVAPRVERRGGKPQAADLPAIMGLLKDRAETLEQLAEDAMLFCGEYQPAPAELAAQHLTETARAALADFAARARDTEWNRAAISALIKAVLADRGLKMPQLGIPLRVAVTGRAQTPAVDAVLELLGKETVLARLQAL

SEQ ID NO: 51355 - protein, 116 aa, Bordetella pertussis
MNAEQAVSSLGALAHAQRLSVFRALVVAGPAGLTPSVMADGLGIARNALSFHLKELAHAGLVSVEQQGRNLIYRADFFRMNALLGYLTKHCCQGATCEVSDSRKNTAGCDAGARRA

SEQ ID NO: 51356 - protein, 975 aa, Bordetella pertussis
MQTTIASVTRPTAVPPAQSETSTDPNSGQWASYNIIRRNGSVVGFEPSKIAIAMTKAFLAVNGGQGAASARVRELVEQLTAQAVSALVRNRPAGGTFHIEDVQDQVELALMRSGEHDVARAYVLYRERRAQERAAAAEVLEKSSPAAAQEPTLSVVDNGVRRPLDLAALRATIEAAGEGLTQYTDTEAILKETVKNLYDGVPVDEVFKSAILAARALVEKDPAYSQVTARLLLHTIRKEVLGEEVSQADMATRYAEYFPAFIQRGIEGGLLDAKLAEYDLERVAKALDGRRDLQFGYLGLQTLYDRYFLHVRGTRIELPQVFFMRVAMGLALREADREARAIEFYEILSSFDFMSSTPTLFNSGTLHSQLSSCYLTTVSDDLEGIYDAIKENALLAKYAGGLGNDWTPVRALRSHIKGTNGESQGVVPFLKVVNDTAVAVNQGGKRKGAVCTYLETWHLDIEEFLELRKNTGDERRRTHDMNTANWIPDLFMKRVMENGEWTLFSPSDCPDLHDKYGKAFEQAYAGYEAKVASGELKLFKKMPAVSLWRKMLSMLFETGHPWITFKDPCNIRSPQQHVGVVHSSNLCTEITLNTNATEIAVCNLGSVNLVAHMKPNANGGYELNHDKLKRTIGVAMRMLDNVIDINYYAVDKARNSNERHRPVGMGIMGFQDCLHVMRVPYASQDAIDFADRSMEAVCYHAYWASSELAQERGRYQSYEGSLWSRGILPQDTLAMLREERGGNVDVDDSSSLDWDTLRSRIKEHGMRNSNCIAIAPTATISNIIGASACIEPTFQNLYVKSNLSGEFTVVNDYLVRDLKKLGLWDEVMVADLKYFDGSLSRIDRVPSELRKLYATAFEVEPSWLVECASRRQKWIDQAQSLNIYMSGASGKKLDDTYKLAWQRGLKTTYYLRTLGATSAEKSTGRGGELNAVSAGDHGAGSAVSAAPVLPEPEIVGAVCTMRPGDPGFEECEACQ

SEQ ID NO: 51357 - protein, 398 aa, Bordetella pertussis
MLNWEEENIATKPATSPAPAGGREAAPAVRAATGVFGDAALPTPTAPQHAASLGASDATAGRVKVADKRIINGETDVNQLVPFKYKWAWEKYLATCANHWMPQEINMSRDIALWKNPNGLTEDERRIVKRNLGFFVTADSLAANNIVLGTYRHITAPECRQFLLRQAFEEAIHTHAYQYIVESLDLDEAEIFNAYNEVPSIRAKDEFLIPFIDAIADPNFHTGTPEADQKLLKSLIVFACLMEGLFFYVGFTQILALGRQNKMTGAAEQYMYILRDESMHCNFGIDLINTIKLENPHLWTPEFREEIRELFRKAVELEYAYAEDTMPRGVLGLNAPMFKSYLRFIANRRCQQIGIEPLFPQEENPFPWMAEMIDLKKERNFFETRVIEYQTGGTLSWE

SEQ ID NO: 51358 - protein, 487 aa, Bordetella pertussis
MRGMYFDLRSFEFVSDARGGQADAVVGSDRVLTWQALREEAGQWAARARAHGIGPDVPVVIHGHKEAAFFVAMAGALLAGAPFVPVDTIYPPERVRRIVEIVRAAAVYDTQADVFRPGAAEPAALAERGLAYVMFTSGSTGDPKGVQIGRESVALLGDWLRDGLALGEAPVFMNQAPFSFDLSMYEVFGTLAAGGTCVLNAREQIAAPQQWLGRLAGSGVTVWVSTPSFAHQQLVNRDFSPQQLRALRTFLFCGEPLPVALARKLRQRFPEAAILNTYGPTEATVATTALVVDDAVLAEHDPLPVGYAKPASLLYVADDEICIVGDYVMRGYLNRPDLNQAKLFVHHDGRRGFRTGDLGRMREDGLLFCRGRMDDQIKLNGYRIELAEIDAALHALPGVAGGACAVLRRPDGTAVRVIGFVAQRTMEQASFQLPAALQQWKAQLTGRLPSYMVPSELVACPDLPVSNNHKIDRKKLLEIYAAIPAAA

SEQ ID NO: 51359 - protein, 977 aa, Bordetella pertussis
MSLLLVLALPFLGSLCAALLPANARNAEAWLAGLIALACTLLVASLYPQIAAGGVIRADLPWAPALGLQFTLRMDGYAWLFALIVSGMGALVVLYARYYMSPEDPVPRFFSFFQAFMAAMLGVVMSGNLIQLVMFWEMTSLASFMLIAYWHHRLDARRGARMALTVTGAGGLSLLAGVLMLGHIVGSYDMDQVLAAGDIVRADPWYPAVLVLIALGALTKSAQFPFQFWLPNAMAAPTPVSAYLHSATMVKAGVFLLARFWPMLAGTDEWFWIIGGAGLCSLVLGAYAAIFQQDMKGVLAYSTISHLGLITLMLGLNSSLGLVAAIFHMVNHATFKASLFMAAGIVDHETGTRDVGRLSGLYGAMPITATLAMVAAASMAGVPLLNGFISKEMFFAETTFVSGDVLVRWGLPLMATLAGAFSVTYSLRFILQVFFGPPAEDLPRAPHEPPRWMLLPSALLVMVCLVVGVLPGVTLGPILHLAASSILGEHMPQYSLSVWHGFNLPLAMSFVALTAGVLLYLALRARQRAHPGLVPFIYRFDGRRTFEYLLDASSVAAAWLLRYLASSRMQVQMLVIVLGTLWVAWLPLRAGGWLAGQARLTPADPAFAILWVVGAACALGAAYQAKYHRLASLTLSGGAGLITCLTFVWFSAPDLALTQLAVEVVTVVLLLLGLRWLPRRIQTGGDEDRPDLRARVRRLRDLGLAGVAGACMAALAYAVLTRPVGDTISSFFTERALPDGGGTNVVNVILVDFRGFDTLGEITVLGIVALTVYALLRRFRPAPESVELPHQQREQDGMPTVDETGERPAPDTKSPLPAGPMMIPAVLVRLLLPVAVLVSVYLLLRGHNLPGGGFVGGLVMATAIILQYMVGGVYWVESRSRLNPQHWVGLGLLAAGGAAVSAWLALRPFLSALAWDVALPVVGHVHLSSVLLFDLGVYMLVVGATVLVLVALAHQSLRAQRQAAVEAQAVAQTGSPA

SEQ ID NO: 51360 - protein, 448 aa, Bordetella pertussis
MFEKILIANRGEIALRIQRACRELGIKTVVVHSEADRTAKYVRLADESVCIGPAPSRESYLNMPALISAAEVTDAEAIHPGYGFLAENADFAERVEKSGFVFIGPRPETIRQMGDKVSAKRAMIEAGVPVVPGSEGALPDDPQEILRIAREVGYPVIIKASGGGGGRGMRVVYTEAALLNAVNMTRSEAGAAFNNPEVYLEKFLENPRHVEIQVLADGGRNAVWLGERDCSMQRRHQKVIEEAPAPGIPRRLIERIGDRCADACRKMGYRGAGTFEFLYENGEFYFIEMNTRIQVEHPVTELITGVDVVQQQILIAAGEKFTLRQRDIQFKGHALECRINAEDPFRFVPSPGRITNWHVPGGPGVRIDSHAFNGYFVPPNYDSMIAKVITYGDTREQALARMRIALSEMVVEGISTNIPLHRELLQDARFIEGGTSIHYLEHKLAQRP

SEQ ID NO: 51361 - protein, 149 aa, Bordetella pertussis
MDLRKLKTLIDLVAESGIAELEITEGEGKVRIVKFSQALQPVAYHMPEAVAPAAAPAAAAAPAAEAAPAAPQGHVVKAPMVGTFYRAPNPGAAPFVDVGQSVKEGDPLCIIEAMKLLNEIEADKAGVIKEILVENGEPVEYGQPLFIIG

SEQ ID NO: 51362 - protein, 287 aa, Bordetella pertussis
MTLPASPPRYAVIGNPIAHSRSPQIHAMFSAQTGRPLRYERLLAPVDGFLPTVQAFRESGGLGLNVTVPFKLEAYALAEARLSERARLAGAVNTLSWRDGAWHGCNTDGVGLVNDLLRLGVALAGARVLLVGAGGAARGVLQPLAAAGCARIHIVNRTAARAAELAAAWRAAAPRTGTQVSAGALAQAAEPGGWDVAINATASGLQGAAPDLPGGLYAPDALAYDMMYGARPTAFMRQAEADGAARCADGLGMLVGQAAESFHIWHGVRPDPGPVLLALRTELLAAG

SEQ ID NO: 51363 - protein, 273 aa, Bordetella pertussis
MMQHYYERDGVRLSYYLDDYTDPWTQAPTLLLLLHGAMANAQRFYSWVPGLSRDYRVVRADLRGHGLSDVPPADKPLDLQVLTEDILALLDHLGCERVHLAGNSAGGYVGQHLAMQHPQRIETLALFGSAPGLRNSQASTWLERVAEKGLRQFLADTIDDRFPPELVGTPRCEQFLDALSDHDMAYIGRFVGYMAQQEWGDQLHRITCPTLVVIPGAGRIGAMDAYQPMRDHLKRAEILVYEGERHSICEYLPQRCVADLRSFLARHGGPAWP

SEQ ID NO: 51364 - protein, 450 aa, Bordetella pertussis
MAFDFDLYVIGAGSGGVRAARFAAGYGARVAVAESRYLGGTCVNVGCVPKKLLVYGAHFHEDFEQAAGFGWNPGRPEFDWPTLIANKNREIERLNGIYRNLLVNSGVALHEGHARIVDPHTVEINGQRHSAQHILVATGGWPFVPDIPGKEHAITSNDAFFLPELPRRVLVVGGGYIAVEFASIFDGLGAQTVQVYRRELFLRGFDGSVREHLRDELVKKGLDLRFNTDVERIDKRADGVLAVTLSDGSVLETDCVFYATGRRAMLDDLGLENTGVRLAESGYIEVDDEYRTSEPSILAIGDVIGRVPLTPVALAEGMAVARRLFRPQEYRKVDYDLIPTAVFSLPNIGTVGLTTEQALERGFRVTRYESRFRPMKLTLTQSQEKTLMKLVVDADSQKVLGCHMVGPDAGEIVQGLAVALKAGATKQVFDDTIGIHPTAAEEFVTMRTAT

SEQ ID NO: 51365 - protein, 911 aa, Bordetella pertussis
MVSLLKKLIGSRNDRLLKEYRKQVAQINSLEPKISALSDEELSAKTQEFRDRHQQGTSLDDLLPEAFAVVREAGKRVFGMRHFDVQMLGGIALHNGKIAEMRTGEGKTLMATLPVYLNAIAGKGVHVVTVNDYLARRDAEWMGRLYRFLGMSTGVVVPQQPNDEKIAAYAADITYGTNNEFGFDYLRDNMEYRVEDRRQRRLFYAIVDEVDSILIDEARTPLIISGQAEDHTELYVRMNAVPPLLKRMASEPKPHEPEPEGDYWVDEKSQQVYMSEAGHESAEKILTRVGLLPEGESLYDPRHIALMHHMMVALRAHTLFFRDQQYVVQDDEVVIVDEFTGRLMVGRRWSDGLHQAVEAKEGVKIQHENQTLASITFQNYFRMYDKLSGMTGTADTEAYEFQEIYTLETVIIPTNKPMVRKDQNDQVFKTTQEKYQAILNDIRDCHERGQPVLVGTTSIENSELLAGLLRQAKLPHEVLNAKQHAREAEIVAEAGKPGHITIATNMAGRGTDIVLGGSVDKQVDLIHANEALSEAEKEARIETLRAEWKPLNERVKQAGGLRIIGTERHESRRIDNQLRGRAGRQGDPGSSRFYLSLEDPLMRIFAGDRVRAIMERLKLPEGEPIEAGMVTRSIETAQRKVEGRNFDIRKQLLEYDDVANDQRKVLYSQRNEVLEAASIGATVEGLRDAAVAEMFRGFIPEESVEEQWDVAGLEKALAGDWHIQLPLTDMLEQEPNLTDEELLERVVAAARQIYTAKVEQVGAESWAQFERSIMLQSIDTHWREHLSALDYLRQGIHLRGYAQKNPKQEYKREAFELFSGMLDRIRDDVVRVLMTVRVQSAEQVEQAEADAAQPHVQNVQYHHSDYDEALADDGQPQGAQPVRNVLPKVGRNEPCPCGSGKKYKHCHGQLA

SEQ ID NO: 51366 - protein, 307 aa, Bordetella pertussis
MFRQRSIQNLVRTIGVGVHSGRRVELTLRPAEANTGIVFHRVDLPQVVDLPASAIGVGDTRMASVLQQGNVRVSTVEHLMSALAGLGIDNLHVDLTAEEVPIMDGSAATFVYLLRSAGIVEQNAPKRFIRVLKPIEVREGEGRNEKWARLEPHEGFALAFSIDFRHPAIDSTANFAEIDFATHSYVREIARARTFGFVNEVEALRSMGLARGGSLDNAIVMDEFRVLNSDGLRYDDEFVKHKILDAIGDLYLLGKPLVARYVAYKSGHALNNQLARALLEQQDAWELVTYESQAEAPQAFRHEWKLA

SEQ ID NO: 51367 - protein, 394 aa, Bordetella pertussis
MMNFEMLENNAKGTVIKVVGVGGAGGNAVAHMIRSGVSGVDFICANTDAQALAATNAPVQIRLGRTGLGAGAKPEQGRASAETAREEIRAALNGAHMVFITAGMGGGTGTGAGPVVAEVAKELGILTVGVVTKPFTFEGNKRLRMAEDGIGELGKHVHSLIVVLNENLYELMDDDATQEDCFKAADDILHNACAGIAEIINVEGNVNVDFEDVKTIMGEQGQAMMGTAAASGADRARVAAEKAIACPLLEGVDLNGARGVLVNITASRTLKMRETREIMETIRSYASDDATVIFGTAYDEQMGEELRVTVVATGLGREAVRPQLVQHTSEALRTGTDNMPVGNMLAGQQGDYRGLDMPSVMRNPRSQASAQVRALESSGMDHFDIPAFLRKQAD

SEQ ID NO: 51368 - protein, 408 aa, Bordetella pertussis
MTRDIKDLIVALDIGTSKVVAVVAEILPEGRFEVLGLGQHESRGMRKGVVVNIETTVNSIQRALEEAELMADCKIRDVYAGIAGSHIRSFNSSGMVAVKDKEVTATDVARVIETAKAVNIPTDQQVLHVLTQEFIVDGQEDIREPIGMSGLRLEVRVHIVTGAVSAAQNIVKCVRRCGLEVQDLILQPLASSLACLTADEKELGVVLVDIGGGTTDVAIFTGGAIRHTAVIPIAGDQITNDIAAMLRTPTPDAEEIKLRYGVAKQVLARPDEAVEVPGLGDRGPRQVKRQALGAVIEPRVEELFTLIQQVVRDSGYEDLLASGVVLTGGSAQMPGMIELAEDVFLKPVRVAVPEYEGSLADVMRNPRFSTVMGLLQEARMQRLRGRKVAAQTGNFKTLLARMKEWFMN

SEQ ID NO: 51369 - protein, 273 aa, Bordetella pertussis
MWNDARTINLIANTLAVLAVAAMLLAGVAWVAQRPYFTLAAIEIESMPETEMHYVSTGAVRAAIAGRFGGNFFTVDLDEAREAFESVPWVRHATVRRIWPNTLRVRVEEQQPLALWNENQMINTWGEAFTANTGELADDMVLPHFTGPEGTESLVVQRYAELARWFAPLDMHVRELVLNPRYAWAVTLSNGMKLDLGRDPGADAPDPHGLPGALPFAARIQRFVQAWPVVSSRLEGRTVTQADLRYPTGFALALAPLPPEHASHSKSKPAKKR

SEQ ID NO: 51370 - protein, 351 aa, Bordetella pertussis
MKLSIAQAIAFGQRLLAAQGVPDDIARDVAEHLVESDRVGYTSHGLSILPNYRRVLAEGFVKADGRAKLLNDRGAMLAFDGDNGFGQHVGKAVMQQAIERARQYGQCIVTLRRTHHLGRMGYYGEMAAEAGLILLAFTNVVNRPPTVAPYGGAQACLTTNPLCFAGPLPGGCPPFLVDMATSSIAVNKARVLAARGEPAPDGALIDAQGNPTNDPNALFADPPGALLPFGGHKGYAMGLVAELLAGVLSGGGTIQPEHPRNGVATNNMFAILLDPQVDFNADWRTQEVGAFIDYLHACPPQPGVDRVQYPGEYEAMNRARHAEAIEFEGAIWDSLAKLAQDLGAADALPRA

SEQ ID NO: 51371 - protein, 262 aa, Bordetella pertussis
MRMNFVRSALLASAFLLAGGAAQAEKLVVGATQVPHAEILEVVKPALAKEGVELDIKVFTDYVQPNLQLADKQLDANFFQHQPYLDTFNKDRKTNLVSVGLVHVEPFGGYSKKIKSLAELKDGATIAIPNDPSNSGRALLLLQKQGLLKLKDPSNIVATPIDIAENPKKLKFRELEAAMLPRSFDDLDLALINTNYALEAGLVPTRDALFIEGADSPYANLVAARPDNKDAPAVKKLVNALHSEAVRKFIIEKYKGAVVPAF

SEQ ID NO: 51372 - protein, 316 aa, Bordetella pertussis
MSKQFGKVGVLYGGRSAEREVSLMSGKGVHEALLSAGVDAHLFDTGERSLADLAAAGFERVFIALHGRYGEDGTLQGALELLGIPYTGSGPLASSLSMDKIMTKRVWLQHGLPTPAFEVLGGSTELRLVPDRLGLPLILKPPHEGSTVGITKVAGYSDMKAAYELAARFDAEVLAEQFITGRELTVAVLGSGAAARALPVIEIVAPGGNYDYEHKYFSDDTQYFCPADLPADVAADVAAVAERAYAALGCEGWGRVDFILDRENRPWLLEMNTSPGMTGHSLVPMAARAVGMSYADLCVAILAEAACKVRSPARQD

SEQ ID NO: 51373 - protein, 468 aa, Bordetella pertussis
MKHRIQHIHFVGVGGSGMSGIAEVLLNLGYTISGSDLNESAVTRRLAELGMRIAIGHDRANVAGAGAIVTSTAVAGDNPEVLAARAARIPVVPRAVMLAELMRLKRGIAVAGTHGKTTTTSLVASVLAAGGLDPTFVIGGRLTSAGANARLGQGEYIVVEADESDASFLNLLPVMAIVTNIDADHMDTYGHDVARLKSAFIEFTQRLPFYGSAILCADDANVREIMPFVSRPITTYGLSPDAQVCAQDVQADGTRMRFTVQRRDRDVVLPALQVELNLPGLHNVRNALAAIAVATELGVDDAAIREALAAFKGVGRRFTQWGDLPVPAAHGGGIFTLVDDYGHHPVEMAATLAAARGAWPQRRIVLAFQPHRYTRTRDCFEDFVRVLGSADGVLLTEVYAAGEAPLVAADGRALSRALRVAGKVEPVFVEDVGELPQAILDFVRDGDVVVVMGAGSISKTPALVGELA

SEQ ID NO: 51374 - protein, 357 aa, Bordetella pertussis
MSAPTILIMAGGTGGHIMPGLAVAEVLRERGWRVLWLGNPDKMEGRLVPPRGIELVPLRFQGVRGRGAAALLKLPFLLARACAQAWRRLADIRPDVVLGMGGYVAFPGGVMAALRRTPLVVHEQNAVAGTANRWLARLARRVLSGFPGVLPRGEALGNPVRADLCALPEPAERYAGRSGALRVLVVGGSLGAHALNTTVPQALALLPEQARPQVVHQAGEQHLPALQQAYAQAGVQADCRAFIDDMADAMAQADLLICRAGAMTVSEVAAAGVAALFVPFPHAIDDHQTANARFLSDAQAAWLQPQASLTPQWLAQWLGQRTRQELQAVAGRARTHALPRAAAHIADVCEQAARRAS

SEQ ID NO: 51375 - protein, 397 aa, Bordetella pertussis
MSLFAELTASVNAVRPGRTRMRNYDMPLIVAASTLLLLGLLMVYSASIALADGPRYASYGRYYFVIRHGLFLTAGLLAAAVVLSVPIRVWQRLAVPLFMFALILLVAVLIPGIGREVNGAHRWIPLGPLNFQPSELMKLAALLYAADYTVRKQEHMQAFSRGFLPMACALGGVGMLLLLEPDLGAFMVIVAIAIGILFLGGINGKYFSSLLAVLVGTFLMLIWVSPWRRARLFAYLDPWNKANAYGSAYQLSHSLIALGRGEWFGVGLGASVEKLHYLPEAHTDFLMAVVGEELGFAGVMLVITLFAIIVYRGFDIGRQAIAMERTFAGLVAHGVAMWVGVQAFINMGVCLGLLPTKGLTLPLMSYGGSGIVMNLCALAMLIRVDVENRVMMRGGRV

SEQ ID NO: 51376 - protein, 510 aa, Bordetella pertussis
MNTTETSRAAAPLVLILGLGETGVAAARWYARQGSPLRVTDSRAQPGGLAALQAALADATVEYRLGCGEQFPPDLLDGVAQIVLSPGLVPHESPTRELLEQARERNVEVVGEIELFARALAGLAESREYRPRVLAITGTNGKTTVTALTRQLIEAGGMSARAAGNISPAALAALMDALDQDDLPQVWVLELSSFQLETTRTLAPDAAVVLNVTQDHLDWHGDMQAYAQAKARILKPARLAIVNRDDPLAVAMVESLQALNVRSFGRDVPALVGDMGLELGQGVAWLTACESNDFDEPAPAPRRKKDAPPPTRAGGRMSRLMPVDALRIRGVHNALNALAAMQLARSLDLGWGPMLRTLRDYAGEPHRAELVRSIGDVDYINDSKGTNVGATVAALEGLGQQVVLIAGGQGKGQDFSPLVPVVRRHARAVVLIGVDGAAIGKVLEPTGVPCAAAADMREAVRRAAELAQPGDAVLLSPACASFDMFRNYPHRGEVFAAEVRELALDRGEVA

SEQ ID NO: 51377 - protein, 389 aa, Bordetella pertussis
MLLEIARWLSDDVRAIGVFEYITLRAVLACATALLIGLVAGPRVIRRLTEMKIGQAVRAYGPESHLVKTGTPTMGGALILIAIAISTLLWADWTNRFVWVVLLVTFGFGWIGWMDDYRKVVYRDPEGMPARQKFFWQATIGLVAAVYLAFAVSAPANTELWPLFKAWVGSGFTMPLPTRADLIVPFFKSVSYPLGVLGFVALTWAVIVGTSNAVNLTDGLDGLAIMPTVMVGSALGIFAYVVGRVDYSKYLLFPYIPGAAELMVLCAAIGGAGLAFLWFNAYPAQVFMGDVGALALGGALGTIAVIVRQEIVLFIMGGVFVVETLSVMVQVTWFKYTKRKYGQGRRIFRMAPLHHHFEVGGWKETQVVVRFWIITMMLVLVGLSTLKLR

SEQ ID NO: 51378 - protein, 479 aa, Bordetella pertussis
MPHTLDERKRWLALMVLCLGVLMIVLDTTIVNVALPSIKADLGFTEASLVWVVNAYMLTFGCFLLLGGRLGDLLGQRRMFLAGLTLFTLASLACGMAQGQAMLVAARAVQGLGGAVVSAVALSLIMTLFTEPAERARAMGVYGFVCAGGGSIGVLLGGLLTSSLSWHWIFLVNLPIGALVYALCLPLLPASQGPTGHPRLDLAGAAAITASLMLAVYAVVNGNEAGWTSPQSLGLLALAVALLALFLRIEARVPAPLMPLSLFALRNVATANIVGVLWAAAMFAWFFISALYMQLVLGYTAMQVGLGFLPANIIMAAFSLGLSARLVMRFDIRAPLVCGLLVAALGLALFARAPVAGSFAVDVLPGMLLLGLGAGIAFNPVLLAAMSDVDPSEAGLASGVVNTSFMMGGALGLAVLASLAAGRSASLRAGGADVLTALNGGYHAAFAVGAVFAALAALLAGVLLRRPQPGASAPAADAH

SEQ ID NO: 51379 - protein, 573 aa, Bordetella pertussis
MPFFDNPVLRGQLPMWRARLVLILLFGGFVVLAGRALFLQGLSTEFLQQQGERRYERTLTLAATRGKILDRNGVVLASSVPARAIWAIPEDAKPIPPEQVAALAQLLQTPVAELRRRLADEDRNFVYLKRQVPMDVADKIKQMALPGIHQQPESRRYYPEGEVTAHIVGFNNVEDQGQEGVELTFNQQLSGQPGSRRVIKDRLGRVIEDVQAVTLPVDGRDLRLSIDTRLQYLVYKELQDARVAHQAKSATAVVIDVHTGEVLALVNLPSFDPNHRETFQVSTLRNQAITDTFEPGSIMKPFTAALALDLGRISTATMFETGNGRFQYQGSTISDVSRNGTLDLAGVLLKSSNIGMTMISEKLQSREMWDLFTGLGLGQAPQLGFPGAAPGRLRPWDRWRLIEKATIAYGYGLSVSLLQVARAYTVFARDGDMVSLTLVKRESAPTSVRVYNPKTAATVRAMLEAAAGPDGTKRAQVQGYRVAGKSGTARKIVDGKYSAQRHRSSFVGFAPVSNPKIVVAVSIDEPQVGGYYGGAIAAPVFSRIVGGSLRLMGVQPDAPFESTIVAGNPEGAR

SEQ ID NO: 51380 - protein, 364 aa, Bordetella pertussis
MEFEHRPVLLEPTVDALVLPDFGGKGAHRQAGEPGPDAATRLQHGVFVDGTFGRGGHSRALLARLGAQARLVVFDKDPQAIAVARELAAGDGRVEVVHGGFATMAEELTARGIEQVDGVMLDLGVSSPQIDDAERGFSFMRDGPLDMRMDTTRGPTVADWLAQASVDEMREVIADYGEERFAFQVAKAIAACRATRPLHTTLQLAECVAGAVRTREKGQHPATRTFQALRIYINRELEELARALASALDLLGPGGRLAVISFHSLEDRMVKQCIAAAARPAAAHARLPLRESELPQPLVRSLGKVVADDVEVAGNARARSAILRVAERTGEPLPPGGGAGFVKAGRVPGEPVRGTRAGSKGRRR

SEQ ID NO: 51381 - protein, 375 aa, Bordetella pertussis
MGEPPPRAPGLARGEAGGRRCRQRWAWAARAEGQAGGGVGHGGRRKGRCRATLAQFSPSQHHAMNQDVLSPAQGDAWSRVADRVAAQHWPAATLYVIATPIGNLGDLGLRAWQALVRADVIAAEDTRASRTLLDAWGVSTPLMAAHRHNEASAAQAICERLAQGQRVALVSDAGAPAVSDPGARIVRAVREAGYAVVPVPGPSAVIAALMGSGATSDENPAFAFAGFLPAKAVARQRWLRQWCALPAPVVMFESPHRLAATLADLREAGGPARLLTVARELTKRFEEIATMPLGEAADWLAADAHRGQGEFVLIVHQAPGAQDDEADPADPRTDALLDALLESLSVRDAARVAAKVTGLARDVLYARALARKEQP

SEQ ID NO: 51382 - protein, 190 aa, Bordetella pertussis
MNPPSAQATDILYCDTDTPLGPMRLAARGQALCGAWFVDQRDCPAAAGWTLDAAHPALRQAAAELEQWFAGRRRAFEVAMQPEGTPFQRQVWQALLELPFGATISYGELARRVGRPKAARAVAGAVGRNPISILIPCHRIIGHDTSLTGFGGGLPRKQALLAHEGHRYLSRAARARRVSTTQMELPLGAA

SEQ ID NO: 51383 - protein, 142 aa, Bordetella pertussis
MFQGSSALTLDAKGRISIPTRHRDALMDRAEGRLTLTRHPDGCLLVYPRPEWEEKRAQIAAFPMSARALQRLLLGNAQDVDIDGSGRVLIAPELRNASGMTRDVMLLGMGAHFELWDAASLARREAEDLAQGMPDVLNQFSF

SEQ ID NO: 51384 - protein, 602 aa, Bordetella pertussis
MALASLITLTDVQLAYGHHPLLDHADFAIQEGERIGLIGRNGAGKSSLLRLLDGRTQPDDGDIARSSGLRVATVEQEPALDETGTVFDVVCDAHAHPEDWQRPARVRAALERLGLPAEAAIASLSGGMRKRVALARALVDEPDLLLLDEPTNHLDFDGIAWLEAMLRNWKGAAVIITHDRRFLDAVATRIVELDRGRLLSFPGNFSQWQERKAQWLEAERLEQARFDKLLAQEEVWIRKGIEARRTRNEGRVRRLEQLRVERAERRERVGNVSLALAQGQRSGKLVAELQDVGKAFGDKVVVHDYSTTILRGDRIGIVGPNGAGKTTLLKLLLGELPPDSGTARQGSNVSVAYFDQMRAQLDENATLVDIISPGSEWVEIGGARKHVMSYLGDFLFSPARAGSPVSSLSGGERARLLLARLFARPANVLVLDEPTNDLDIETLELLEELLQEYAGTVLLVSHDRAFLNNVVTQTIAAEGDGRWRDYVGGYDEWQAQRPAQAAAPKAEKPAETAKPAAARPKPVRAARLSAWDLRELEALPDAIATIEARQAELSGKLADGSLYRDAPDEVERINAELATLESELEEKFARWELLEARRGDSA

SEQ ID NO: 51385 - protein, 563 aa, Bordetella pertussis
MPHSVACLDLRVIALLEAKRAGLLRRAHWLPNIVSGLIVGVVALPLAMAFAIASGAKPEQGLYTAIVAGLLVSLCGGSRVQIAGPTGAFIVILAGITAQHGVAGLQLATLMAGCILLALGAARLGAIIKYIPAPVIVGFTAGIGVIIWVGQWKDFFGLPSPAGTHFHEKLWQLVHSLPQLHLATTALAALSLALLLLNNRLPYLRRVPGPLVALVVATTLQAALGLDGVATIGSAFGGIPQGLPSWQWPEITVSRVIELIGPAFAIAMLGAIESLLSAVVADGMAGTRHDSNQELVGQGLANIVAPLFGGFAATGAIARTATNIRNGGTSPLAGVVHCITLLLMVLLLAPLAENVPLAALAAILFVVAWNMSDAPHFVRMIKRAPRADVAILLVTFVLTVFADLVVAVNIGVVIAILHFLRRMASSVQVQAQSPAELGDELGHRGYGPLPDDVLVYAVEGPLFFGAAENFERALAATHTDPRTLIIRLRWVPFIDITGLQALEEVITDLQRRGVRVILSGANPRVKAKLHRAGLVGLAGADNVFDRFEDAVLSCRAPAAPATA

SEQ ID NO: 51386 - protein, 354 aa, Bordetella pertussis
MSNQHATELTITRPDDWHLHLRDGSALEAVVLDTARQFARAIVMPNLRPPVTTTEQALVYRARIEAALRKAGGDTAAFTPLMTLYLTDNTPAEEIVRAHESGQVAAVKLYPAGATTNSDAGVTDLLGKCGAALAALERCGMPLLVHGEVTDPAIDVFDREAVFIERVMQPLRRAYPGLKVVFEHITTREGAHYVRDAEGPTAATITPQHMLYNRNAIFTGGVRPHWYCLPILKREVHRQALVEAATSGSPRFFLGTDSAPHARGLKEHACGCAGCYTALHAMELYATAFDAVGRLDRLEGFASFHGPDFYGLPRNTGTLTLRREAYEIPAEVAFGDTTLVPLSGGESLGWRALA

SEQ ID NO: 51387 - protein, 131 aa, Bordetella pertussis; identical to SEQ ID NO: 51107

SEQ ID NO: 51388 - protein, 136 aa, Bordetella pertussis; identical to SEQ ID NO: 51108
  MISC_FEATURE (77)..(77): X=any amino acid
  MISC_FEATURE (129)..(129): X=any amino acid
  MISC_FEATURE (131)..(131): X=any amino acid

SEQ ID NO: 51389 - protein, 481 aa, Bordetella pertussis
MLSVRIPGPVRQAWAIVEQRPWLARRPFIIHGPPWRLASQQEDDVFKLMSRSAVKMVERYLPDPYVFVVLLTLVAAGAAMIIEGQTPMAVVRWWGNGFWGLLTFAMQMLLVLVTGYMLASTPLVKRMLARLASLATSAGGAIILVSVVSLAASWINWGFGLVVGALFAKQIARQVRVDYRLLVASAYSGFIIWHGGLAGSIPLTIATEGHFSADKIGIIPTGDTIFAVFNLVIVVAMFILVPLVNRLMLPDEKESVYVDPARLEEASVPASDDDKRPAARLENSRLLAWLIAAGGLAYMFDYYVVRGAGLNLNVINFSFLILAILLHGTPRRLLASLDEAIKGGAGIVIQFPFYAGIMAIMMDSGLAATLSEWFVSIASAATLPFWTFISAGIVNIFIPSGGGQWAVQSPIVISAAQALGADMPRVAMAVAWGDAWTNMLQPFWALPVLAIAGLKAKDIMGYCIIQLLVTGVIISVGLSFF

SEQ ID NO: 51390 - protein, 527 aa, Bordetella pertussis
MRPPRDGKQSSRRHNDIRRQTMDLSDLKKLGLDVAYPFKEQYENYIGGQWVAPAGGEYFDNLSPITGQPFCRVPRSGAADVELALDAAHRACAAWARTSPAERANILLRIADRIEGQLPMLAVAESIDNGKPLRETTAADLPLAIDHFRYFAGCIRAQEGAISEIDANTVAYHFHEPIGVVGQIIPWNFPLLMVAWKLAPALAAGCVVVLKPAEQTPASILVLAELIGDLLPPGVLNVVNGYGKEAGQALATSKRIAKIAFTGSTPVGKHILHAAADNLIPATVELGGKSPNIFFDDVMDHDDEFLDKALEGLAMFALNQGEVCTCPSRILIQESIYERFIEKAIARVQSIKTGHPLDAGTMVGAQVSQVQMDKILSYIDIGRQEGAQCLTGGARNDMLPGGLDQGFYVQPTMLLGKNSMRIFQEEIFGPVAAVATFKDEEEAIAMANDTFYGLGAGVWSRDGARAYRVGRGIEAGRVWTNCYHLYPAHAAFGGYKQSGIGREAALSNYQQTKCLLVSYSAKALGFF

SEQ ID NO: 51391 - protein, 397 aa, Bordetella pertussis
MSKLDSLFTAALEQAAQRQVRRRLRHAAATPPGRLALDGRTLVNFSSNDYLGLARHPLLAERASLWATRHGAGAQASRLVCGNLDLHEQVEAKLARLKGTEAALLLASGWQANAAVLPALFKAAAAQGEPQVYTDRLNHASLHHGCQAAGVRQIRFRHNDLAHLEHLLAERAGAPGARFIVTESVFSMDGDRADVPALAALAARHHAFLYLDEAHATGVLGPRGMGLAGLAPGGVDLAMGTFSKGLGSFGAYVAGSRALCDYLVNACSGFIYTTALPPAVLGAIDAALDLVPRLDQARATLQGHGERLRASLAAQGIDCGASSTQIVPAIIGDAGHALALAAELERRGLLAVAIRPPTVPAGTSRLRIALSAAHGEAELDQLIEALAAGWRAVRQAA

SEQ ID NO: 51392 - protein, 733 aa, Bordetella pertussis
MAAEKAPAKTAVKVAKPAAKTAAKKTATKTVAAKTAAADKPAKTTKARAKKAEDKLADLVGAARPAPSGRRPGRPAKNANNDSDAFDDSMDGEGEVLPDLKPPKRGGKRGKADPKDLIARGPVSPEEYEARRNRLKQLIKLGKDRGYLTYGEINDHLPDDLVDAEAIDGIISTFSDMGIAVYDQAPDAETLLMSENAPVASNDDDVEDEAEAALTTVDSDFGRTTDPVRMYMREMGSVELLTREGEIEIAKRIEDGLKHMVMAISACPTTINEILAHITRVREGQAQIDEVVDGLVDPEDGEEYAGAGVTADEDEGDDGPAGGMSSKQLEDLRVKALAKFDEVSKQFEKMRQSYEKEGYKSDAYLKAQDIIQTELMGIRFTAKMVEKLADTLRAQVEEVRQLERAVLHTCVDRAGMPRSHFLKAFPGNETNLQWVLDEVAAAHAYSETLERQIPAVQELQQKLIDLQTRVVLPLKDLKDVNKRMATGEAKARKAKREMTEANLRLVISIAKKYTNRGLQFLDLIQEGNIGLMKAVDKFEYRRGYKFSTYATWWIRQAITRSIADQARTIRIPVHMIETINKMNRISRQILQETGAEPDPATLAQKMDMPEDKIRKILKIAKEPISMETPIGDDDDSHLGDFIEDTATLAPSDAALHGSMRDVVKEVLDSLTPREAKVLRMRFGIEMSTDQTLEEVGKQFDVTRERIRQIEAKALRKLRHPSRADKLKSFLEGQ

SEQ ID NO: 51393 - protein, 211 aa, Bordetella pertussis
MVPPANLRESVIAQLRSQIVSGAAAPGMIYSVPSLANELGISTTPVREALLELSRSGLVEPLRNRGFRVQAITLQDLENHFDVRVMLESGALATLARQGLTDTAPLVALADEVAQAVKDQDVGQYIESDRSFHEALVSRAGNPLLTRMIMHLRADMRLYGINSEEGRVRQRASVEEHYEMIDLAVKQQPDAIVALITRHIESWKPLFAAAL

SEQ ID NO: 51394 - protein, 832 aa, Bordetella pertussis
KRIVIGLVVLVVVAVVGLAIFLLTFDPNAYKYKLEEAVQARYERTLNIEGEIELSLFPRIGLAVQGVSLSEPNSPDVFASIDSMRLAVAVWPLLSNSLVVDHVTINGFKARVIRGKDSHFNFENLSAARSRAPTCPATPPRPPPARSPARRRPSSTAPSARPRACQIDIAGLDLKDGEIQLQDAMSGMAVAITKLNAATGRVTYNQPFDVSLSARVEGGNPRLDAGLTGQAQLTLDPLAKRYAAQRLDLRMEGRLPGAQAKSLAARGNVAFNGMTSSLDVAGLEILFQGDIVDTATKLTNVEASVAMPKLAVDPHKTELQIDKLAVRAKGAMPGGPFELAVDAPALNISPTNASGDALSGRVRTQELDASFGLNGISGNAGELDIKEAKLDSTLKQGERVVKSAFASPVTLNLLQRSIGLSALKGDVNITDPGLPKGSLQIPVIGSVNANLLKDQANARINAVLEGGKFDLSADIVALSAVPRVTFALAVDTLDLDKLAPPAGASAPPKPAGDGKQDESKPPAKPQPAPAPAAADDSINLSGLVGPTASGTIKIGQLVMRGLKAEQVAANIKLEKGKLDISTLTAALYGGKLGGVMSVDAVNGNQLVAKMSLAGIAIQPLLSDLAGKDTLSGTGSLAFDLKTAGANTYAMKSGLAGTMQVRLRDGAIKGINVAQTLRELKAMFRGEAHDPTVQDDQTRQTDFTSLESDLVFNKGVATVKRLDMAAPLLRVNQGNPANIDFVRSELDFVARVRVVNTSTGQDGKDLAELRNLTIPLLITGPFDKPVYTLQWREVAGEALKRGLEKQLKEALTGGEGASGSPAKNIDKALKGIL

SEQ ID NO: 51395 - protein, 83 aa, Bordetella pertussis
MALKITEECINCDVCEPQCPNEAISMGADYYVIDPDRCTECVGHHDEPQCKVVCPVECIELHPQWQEGQEQLMAKYRRLTGAA

SEQ ID NO: 51396 - protein, 676 aa, Bordetella pertussis
MIPESFIQDLLARVDVVDVVGRYVQLRKGGANLLGLCPFHNEKSPSFTVSPTKQFYHCFGCGAHGSAITFLMEHTGASFPEAVRTLAAAVGLTVPEENHSPRQQAESARRKAEVSRHTQVLDAAQAHYLRQLRGSPQAIAYLKQRGLTGEIAAHFGLGWSGTDRHGLSHVFDNYEDPVLVEAGLVIESEDGRRYDRFRERVMFPIRNARGSLIGFGGRIIGKGEPKYLNSPETPLFSKGHELYGLWEARLAIRQEGQVVVVEGYMDVVGLALQGIANAVATLGTSTTPDHVKKLLRASDKVIFSFDGDAAGRRAAWRALQACLPVLRDDIAIRFLFLPAEHDPDSYVRELGAEAFRTRLGEAVALSRFLLDELASRHTMGEAEGRASCLHEAKPLLAAIPECALRVQIERELARLVQLTPEEMAQVLAQQPARPLASAAAPAQASAPAAGREGGPGHADEAPPDWAFEPVHDFEPDAYSVGAVDGEPSMPAAGGWQERKGRQGGDWKGKKGDWKGKKGDWKGRRDNDTGGYEGRRTMPSLARRLLCLLLAHPELVDTMGDQQLEVIDHGPHLGLVRDLILLAQTSGARHVGALMEAADPDSDLYVVLKGLRADVLAQEDLPHPQTEWDDALRRMEFDAARAEMAKLAESGLATDEARRRYLELSSRIMVLKNAGAQ

SEQ ID NO: 51397 - protein, 70 aa, Bordetella pertussis
MPIVRLKENEPFEAALRRFKRTIEKTGLLTELRSREFYEKPTAERKRKHAAAVKRHYKRIRSQQLPPRLY

SEQ ID NO: 51398 - protein, 598 aa, Bordetella pertussis
MACTILQCRIIHRFAHCSKLEEAIVHGAGLALAQQLESGRRRRRGFGLDIDQSVLGQHGGQQWPQAFQPALAERRIEQDQVETRGVHALDHLHGVAGMDAHRARLQLVAQRPQGGRRAAVALDHLHLARAARGRLETQRSAAGEQVQHPLVGEFAAPQVVEPVEQGLAHAIGRGAQARRVGNGNECAAVKAAHDADGFAARAGWFQERGPPGRNSSVPRGDGCRETNILLPMFSFFKKKSPPPAAPAQPAPPPEAVDAGSAAPAQPQPAEPQPEPQPQQPPEPQPPVAAAPEAPRKASWLSRLKQGLSRTGQNIGGLFVGVKVDENLFEELESALIMADAGIEATEKLLAALRARVKKERIDDPAQVKTALRQLLADHLRPLERSFDLGRAQPLVVMIAGVNGAGKTTSIGKLAHTFQRQGASVLLAAGDTFRAAAREQLVEWGSRNNVTVISQDGGDPAAVAFDSVNAGRARNVGVVMVDTAGRLPTQLHLMEELKKIRRVIGKAEASAPHEVLLVVDGNTGQNALAQIRAFDAAITLTGLVVTKLDGTAKGGTLAAVAAGSQGVRPIPVYWIGVGEGLEDLQPFVADEFAAALLAD

SEQ ID NO: 51399 - protein, 431 aa, Bordetella pertussis
MSKNVVVIGTQWGDEGKGKIVDWLAESVQGVVRFQGGHNAGHTLWINGKKTILRLIPSGIMHDGVTCFIGNGVVLSPEALLREIEELEAAGLDVRSRLQVSEICTLILPYHVAVDKAREARKGEGKIGTTGRGIGPAYEDKVARRALRVQDLFNPALFDEKLAEVLDYHNFVLTQYLGAEPVSANEVRDQAMALAPALAPMVRDVSSNLFALQQEGKNLLFEGAQGALLDVDHGTYPFVTSSNCVAGAASAGAGVGPQALQYVLGITKAYTTRVGSGPFPTELVDEIGARLATIGKEFGSVTGRPRRCGWLDGAALKRSVRLNGISGLCITKLDVLDGLETIQLGVGYRVNGEFRDVLPYGAHAVAQAQAVLEELPGWTESTVGITEYSKLPVNARRYLERVAEVCGVPIDLVSTGPDRNKTIVLRHPFKG

SEQ ID NO: 51400 - protein, 434 aa, Bordetella pertussis
MSRITKLFNLNDPGWGRGNNNGNGSEPPRRPQGGGDGPPDLDEVWRDFNNRIGALFGRKGGGGNNRPNNRGGMTPPSPRGARIGLGIIALVLVLLWLASGFFIVQEGQVAVVTQFGKYKSTAPAGFQWRMPYPIQNHEMVNVSQLRTFEVGFRGGSRNKVLPEALMLTTDENIVDMQFVVQYRLRADGAPDYLFKMRDPDESVRQAAETAMREIVGKKPMDFVLYEGRTEVATEVQNLMQQILDRYSAGIQISTVAIQNVQPPEQVQAAFDDAVKAGQDRERQINEGQAYANQVVPLASGQASRMIEQAEGYKAKVIGDAQGNASRFSSILNEYEKAPQVMRERLYLETMQEVFTRASKVMVDTKGGNNMLYLPLDKIMQQAAQDAGKPSSSSLGLPGANQPAIPQAPARGSTSGQSSSGSSTSNTLPRDRMSR

SEQ ID NO: 51401 - protein, 217 aa, Bordetella pertussis
MSPQLIDLLITSLHETLLMVGVSGAISVVVGIPLGVLLIVTGRGGMLQNLAVNRVLAAVVNGTRSVPFIILMVAIIPFTRLLVQTSIGTTAAIVPLAVAAIPFMARVAENAMREVDPGLITAARAMGTSPLQIICKVLLPEALPGLVAATIVTIVSLIGYSAMAGAIGGGGLGDLGIRYGYQRFLPEVMLAVVVVLIALVQVVQSLGDWLVRRMSHR

SEQ ID NO: 51402 - protein, 230 aa, Bordetella pertussis
MSAVPDIPGGPAQRLAQACDALRLPADAGQQQKLLRYIEQMQRWNRTYNLTAIRDPGQMLVQHLFDSLSVVAPLERGLPAAGSGARVKLFDVGSGGGLPGVVLAIMRAHWDVTCVDAVEKKTAFVRQMAGALGLPNLQAAHTRIEQLEPAQCDVVISRAFASLQDFAKLAGRHVREGGTLVAMKGKVPDDEIQALQQHGHWTVERIEPLVVPALDAQRCLIWMRRSQGNI

SEQ ID NO: 51403 - protein, 199 aa, Bordetella pertussis
MIEPLYVAGASFLHRLPAGLKLAALALAGVGLFLLSDWRALAAVLAGAALLVWRSGVGAAAWWRQTRGLALIVLAVGLFTGLMQGWPHAAVVVLRVAALIGLAMAVTLTTPVPALIDACERALRPAERLGLLNAAQVALALALALALRFIPEIWRNYQEIREAQAARGLGAHPLALLVPLVVRTLKRAEEVAQAIDARG

SEQ ID NO: 51404 - protein, 329 aa, Bordetella pertussis
MNTPTPVFTDYLRAHQFLGMQPGPRLLVLGAVHGNEVCGTRAIERILAELESGALAITRGQLTLLPVTNPLAYRKGERQGDRNLNRNLRVCATPTDYEDRIGNALCPLLQAHDVLLDLHSFHTGGQPFAMLGPRDNQEALEPFAHAREEARLVAHLGPRRVVEGWMQAYERGVRRRREQNPGAPAALLDAAYGVGSTEYFRAHGGYGVTLECGQHDDPAAPEVAYRAIRQTLALLGLADIALEPPRRDFETLCLVDVVDREADGDAFARPWASFDPVRQGELVGTRADGRQVLAPRDGYVVFPNPRALAGNEWFYFAVASDRLGEDAGN

SEQ ID NO: 51405 - protein, 154 aa, Bordetella pertussis
MSRHRGAKHRRRYELLGGISLLSPEYLLSVERWPFHSEPPDHYVLLSHLFDLSVSQSSTLMPLHYQHDFRPYLAYLRTPPLRFGRRPPQSNCLPCTVPDPDNGPRLEPQTNQGGISRMAPSNLATRVLRLPPILHRPVHSPMQSYSKGSWGLSV

SEQ ID NO: 51406 - protein, 137 aa, Bordetella pertussis
MGLRRSVFGVAASLVGLTRTRLELLALEAAGEKIRLIKLLGMAFGALLFLTLAVLVFTITIAVAFWPTESRYAALGWLAGGYGVIGLVLFFLVRRDLVDGPVPFAATLEELGRDTDMLERVRDAQRASDGQRNAEDD

SEQ ID NO: 51407 - protein, 437 aa, Bordetella pertussis
MAAPVDAVVHGDCRLSHVVILARASGLAALGPGQAHQQHFRESQHDGGDQEQDQAQFEQRRFLDAACLVEFVGQRRGDRVARREQRARPAEGVADHEGHRHGLAQRAAQPQHDAADDARLGEGQHDAPHDFPGGTAQAVGGLLEHGGHQLEHVAHDGGDERNDHDRQDQAGGEDADAERRAGEQAADDGHAAQRGDQRRLHVLLEHRHEDEQAPHTVDDGRDGRQHLDGGAQRAAQPGGRQLDQEDGDAERHRHGDQQGDERGQQRADDGHDRAVVLLDRIPVVQPQERQAILGQRFAAAIDQRDHDGGQQDEHQEGEGPGEVLEQRIHQRVIVLLHRRRRAGSGRIGRGGRQRHTIIHYRAHGQAFLEIGPGVGAMAGRPAPREVRTAIARRSLVRPGRTAPWPIRAYCHTALPSAPLTSPQAARISVVTASGSGT

SEQ ID NO: 51408 - protein, 315 aa, Bordetella pertussis
SMGAAARVQPDDVMDSVQRLRAEARKAGTLSSNKQQKVTTTESAGKTVVVVEPADPQVVYVPSYNPTVVYGAWPYPAYPPYYYPPPPGSAFATALVSGIGFGLGVAAVDAMWGGFDWGHNDVDIDVNRYNNVNINHRIDTSNTRVDWQHNAANRGSAAYADSASRQRFDAQRQAGQQRRAQAGQRAGGGSIDAERQRAAQAFEGHTGHAVARLRRSRPWRRARRGAWARRPADRQPAGPGGRRAAPTGPAQSGSRGRHATPARRPGRGARASRAIQPHAGAARRRRRRAHAPADPARRLRATARRLWRPRRHGRR

SEQ ID NO: 51409 - protein, 218 aa, Bordetella pertussis
MKMDSSQVPNPVLVLVGSPRRDGNSALLAQAVAEGARQSGAAATLLFLDDYIAGFLTDEKEADARRPDDRYGELFFDHFLPARAVVLCTPVYWYGMSAQAKAFFDRSFTYYSASHPRHAEVLRRMTGKRLALAVSSEETYPGAALGIVHQLQEFTRYTHSQFVGMVHGAGNRRGEVAHDPRRPLQAAHRLGHDLLSLPYSDYRIDSPRDHQVWPGAPA

SEQ ID NO: 51410 - protein, 227 aa, Bordetella pertussis
MTTKPRLCTALLTLAIAVSASAPVLAQSMAGGSAKNRYANQTKLDPYPPEGGWQGLANLLEAAKPGVDTRLDPTPSQITDRIEELLNRGANEEALSLIERREAAIKGQRGADVQLMFQHARALAALGRADEAIAVYSDMTTQFPELPEPWNNLAALYASRGELERAQDSLQMALRANPDYAAARANLGDIQLMMALRTYRQEEARGVPGMKARVEEIESLLKDKQPK

SEQ ID NO: 51411 - protein, 327 aa, Bordetella pertussis
MADRPNCFRLGWSWRRGGALPWGRRRCSRLPHRQRQRGHDRRKYRDDRRGQHQQQEERKGHAHQLEQVASGNALDHEQVEAHRWGDLRHFDHQDQVDAEPDRVDVRRLDGRYEHGGGQHDDGYAIEEGAHQDEEDGQHRDQSILAQAQRRDPLGQVGRQAGEAHRAGEIGRAQQDERDHARSPGRAHQAVDERPAVERLAPGGDRQGADGADRGGLGGGRDAGVDRTDDPGDQRHHRQQQAQAGQHGEPGHRGLARRHPRGVAQRPYADVAGEQRHQQQAGQDAGDEQLDERDLGRHAVDDHDDGRRYQQAQRAGAGQRPAMARPSS

SEQ ID NO: 51412 - protein, 841 aa, Bordetella pertussis
MRIASATCACRGVAPERSSAKGSMADNAMRSASSRGARSFPYLMPTRRQLRRALGGQHQAVLARCPCRRCRTRCRGRPTRAPPAGHRDVDAVVAIDRLERRIALVVVAGDDEFPLAAHGLRKQRVGRNRAGRQDALGIVGLRHRRRQDLGVLGAEDAVLAGMRVQARDRHRMVGAAQRARERAGQAQHRAHALRIHILDGLAQRHMGGGVEDIQVAGRQHQREGLDAELVRQQFGMARPFVAGHVHGGLVQRRGDDTVDQAVARQRAGRGDVAHRAVASLGAQLARRHVRQRRAGLDHFDAAGLVGGLGRRRDDAYPRRIAPHGLHGLGQHGGVADHQQPGALAQLVVAEQHLGGDFRAYARHVAQRHRQGGNAGGGSVLRHFVNLRSRIACAARINTSCSPKPPALVTTGSPAAWPPVRVPSGTPPVTSSTSAIPLACNAASTALAPSPPVATTPAAPCASTRRAASSPSLRATLSASSPARRPSGASSIRASTAGMPCSAASTSAVQAAQLRSSASCASVGAQVRAPACCSAAACWRAALCCEVTTTSTGPAACPPAHTHASGAASPPEPTGTARWPSTPMARASRCTSASSRASTTTTGAAAAMRRASSAGVSPACAASWAQPKRVGMCDSVTGVTGSVAAEVSVTGRSLTYSTPWRTVRPVTGNAGQTTAMAPSPQASRAASISALKAPRKVESTFLYRRCTPAARSLSTSPRTTAAASAAAKGRLCVVTASTSAWRTAGSASACSAPPTDSWVAQPARTNCTAVSPDPVRSSATMPMYGPPIQRLTSAGWPVRSSCGSCSTGLSSPARLRKYDASTGARMELISTHAATWAVAVAT

SEQ ID NO: 51413 - protein, 916 aa, Bordetella pertussis
MRLPLLSRRLNALLVSSFLAFQAGAASLPAGVSEVSSIEGITEYRLANGLRVLLAPDASKPTTTVNMTYLVGSRNENYGQTGMAHLLEHMLFKGTPAIRNALGEFSRRGLQANGSTSSDRTNYFASFAANPETLKWYLGWQADAMVNSLIAKEDLDSEMTVVRNEMESGENNPFRVLMQKMQAAAYQWHNYGKSTIGARSDVENVDIAQLRAFYHEYYQPDNAVLIVAGKFDPQTALADIQSSLGKLPKPKRTLPPEYTVEPVQDGERSVTLRRAGGTPLVAAMYHLPAAGSPDFVGLDLAATILADTPSSRLYHALVPTKLASGVFGFTMDQLDPGLAMFGAQLQPGMDQDKALQTLTATLESLSSKPFSQEELERARSKWLTAWQQTYADPEKVGVALSEAIASGDWRLFFLQRDRVREAKLDDVQRAAVAYLVRSNRTEGRYIPTEKPQRAPLAQRADLAAVFKDYKGDPNFKAVEAFDPSPANIDKRTLRRTLDLPNGQVELALLPKATRGDRVQAELLIQFGDAEALRGQRVPLAAAAALLDRGTDKLSRQAIQDRLDQLQAEATINGSGTNLVVNISTLGKNLPDVMALVLDVVRNASFPQDQVEEYKRQAITMVQDAMTDPTALASRALARHNNPWPADDVRYVPTFDEALEQLRSLSRDDLAAVSGKLYGAGRIKFSAVGEFDPAAVEAVLRKGLDGWRSAPAYTRLPDPYRAVPAQQFDIATPDKANAFYISRMPLQLQDTNADYPALYLANFLLGTSETSRLWHRVRETEGLSYNVRSNLSVSSYEPSANWTIYAIYAPQNRARLEKAISEELARALKDGFTDQEVRDGVVALLNYRNLARAQDDVLADTWVNYMQTGRSFQWSADMDRKLEALTPDQVNAALRKYLKPEAFSTAVAGDFTKKSTP

SEQ ID NO: 51414 - protein, 299 aa, Bordetella pertussis
MYFPIVALIGRYQDTGLDAPLTALAQMLTQAGRRVLVEAETARNAGVSGYPVADWDEIGRTATLAVVMGGDGTVLGAARHLAPYGVPLIGINHGRLGFITDIPLQDAHDALGRVLEGNYQAEDRMLLQGGVWRGEQQMYSASAVNDVVLNRAGRGGMIEVRVELDGAFMYTQRADGLIIATPTGSTAYSLSANGPILHPGMNAMVLVPVAPQTLSNRPIVIPDSGVLNMTLTAMGRVEIGASVHFDMQTWSDLQPGDRITVQRAPHIIRFVHPEGYSFFSTLRRKLHWNLMPQATDNLE

SEQ ID NO: 51415 - protein, 832 aa, Bordetella pertussis
MDGGRRPGRPGRFVTEGRRPSGGVLDDQLYRHHAIPDVLLQPVGGLDALGQGLVVAEPDGVEALVAALERQLQVLAAHQALAAHGEFVQEQRGGEPRAPDLLLQQAGHFGIGVAAFERAVGFEQRLEAVAPGELAHRGVEGRGEGGEIAAAQGQAGGHGVAAELAYQARVALGHQVERVAQMHVGDRAARAAQLVLAGRGEGQRGAPELLLQARGHQADHALVPAGVEYAYRGAGGGVGRLHGGQRLVAHLGFDGAAFAVDVVELARHFERLRLVVGGQAGDAQAHVGQPAGGVDARTEGKAQVEAAGGARLAPGHGEQGAHAGLHAAGPHALQPLRDQQPVVGVQLDHVGHRAQGHQVGQRIQARAAIRRVDAAAAQLGAQRQHHVEDDADAGQVLGAETAAGLVGIDDGQGLGQRVAGQVVVGDDHADAGGVGGGHAVDAGDAVVDRDDDVGLAAPMAAGQLDDRRREAIAGLEAVGNQEIHVGAHGRQGAQADRAGRGAIAVVVGHDEQALALLDGVGEHGGRVGRVGQAVGRQQRGPRHTGLLGVDDAARRPQARQQRVDAGRFEVLAGLQIGSTDNQTGRDHQAFQLCLGAGSHRASPARGLRVRAARRSSPSSSSCKGWTGRPCGPASGANCAASSMASASSQAAQSPARWVAASSSQTRAGAGAPAGHGVAPPYSHSALIGAAPRAARASLTGCSYQTIWISLSRRRHGRMATSWVHQARSRWPATAAGLAVCGAMPAGSVRRQRAASMGVAPKPLSANSGAAASNNCALSSARRSSRAGSSRAAWSAPSIRCARSASQTGWPGVPPAARSGPRPAPNGRPGWGW

SEQ ID NO: 51416 - protein, 151 aa, Bordetella pertussis
MTRIDFAFGAPDRLRAACRTARKRFQAGQRLVVYCADGGRLAAFDRMLWALEDVSFVPHVLANDALAADTPVLLTAGDPAAALALATTGDSRPWLLNLDDGCPPNFDGYERLLEIVSDDPADRQAARQRWRDYQNAGHALHSHDLSRAGEA

SEQ ID NO: 51417 - protein, 154 aa, Bordetella pertussis; identical to SEQ ID NO: 51405

SEQ ID NO: 51418 - protein, 329 aa, Bordetella pertussis
MRRLLQLRWRQIDLLDDLGPLGDFRAHETVQRGGCAAGRLQSRGGELRQYVLGLQALVGRGVERLHDRGRRVLRRVQRDPRGRREPGDGFGHGRQFRHQRRTLRTRHGQGAQAASLDLRQRRGHVVEHQLDMAADQVGQRGSADLVGHMLDIGPGHQLEELQRQVQRAASAGGRIGFLARVGFQVRDQALDVPHRGRWVDDHQQRAGCHGGDRFETAGRAVRQVGVGAGVRSMGRAGADQQRVVVGGRSRHIIRADDAARACAVLHDHRLFQLLAHGARQAARGDIGNSSGRIGHYQPDRLGRIGVGVCGAKHPQSQHARGEGNEYSVQ

SEQ ID NO: 51419 - protein, 119 aa, Bordetella pertussis
MRAVVAAFAFRSLGNAMKNQKIRIRLKAFDYKLIDQSAAEIVDTAKRTGAVVRGPVPLPTRIRRYDVLRSPHVNKTSRDQFEIRTHQRLMDIVDPTDKTVDALMRLDLPAGVDVEIALQ

SEQ ID NO: 51420 - protein, 98 aa, Bordetella pertussis
MNAERLMQVILAPIVTEKATFVAEKNQQVAFRVVADATKPEIKAAVELLFKVQVESVQVLNRKGKVKRFGRFVGRRRNERKAYVALKDGQEIDFAEVK

SEQ ID NO: 51421 - protein, 460 aa, Bordetella pertussis
  MISC_FEATURE (112)..(112): X=any amino acid
SMQRRLTLWLGVIALLASSLAGALLFWTLKQEVQRQEITEARGKAELIEHLVGMQSHTSRALSDMLDGIQAGHGHLGIWITSPDGTLRYGNATPEVLSVTDDDEVLLAQRRXHPHARRAADPAGPARGRRTLTVAVNTLANARFLYAYGTALLLICALWIGATVVLAAWAVRRTLAPVRRLSGQAASIQPEHLDVRLPVVGIDRELSDLVASFNRTLDRLQEAYQKMEGFNADVAHELRTPLATLINGAQVTLSSPRSAEELREALTSNLEELEDLKTLVNDMLFLARADRGEQAADLAPARLEQEALRVAEYFEATLEAQALHVAVQGSATCAANPGLVRRALANLLANAIRATPRGATITVRCAALPDGAARLTVHNPGPPIPAADLPRIFDRFFRSGGARPPRGEGHGLGLAIVRAIARMHNGGVTAASGPAGTEIGFSLGARPAQDDKRVIPGDRL

SEQ ID NO: 51422 - protein, 91 aa, Bordetella pertussis
MSRSIKKGPFVDAHLIKKVDAAVAGKDKKPIKTWSRRSTVLPEFIGLTIAVHNGRQHVPIYINENMVGHKLGEFALTRTFKGHAADKKSKR

SEQ ID NO: 51423 - protein, 109 aa, Bordetella pertussis
METTAIIRGVHISAQKTRLVADLIRGKSVAQALNILTFSPKKAAVILKKAVESAIANAEHNDGADIDELKVTTIFVDKAQSMKRFSARAKGRGNRIEKQTCHITVKVGA

SEQ ID NO: 51424 - protein, 138 aa, Bordetella pertussis
MLQPSRRKYRKEQKGRNTGLASRGTHVSFGEFGLKATGRGRLTARQIEAARRAINRHIKRGGRIWIRIFPDKPISQKPAEVRMGNGKGNPEYWVAEIQPGKVLYEMEGVSEELAREAFRLAAAKLPISTTFVARHIGA

SEQ ID NO: 51425 - protein, 63 aa, Bordetella pertussis
MKASELRSKDAAELGKELESLLKAQFGLRMQKATQQLANTSQLRNVRRDIARVRTLLTEKAGK

SEQ ID NO: 51426 - protein, 93 aa, Bordetella pertussis
MSETQNTQVAKRQRTLVGKVVSNKMDKTVVVLVERRVKHPIFGKIIMRSAKYKAHDESNQYNEGDTVEIAEGRPISRSKAWRVVRLVEAARVI

SEQ ID NO: 51427 - protein, 106 aa, Bordetella pertussis
MNNIRKGDEVIVLTGRDKKRRGTVLARVDADHVLVEGVNVVKKHVKANPMANNPGGIVEKTMPIHVSNVALFNPATGKGDRVGVQEVDGRKVRVFRSNGAVVGAKA

SEQ ID NO: 51428 - protein, 101 aa, Bordetella pertussis
MAKLSLINRDIKRAKLADKYAAKRAELKAIIDDQSKTDEERYQARLKLQQLPRNANPTRQRNRCVVTGRPRGVFRKFGLTRHKLREMAMKGEVPGMTKASW

SEQ ID NO: 51429 - protein, 61 aa, Bordetella pertussis
MAQKQIKVTLVRSVIGTKQSHRDTIRGLGLRRINSSRVLVDTPEVRGMIHKVGYLVSVSEA

SEQ ID NO: 51430 - protein, 479 aa, Bordetella pertussis
MPRRCGALSLAGLAGASGQRGLALVQRLQRFALAHDVVAVAVDHDFGRAHPGVVVAGHDHAVGAGRLHRQHVAGLDRQGAAARQPVGAFADRPDDVVLDPLVGPRRDRLHAVVGLVQGRAQQVVHGRVDNGEVARLGVLEVLHRGQQHAGIAGQRAAGFQHDMQVPQAARVDALEHPVEQGLGRGRDFVRVADAQAAAEVQVLDGDAVLGQLLDQVQQLFQCVEVRADVGELRADMAIDANHFDAGQASRQPVCRRRGLDGDAELVFLQARRDVGMGLGVDVGVDAQRYARAPAHGDGDVGQALEFGLGLDVEALHVGFERGAHFPGLLAHAGEHDLGGVAAHGQHARQLAAGHDVEAGAQACEFLQHGQVGVGLHAEAHQHRALADGVAIGLPGRAQRGAGIDVQRRAQLGGQAVERHVFGVQHAVLVAEMGRASQVGLDGNGGHGRDGAGGMEEGGVCCPVGAGWPGSGGGRYRGPL

SEQ ID NO: 51431 - protein, 236 aa, Bordetella pertussis
MALDGGHGRADLAADLAHGLALHHQAQYLFLPLGQLHGAAHRRRAGLHRQRVALAAGHHQADRRAQRVGAERLGHIARHAGARGRREHRQIEFEVQQQHVARRQRRDNAREHQLVVLAHARTAQDRQFRRPLDAARHGLQFGGRERPYLSGAAPMLQHVLDGDSQQRIVFDENGRHAHGPLAASPGWTRACPCAPAIRRMHGRGRRPAGACAGISICHPRHAWHPAAGATQACVCR

SEQ ID NO: 51432 - protein, 267 aa, Bordetella pertussis
MPLFVNLLADVSSIDPMESYAVWIAAHPIIIFVAAPVLAAAGALLLWQLVAGLPAGRRRTMVFAVLALVAVGVFGALAASVEHQGGMVAFDQALARALGLSMPAALLWVLSWFTHLGDRTLLTLVAVGMTLTLLWRRRWVLAGACVAATGGAGALNWLLKRAFQRVRPDHLHGYTLADGWSFPSGHASASMAVYGIACYLMLRTLPARWRSSALAGVAALIVAIGVSRVLLQVHFLSDVVAGFAITAAWLALCVAVTEWALRVNARA

SEQ ID NO: 51433 - protein, 183 aa, Bordetella pertussis
MSSHSQEPVGEENFDDSEYDRPNKSQVKREMHALLDLGKELVELSPERLRQLPLEERLYEAIREAQRTTGREGRRRQIHFVGKLMRSAPAEAIRAQLDTWRNGSREETAAMHRLEALRERLLTDDDALTAVLQRNPDADIQHLRALIRAARKEAAANAALSQGQEPQRKQYRALFQALKNLSA

SEQ ID NO: 51434 - protein, 413 aa, Bordetella pertussis
MPVVQLKIFAVLALLIPALALVSKGGGVAVFYTLAVLTSLAIMVYAGRGRAQPSWRDLAWPGAVLAVPLLSMLVTNAYLGIWSGSEFEKLLRFALALPLFWVLLCVPRPWLQQIQWSLLFSAYAGAIMLYVIVGWYGGRMQVSFYGAEYNAVAFANLTLFFGFASLLTLGWRLTPWPGLEALLKVGAACAAVYAAHVSETRSSWMLLPVFGLVFLMSRRVWSLRRKLAVGLVLVAALAVLAGVMLSSQGNRMHKILTDLQRYTVQNDRNTSVGIRLQLWHASWMIFQEAPVLGVGPRNFRAELAKLRDQGVVTPEVASGYGEPHNDFMAAMAGYGLLGLLSILLLYLAPAWVFLRRMASDDRVIRTGAQIGLLFCLGYCAFSLTEMMFRNMRSVPIYSATLVLLLALTAPRAA

SEQ ID NO: 51435 - protein, 417 aa, Bordetella pertussis
MHQEIALGVVRVVVPGGLVRLPVLVVDLLLQRFGQRRTAVGVHQPAPRALVVEQHAVHGVDAVLHGRVSAVHAHREAGLAQNAQVRLARVLAAGVAAAGVRIDRDAVPLVLEPFLQHPSHFRRVPDLRQLAHRQRQAGPYHVDSGRHVQHVEVHADVQLFVRLLGRVRVVQAPVEVGVDATAGQVGELPTQVRRDELRRVARAQRRDVVFRQVLAVLVGAGLHQAIQRGQLGPLADLLDELLVDELEALGRRGHVHAVEQPGRGVAQAGDDLAPGQRSLVRLHHVQLVDQPFADLEAHDVARLLHRTADYRAAVLAAGEQMDFLVRLVDLGGQAPVVGHLLDRRVEDVPDLAVGRREVPRVDPGELPGVTAQACSANPGLAAAEAGDERAELVRQRQEAGLGLVKRRHQGCSCSPLQ

SEQ ID NO: 51436 - protein, 281 aa, Bordetella pertussis
MEQVLFIVWRESVEALLVVGILYAWLRATPAGRRGMPYLWGGVAAGLALALLLALVLLGVSSWLSDEGQEWFQAGMSLVACALVVQMVIWMKRHGRTLKRELEGGARASIERDNWWGLLVLVMIAVAREGSETVVFLYGTVAAAAGQAGDAALLVLAGAAGFLIALLTFWLLQLGGKLITWRRFFRVTEILLLLLAGALLVGGLDHLISLDVLPTLIDPVWDSSWLLDDSSGMGKVLADFAGYRAYPALISVLLWLAYWLVVWLLLRRADGAAAISARSAA

SEQ ID NO: 51437 - protein, 144 aa, Bordetella pertussis
MKIGELARTAGTTVETVRYYEKEGLLPAPERGLNNYRSYGEAHVERLRLIRNCRALDMTQDEIRTVLALADNHEAGCAPINQVFDEHIAHVDARIAELTQLKAQLGELRQRCASARPDAEDCGILHGLSEMQVEERPERHTHLG

SEQ ID NO: 51438 - protein, 168 aa, Bordetella pertussis
MTQDPASAASPAAIAPGAAAPTVGSALRALRQAKGWSLEEVSSRIKFSTRMIQALEEERWESLPKGVSLRGLVRNYARMLGADAQAVVDSLDLEAARTPAPARPAPRGGQGLRPAGVNISVDDERSSGSWGWLLAILVVVAAAVAYAFWQGWLPQEWLPAQWFSPVTQ

SEQ ID NO: 51439 - protein, 37 aa, Bordetella pertussis
MKVMASVKRICRNCKVIKRHGVVRVICTDPRHKQRQG

SEQ ID NO: 51440 - protein, 154 aa, Bordetella pertussis; identical to SEQ ID NO: 51405

SEQ ID NO: 51441 - protein, 945 aa, Bordetella pertussis
MSPTNRLNAVQRQHLDQALAWLRGCVAPTADLRLDSREIEPGDVFVACPGLVSDGRQFMDQALARGASAILYETEGAPVAPAGAQALPVAQLRTLLGALADEWYGRPSQDLSVVAITGTNGKTSCTQWLAQVLTRMGKPCGSIGTLGALLPDGQSLGGSLTTPDVLTMHRTLARMRAAGARAVALEASSIGIEQGRLDHIRIAVAGFTNLTRDHLDYHGTMQRYEQAKAALFQWPDLQAAVVNADDPAGERLLASLPAALKTGYSLQGAPADVHARDLQATAHGQVFTLTLPDGEVQIVTRLLGQHNISNLLLVAGALSKLGWPLPQIARELAAISPVDGRLQAVTPVPLQHLTAGAQGALVVVDYAHTPDALARALTALRPVAQARGGRLVCVFGCGGERDPGKRPEMGRIAVERADRVVVTSDNPRSESPQDIIDQILAGIPAGMRAAVQPDRALAIMQTLWSAAPDDVILLAGKGHETYQDIGGRKLPFDDRQWARLALLLPHAGAVSTDTRRIGRGELFVALSGENFDGHDYLPQAQSAGACAAVVAHPVADVALPQLVLGDTLAALGRMGTAWRSSFTLPVVAVTGSNGKTTTKEMISAILAQWQGDDGRLATAGNFNNEIGVPLTLLRLRARHRAAVFELGMNHPGEIERLAAMAAPTVALVTNAQREHQEFMHTVEAVAHENGAVIGALPEDGVAVYPGDEPYAAIWDKLAGARRVLRFGLQPGLDVYAERVVTQAHGTQCGVVTPAGSAGLDLPVPGLHNLRNALAAIACGLAAGAPLHTCIAALAGFQAVAGRMQHRQMSDGTVLIDDTYNANPDSARAAIDVLARLPAPRALVLGDMGEVGDNGPAMHREVGDYAREHGIDALITLGEASRDAAHAFGPAARACASVDEVVAALRGLRPSSILIKGSRFMRMERVVTAFSGNNQAPSGQGDKHAA

SEQ ID NO: 51442 - protein, 126 aa, Bordetella pertussis
MSNTSIETVTSTADRIKLGLAVLVVIAGIVGFSMLDAQPMVARIGVFVGGLVVAALLAWFSEPGRRTLSFAGESYNEVKRVSWPTRKETIQMTGIVFAFVAVMGLLMWVLDKGIEWVLYGLLLGWK

SEQ ID NO: 51443 - protein, 174 aa, Bordetella pertussis
MSLNRQEKAVVIEEVSAQVAKAQSIVIAEYRGLDVASVTVLRKTARESGVYLRVLKNTLVRRAVAGTAFEPLSEQLTGPLIYGISADPVAAAKVLAGFAKSNDKLVIKAGSLPNSLLTQDGVKALATMPSREELLSKLLGTMQAPIAQFVRTLNEVPTKFARGLAAVRDQKAAA

SEQ ID NO: 51444 - protein, 127 aa, Bordetella pertussis
MALSKAEILDAIAGMSVLELSELIKEMEEKFGVSAAAAAVAVAAPAAGGAGAAAAEEQTEFTVVLLEAGANKVSVIKAVRELTGLGLKEAKDLVDGAPKPVKEALPKADAEAAKKKLEEAGAKVEVK

SEQ ID NO: 51445 - protein, 79 aa, Bordetella pertussis
MESIEQRVKKIVAEQLGVNEAEIKNESSFLDDLGADSLDMVELVMALEDEFETEIPDEEAEKITTVQQAIDYINSHGKQ

SEQ ID NO: 51446 - protein, 293 aa, Bordetella pertussis
MAAPSGASPQSEYIQHHLVHLNNIGEKQSVIAQFNVINYDSLFWSILMGLLVVFCLWLAARRATAGVPGRFQGFIEMIVDMVDDQAKSIVTNAKSRLFVAPLALTVFLWIILMNALDLLPVDLLPSIWRMTGLGAEHGDPLYYHRILPTADLNVPMGMSLGVLLLMFYYGIKIKHPGGFVKELFTAPFHAHGLASLVLAPFNLLLNLIEYAAKSVSLGMRLFGNMFAGELIFMLIALLGGAWTGFNGASIGLGIGHVLAGSVWAIFHILIVLLQAFIFMMLTLVYIGQAHEGH

SEQ ID NO: 51447 - protein, 80 aa, Bordetella pertussis
MTNVAFVALACGLIIGLGAIGACIGIALMGGKYLEASARQPELMNALQTKMFLLAGLIDAAFLIGVGIAMLFAFANPFVG

SEQ ID NO: 51448 - protein, 156 aa, Bordetella pertussis
MNLNATIFFQMLVFFVLGWFTMKFVWPPLTKAIDERRQKIADGLAAAEKGKADLAQAQARVSLIEASAKSETHARIIEAEKQAASMIEQARREAEAERARIVAQAAQDAAQEVQRAREALRDDVAALAVKGAEQILKREVDARAHAELLNQLKAQL

SEQ ID NO: 51449 - protein, 179 aa, Bordetella pertussis
MAELSTVARPYAEALFGAARDDKAGLAVWADLVSEMAQVAANPDVREAMADPRLDDKQRSEVFTGLIKSQLPQAARNFIELLVKNDRLLLLPVIATQFVALKNRHEGTAQAEITSAFELSDAQVKELIAALELKFGLKLKPHVSVDQELIGGVRVAVGDQVLDTSVKAQLARLRDTLAA

SEQ ID NO: 51450 - protein, 168 aa, Bordetella pertussis
MSEQELKLHVPAAARAAVQQQIQQRQAARIRLHAMYFDTPGRELARARIAIRLRQEGRDWVQTLKMPGANAISRVEINHPRPGPVLDLSVYAGTEAQAALTAIKGELGLRYETDVQRLFCKVRGRHGTVELAYDTGVLRAGALELPISELEFELVSGRPAAIFAMARS

SEQ ID NO: 51451 - protein, 559 aa, Bordetella pertussis
VPTPVILSVPIMPATHPAPDPLWYKDAVIYQLHVKSFFDANDDGVGDFAGLLAKLDYIVELGVNTIWLLPFYPSPRRDDGYDIADYRGVHPDYGSLADARLLVRAAHARGLRVITELVINHTSDQHPWFQRARAARPGSAHRAYYVWSDDDKAYAGTRIIFCDTEKSNWTWDPVAGAYFWHRFYSHQPDLNYDNPQVLREVLGAMRYWLDMGVDGLRLDAVPYLVEREGTNNENLPETHAILRRIRRVIDSEYPGRMLLAEANQWPEDAQEYFGAGDECHMAFHFPLMPRMYMAIAQEDRLPVTDIIRQTPSIAPQCQWAIFLRNHDELTLEMVTSRERDYLWNVYAAEPRARINLGIRRRLAPLLERDRRRIELMNSLLLSMPGTPVLYYGDELGMGDNIHLGDRDGVRTPMQWSPDRNGGFSRADPERLPLPLLMGPLYGYEAVNVEAQQRDPHSLLNWTRRMLAKRRQSHVFGRGELSFLYPGNRKILAYLRTWEDTVVLCVANLSQAAQPVELHLSEYAGRVPVEMLGGTAFPQIGELPYLLTLPPFGFYWLDLS

SEQ ID NO: 51452 - protein, 265 aa, Bordetella pertussis
MQALAAMPAPVAASVRIVLTDIDDTLTTEGRLPAGAYAALERLEQAGIVVVPITGRPAGWCDHIARMWPVRAVVGENGAFYYAYDRSARRMNAHYWADAATRAANRQALQAIRERVLREVPGTAVASDQDYRVADLAIDFCEDVPALPDSAVGRIVEIFHEAGAQAKVSSIHVNGWFGDYDKLTMTRTLFEREFGLSIDSALQHTLFIGDSPNDEPMFKFFPISVGVANIQSQLHRIQHRPAFVAAARGGDGFVEMAERLLANRG

SEQ ID NO: 51453 - protein, 245 aa, Bordetella pertussis
MASNLQEDAGASPGRCKRQGRQEESRESRAAPGAAQDRARGDWTPRLWPARHSARAAAALSRRPKPLAQHGFLTFPQARTRIVDSVFGRIAPGLPAPHGAWMGITGKHAGAPAKPCAPCESQCCTAGHANACNPHFNLRIYPMYAVIKTGGKQYRVATGEKLKVEQIPADIGQEITLDQVLSVGEGDQLKVGTPLVSGAVVKATVLAHGRHDKIKIFKMRRRKHYQKHQGHRQNYTEIRIEAITA

SEQ ID NO: 51454 - protein, 403 aa, Bordetella pertussis
MAACEGLHCSETSRRSLSDRLLDDGQMRPLGFVAVAIVASRRGGGIAGLGRLGRRGGGVRVLGRFVGLHLEAHAGAGFARVDGADGAHRHVDVLGDAAEAGLEFDEFVAQRQLVGGQRADVQGDLSIAHMGDGHHGVLVDLHGDVRRVAVVRAPLVQCADQVRFGRSFAHGLPLAAHDFFGRRQRFDIGRAREDAFGVLLQGRGVLGQFDAVVVQAPQQRGHGHVEHREFIAQHVLVLQQHRGQLRETVADALAGLHHLLVVRLGAAVFQGADVHEQLFLEVVQEQAGARAHDRVGRHQLRVREALVDVLVDDVGLVQHQVAFDQNGHLTVRVHDRNVFGFVVQVDVADFEIHSLLEQHETAALRERAGGSGIEHHHGDKSLYEKRKASAAKLAGAGPDCQAG

SEQ ID NO: 51455 - protein, 361 aa, Bordetella pertussis
MMQTESNPLAERFIARNLLDLAIRITLIGGLTVWCYRVAEPFIGMLLWSIILAVTLAPLHMRLTRLLGARPRLAAVVLTLATMLVLLVPGAMLTASLGDSLVNIFHHSTGRIVRIPAPPDFVIELPLIGVRLHEIWLQAMTNLQDVLKPLQPHLATAGRWLLAGMASAGLGIAVFLASIAIAGVILVYADPAKRAAHAIGVRIAGPEQGVALAQLTAATIRAVAQGVIGVALIQAVLAGLGFLLAGVPAAGLWAIVALLICIVQLPLFLLMVPMVVYVFLNNTPTVAIVFAVWCLLVSLCDNVLKPLMLARGVDIPIPVILIGALGGVLAAGIVGLFLGSVGFGLGYVLFMQWVRQQSPAG

SEQ ID NO: 51456 - protein, 230 aa, Bordetella pertussis
MEFPQWVVDRVQARQGCLHPYDSLPGPRTAAVVIDMQRYFTLPGYQGECAAARAIVQPINRLCAAVRAAGGSVVWVQTASDHADSFWSHHHGVMLTPERSKRRLETLKRDSEGYALHPDMDARAEDVRVTKRFYSAMAPGSSELEPLLRGRGIDTLLIAGTVTNVCCESTARDAMMRDFRTIMVDDALAAVTPAEHENALHGWMLFFGDVLSVDEASARLAAADETRRIA

SEQ ID NO: 51457 - protein, 582 aa, Bordetella pertussis
MQDDNSFPDNESPVAQPPVDESAASGEAGDGEGGARARGRKLRTPFRRRRGDAAAAGEAGADEAGSQPAAQSEGDARASERDADQALAYLDNAARIEQRLGKYLNSEAVMPKLHKVLADAGIGSRREMEELIVAGRVSVNGEPAHIGQRVAPNDQVRVNGKPIARPNAKKPPRVILYHKPAGEIVSHDDPGGRASVFARLPKLRTGKWLSVGRLDLNTEGLLIFTTSGDMANRIMHPRYGTEREYAVRVLGEMDDAQRKSLTEGIELEDGKAAFGSFEYLGGDGSNRWYRVTLQEGRNREVRRMFEAVGVTVSRLIRTRFGDIVLPRNLRRGRWEELDGSLVTALMVQLGLLRDGDESEGRRKSRQPQSHDSALPPGFGTLERNGMNGARIGRRGKLQGGRPGSAAACPSDPFGTGLMITGGYANGHPLGNDSAAGRGGKGKPAKGKAGGDKPQRGQGRKAAGAQAGGQGAAAKPAGARGGKKAGGRAAAPGAKGAGGRAGGNKAASAGGKAAGVAKPASPTGNRGPAAPKPQRARRGGGGAGGGGGGGGGGGGRGDDWQPKGAGAHESRLGFMGGRGGRGR

SEQ ID NO: 51458 - protein, 300 aa, Bordetella pertussis
MPHVRPSNAWRFLRTLWLGAWLAGWALLAQAQQLAPVPEFGARVVDQSGVLDAAQRQRLEAQLAALEQRKGAQVAVLIVPSTAPETIEQYATRAFEKWKIGRDKVDDGVLLLMASDDRALRIEVGYGLEGAIPDSAAGRIINEYIVPRLRAGDWPGAVQAGVTALERRIEGEELPPPAASGRDEGSRLAGIRGWLGENGIAALVVLLILPGPIAAALAGVGVAIYMQSISAGLAMALLVLGIKVIIKALPSGGGGGGGGGGGSGGGGFGGWRGGSGSGGFGGFRGGGGGRSGGGGASGRW

SEQ ID NO: 51459 - protein, 611 aa, Bordetella pertussis
  MISC_FEATURE (610)..(610): X=any amino acid
MNTNLYRLVFSHVRGMLVPVSEHCTVGNTFCGRTRGQARSGARATSLSVAPNALAWALMLACTGLPLVTHAQGLVPQGQTQVLQGGNKVPVVNIADPNSGGVSHNKFQQFNVANPGVVFNNGLTDGVSRIGGALTKNPNLTRQASAILAEVTDTSPSRLAGTLEVYGKGADLIIANPNGISVNGLSTLNASNLTLTTGRPSVNGGRIGLDVQQGTVTIERGGVNATGLGYFDVVARLVKLQGAVSSKQGKPLADIAVVAGANRYDHATRRATPIAAGARGAAAGAYAIDGTAAGAMYGKHITLVSSDSGLGVRQLGSLSSPSAITVSSQGEIALGDATVQRGPLSLKGAGVVSAGKLASGGGAVNVAGGGAVKIASASSVGNLAVQGGGKVQATLLNAGGTLLVSGRQAVQLGAASSRQALSVNAGGALKADKLSATRRVDVDGKQAVALGSASSNALSVRAGGALKAGKLSATGRLDVDGKQAVTLGSVASDGALSVSAGGNLRAKQLVSSAQLEVRGQREVALDDASSARGMTVVAAGALAARNLQSKGAIGVQGGEAVSVANANSDAELRVRGRGQVDLHDLSAARGADISARGASISAVRAAIAMXR

SEQ ID NO: 51460 - protein, 847 aa, Bordetella pertussis
MDIGFLVFGLAGLLTLVCFMPPLAGRLKLPYSVLLALVGCLLGIGVHLHGWAPPVLGDLLDTIEHFEISSETFLMVFLPVLLFETALSMNVRRLIDDIGPILMMAIVAVVVCTLVVGFAVDAVSSYGLIVCLLLGAIVATTDPAAVVGIFREVGAPKRLTTLVEGESLFNDAASIALYSVLLAALGGSGELSVGAVFNDFIFHFVGGGLAGFLMGRLACALFAWLRGFPTAEITLTLTLAYLSFFISEHYLGVSGVVATVIAGLVVDSTGRTRMSPTTFEFLSSAWGQFGFWANSLIFLFAAMLIPKLMAEADWQELLLVLVVFAATLAARAIVVFGLLPLLRVARIGAEVSNPYKSVMWWGGLRGAVSLALALAVTEQSSVPEQARQFVAVATTGFVLMTLMINGVSLRPLIRMLGLNQLSPVERTIRNQVLAAALEDLQGRTEEIAKVDHVNPEARDRIRAMFDASLTSVHDGQVGQMTLDQRVAVGLSIVARREEEMFFDILKAQIVDWRLAEGLLARAERLEDAVRAGGLAGFEAGIVADVRYWRLFRMALRTHYMFGFQGWLARELGKRFASLLTKRSVARDLMKFAREQVAPLLGEEAADRIIAAHQRRLDLIENALQALTLQYPSYSLWLQESHLGRVARELERRRYRDMLEQFLISGEVYADLMAQLKARWQHIDKHPPLDIELGSAELVKRVPLFEGLSQDSLRAICRLLKPRLALPDQHILTEGRHGQEMCIVASGAVVVHLPDHTTIELGSGEFFGELALLGEEQLVPDVTSLGYSKLLMLSARDFHALLARDEHLHERIQTVAKQRMRAIEVWKQYSQAAAAAAASTASEDSAPA

SEQ ID NO: 51461 - protein, 246 aa, Bordetella pertussis
MSLPRFYCDARLAPGECVALPEALAHHAVRVLRLRAGAALVLFDGAGGEYPATLEIEGKAAWAQLGAHVPREAELPGRITLVQGLPAGDKMDWVVEKAVELGAWRVSPIAAQRSVLQLNGARAEKRLAHWQRIAQAAAEQCGRNRLMAVDAPQALAAWLAQAPGAALRLLCHPEAELDLAGALARHAAHDDICLLVGPEGGWSDEELEQARAAGVQAVRFGPRVLRTETAGIALIAAVSAIRGWNG

SEQ ID NO: 51462 - protein, 210 aa, Bordetella pertussis
MNFLTHRDSLSSDLDRDMAGLLLDTVTAALGASRETLHRLSLVHKNGGDLQLVDIGAVVVLGVGDSRLDSLLQDDGGLLGREGEDVQGLSHRLAADQVRNQTGLLSRDVNTTDNGSSFHRLPLRLLVRGVTLERTGQRELAQLVTDHVLVDVNGNVLAAVVDGNRQADEFRQDRGTTRPGFDRLLVFARDSRIHLFDQVRVDKRAFLDRT

SEQ ID NO: 51463 - protein, 215 aa, Bordetella pertussis
MKKAAHASRLFHCTPVRSGGRRHAVDEGWACRQLFIQAGQVGVIGAPVQVRKAQVQIAQRAAHGDVGQAVVHAHAVGVFAQAVVHGVQAGAHLAVLALDPFGALLRGRAQAFAHDGDAGVEQAVGDGFPALDGRAFAARLRNQPRHRRQGIEVFDDHARIEQRAAVFHDEAGYLAQRVVLLYLRIRRPDVLQLELVVQLLFCHNDPHFADVRTGK

SEQ ID NO: 51464 - protein, 1169 aa, Bordetella pertussis
MAAADRAVRQPGAGFAGGDSLSADWSGLNPRLNLSGVRIYDHQADPVLSLPSVAAVLGWRSVLKLSPTLQSLRIDGADLLVRRDSADRLWVAGQSIDLAAPSDHGFTESPALRWLARQRELALHGVTLRWQDEARQAPELRLDGLDLLMRNGVLSHRFSLRVRPPAQLAAKVSLRGELNRSLFARDGSNPASWSGQLYAEVQDAEPAAWAPWVAIPAAQGRYAARAWLQLDHGKFTDLTMDAALRGLNWRAGQSASVSVDSAQWRLQGAPGDLLQFSDLPLARSADGAGVSVTGQADGLWLNLPEIFEHPLALDRAQLDATLTEPAGQPLTLNLRRLQLANPDLDATLHGAWRQQGKSAAGTADLRGSLARASMPAIHRYLPLEVNEDARLWLATGLPAGTVHDAAITLAGDLDDFPFSEPGAQGQFRIAGRYQDAVVDYAPAEGKRKAWPRLEQLSGNFAVDKVSLSLDSAGGGLVRTAADQVVSLGAVKAAIPDMEDHAQLHVEGQSSGAVPAYLALAANSPLGELLDGALAEAEGTGQWEVPLALDVPLLNAEDTKVEGRIVFAGNAFRFMPEMPMLTQLRGELAFSELGMSAKEIHARFLGGPARIWGVLEQGSAPLRFEGTLTAAGLGEVSKAPALKRLSGQSAYRGQLNYLKGGAVDISMESNLDGLAIDMPAPVGKPARGAMPFKLQWGPANDRGPRGRRWLSGSLAENINVLLEYDPADASRAYFARGALGVNRAASLPQRGLTVAATLPELDLDAWDAMKADFDEPSSGRRQPSRVPLLPQPDQINLAADRLRVAGYTLDDLKLAAQRPTASQWRVTVDSRQALGTLEWTEASGAIAGRVTGRFKRLALAGEEDTRQEEDALSAGNDLEDIPAIDLQAEEFSLYGKQLGSLQLIGTNMERGRLWRLDKLQIANDAARLDATGNWRLDGTQRGLTVQANAEFSDLGKFLDRVGLPQTVGGGKGSLEGTVTWRNLPWSYNLAELEGKARVSLDNGRFLHVNSRAARLLELLSLQSLQSLQSLQRLARLDANPGGLLREGFPFDTIRGDMSLSQGVLTTEGYKLSGPVAGIVLAGNTNIVDERWDMRAVVVPNLDASGAAAVTAALVNPLIGLGAFVTQWLLKQPLARAMSSEYAVTGTWDDPKVTPVESRAPTRQQEPQPEH

SEQ ID NO: 51465 - protein, 207 aa, Bordetella pertussis
MPEHGTRTEPGGSDESKSALVLGIIQGKTIVAEASPQYDLSPSEVEQYECHLKDLQEAYGEAMLEPRARKNCSPCWTRTRSDRDDPPGTASRRHHRLDRQAVPLVQRAAAHGLLFDNGLVCTSRSYTALVRGYGLRQDFITPHCPQQNGMIERVIRTLKEQCAHRHRFETIHHASRVVGDWIRFYNRRCPHRALGMKTPAQAFALAA

SEQ ID NO: 51466 - protein, 429 aa, Bordetella pertussis
MRVSISAMGSLMLIFVLLPAGLGHAGNFALHRHFTQFVAGQAELAEHAARTTGNHATIALASGVGIARQLLQLEPSLVTFFVGLRLVVDDRLQFGALGGILVSQLGALDITIDEGEFSHVISPLVTEREAEGRQQRLGFVVSLGGGGDADVQPTQRVDLVVFDFGEDDLLFHPDVVVATAVERTTRDAAEVTHARQRDRNQAIQEFVHALTTQRDHATDRIVFADLEPGNSLAGLGHHGLLAGDLGQVGNSVLDDLLVGDRFRDTHVQGDLGDAGHFHHALVAELGLQVGNDLALVKLLQTRHVCRPLRLGADHGAIGTEHANLATVHFLHADAVALAGGRVEQRHVRNVDGHGLFDDAARIVGHRVGLDVLLHDVHAFDQHMVGVNAGQHGAATLLVAAGQDDDFVAFTDVVHRGLLTALPGPATRSS

SEQ ID NO: 51467 - protein, 112 aa, Bordetella pertussis
MPNQAAQLSQVFQALSDPTRRAVLERLCQGSAAMSELARPFNMALPSFSQHLDVLERCGLVRSRKSGRVRIYTLAPQPLGMAEHWMTRQRAIWERRLDQLDLYLQDLKEQKR

SEQ ID NO: 51468 - protein, 487 aa, Bordetella pertussis
MITSRHWVVLDCTSLPPINSDFAHFSAPHTAWNAARRAVLDRRCRRRSRGARHRTGLLLDQRAGRLGQRLEGLGGRNGGHQLGIVPAALGLGRLFDFVQIHVVDHPAVGPDARVAHDRVLDRQFAHLVGHDLAVGTAAGGDRAQVMQHARIDAGLDHGGLQAAKRLLEARRPLARRVVIVPVEAVHIGQALGVVQPQRAQVGQEDQQRNEPLAAFDDAELARLLDRVDRILAAIGQRHDLGLGALRLQQVRGEIGRVQGVAHAACHRAAQRLDGLGGIGLQRVAEGVIDGDEVPGLAARPHRGLGPAGRLRIGVEHPVKAQRRAILVGQRRGGRPGEHHDLVLLARDTLHRQRHGRVGQVGDGRDPIAVEPLARLGRPDVRLVLVVGRDQVDFHALAFGGQAIVDRQLRRRDRTRPAHAGIGARHIGQDADLHRRLVRRHRLTHQHGAQAQACGKPACARFHESVSCGFSRSCTGAPKASARPSVDV

SEQ ID NO: 51469 - protein, 324 aa, Bordetella pertussis
MLRLGVGARRIVDVLGGQQRGQFAVAGDHGIEDLRVFVPVLLGASHVAGREQQGGAVAQRAHQVGQHHVAGDGGQHLVELRIERQELLQVVAARRFGPIVEELAQPRHGGVVAALRGQLGVQAFERGADFDHVVGDGLGRHRHRRAAARLDRDQAFGGQGAQGFAYRDARHTHVVGEPAFDQPVARRELAAEDALAQFVANDGEQRHVLLADFQRRGGMAGVERIRAGTRNCHGVVRADGTVNTVSIVLLCYTVRASRPAAARPRLQAPSAARASTTSAPMAQMPSRMRRTVAGRMRSFRRLEQEKPSSRNGSRPTLSRNSLTP

SEQ ID NO: 51470 - protein, 324 aa, Bordetella pertussis
MTPPLIRSDRSAPPSPATQDNRKALGLAVLVHLLLLLVLIFGVNWRSENPGPVQVELWADGDSPVNPPPDEVKPQPKPEPQPEPEPQPQPEPEPEPEPPPPPPPPPPPQPEVQPKEQPDPEIALEEARKKREQEEKARQAAEAAKEKARLEEERRQAELKEKQRLEQERRAAEKAAAEKAAAEKQAAEKKAKEEAAKKAAADKALRDAFRNDALGAAGIPGGTADRNQAGGGRDSGYGAKVRACVQPGVAYPPPPRAGSANPTAQYRVQLGSDGKVNGVTLTSSSGNPGFDRAVETGIRRCNPFPKPSTGRYEPIIDVVYRMYD

SEQ ID NO: 51471 - protein, 123 aa, Bordetella pertussis
MPRATLPAEARLHRPSEFAAALKGRRLARGAFFIVSASPCAPADDQPARARLGLVIAKRFAARAVTRNTLKRVIREAFRARRLALPAQDYVVRLHSKLTPASLTALKRSARAEVDAHFTRIAR

SEQ ID NO: 51472 - protein, 632 aa, Bordetella pertussis
MAALRFFGLKVGYFRALVTPPRMPPSRPPPAAPLPTAPVTPPSRPPSRPPLAAPGAPPEPPEPPEPPEPPEPPEPPEPPEPPEPPEPPEPPPVTPPSRPPSRPPLGAAPPPRLPVTPASRPVTGASRPPLAPPPVMPPSPRPPVSEETALVAWARVLPRGLVLPGVACSRPPALATAPPRPPSTPSRPPTGRPPGSWPPAPASVPPTLVSRPATGAPRLVVAPTVCVRLVTAPATGLMAGSRPARADAVQRLAQAQRRNVVRGGAGVGQRGLQDGLGRAVEDAAGNAAHQLVDGIEQAALAAQRAGQRAHGAGGVAQHGGQRLGIVGVGMEQAAGAGHGLAQAIDQAAQAGAQPAGQARAGYRVAQAADRPADLRQHAVDRRAQSGGGADLLRQADGRVDHRLERRIQGLAHRAQRVVGAQRQQAVGRAAGVAQRGFQQARAYRVHRRGRIRIAGGAGAARAAGVARAARVGGSDGGGRALAAAVAAAAATGQRGHHDGRQQGNRETGRAVVGLGLGVHDPCSSGLEVQAPSLARCPIPSTNRASFFQDVAKSARSPSEIKNNFIVFIELRAFLAYSQVLSNRKIRTSGRLRMLFFREYRPDVTAGVTATLRNVPQCCPCFRARHRTASSWR

SEQ ID NO: 51473 - protein, 226 aa, Bordetella pertussis
MHTQNTAKNTAAALRARLRQSRAELTSSQRSRGALLMRGRLFTWLNLACEQAAAQGRPLSRVAAFWPMEDEPDLLPLLEQWVESGIAVCLPAVQERDAPLVFRDWTPDSAMRTGAYGVQEPAAGPAVVPDVVLVPTLGYTLDAARLGYGGGYYDRTLAAWQAAGASPTTIGIAWSEGLLPDDYQAAAHDIALDAILTPDGWVPGAPLVASGAAAGHRSAGSRFLLR

SEQ ID NO: 51474 - protein, 286 aa, Bordetella pertussis
MQFVNLDHAGRAMAAVAHPHGYVLLPGPENGDSPELGERIRREEDLPALGAQALAAGTPLVAGSAAVLAPLLTRPGKIICLGLNYYDHAREGGRDKPTYPWFFLRAPSSLVAHGQAAWLPRVSGHFYYEAELAVVIGKRARHVMPEQALDMVLGYACFNDMSVRDYQKKTPQWTVGKNFDRTGGFGPALVLAGDLPPGGRGLGITCRVNGRTVQEANTDDMIFDVAEAIGIVTECMTLEPGDVLVMGTPAGVGMARTPPLWLKPQDTVEVEIERVGRLCNPVLAEP

SEQ ID NO: 51475 - protein, 86 aa, Bordetella pertussis
MSRLTELQRARLRWRARRGLLENDLIITRYLDACEDQLTDEDVTALTQLFELGDNDLLDLLLARKEPEGALDTPRLRAIIDRMREL

SEQ ID NO: 51476 - protein, 408 aa, Bordetella pertussis
MQQQPQRDARCGGLRAVALHGLQARGGRAHVAIDRERGQVGRIRLQHQSGAVGDQRAHACRGALDIAAQCVPAPRQRQRAVQFQAQHVAGLQAGQPVAQILGIGSQVQPLDPVRPAIFADLQLAHLRRRAWRRHLHEQRISRGIAAKAVGLGRAGIPGAFVDAQAAVPVAQRQIVQPGALRAVRRDRVGGIGLLGQPVGHAAVRQPHAHQARGAVHGVERGSHIVIGMALGQRRGQHGQPRQRQLDRGRVLGNVDVGSDALEPARARPDAVGQRRIVVAGDQHPRALVGLHGAEQAPDRAIRNALRIEDVAGHQHGVDGQFAGLGGNAGHGLQPRLGQHGRVIAVELAVLAADLPIRGMNESGHEAPVGRAPRLSSCPDCGTGAGARRRLRRRCAARATPPPACPPAP

SEQ ID NO: 51477 - protein, 464 aa, Bordetella pertussis
MRQEDDVGAADARGLLDHRTDGNRAVGQDARDVGQHAGLVVDPHAQVIGGADFLDRQDLQVGQRIGLEGQVRHAVAGVGRVQAGHVDQVGHHRRRGGLFAGALAIVQRGPHGIAAHQHGVHGALDIGQQALGRHQRRMHAQLDAIDAPLGDAQQLDAIAQALGVGDVLLGQLRDALDIGLVELDRHAEGQRGQQGQLVRGVHAFDVEGGVGLGVAQALRLGQHVGERQPAGAHFGQDEIGGAVDDAGHPFDAVGGQAFADRLDDGHPSGHRGLERHHDAAGRSGGEDLVAVLGQQRLVGGDDMLALGNGFEHQLARQRIAADQFDHDVDRRIAHQGKAVGRNLDAIPDAAARLGHVAHGDAADFDAPSGAPCDFFGITRQHRPGAAAHHAQAQQAHLHRIHLSKPSLRNISLMPRTACRVRCSFSIRAKRTYSSPYSPKPIPGDTATFASDRTRLANSKEPIAL

SEQ ID NO: 51478 - protein, 285 aa, Bordetella pertussis
MLGQRIITAAVLLAVLALTLALANPWWFVALLALGAACAAWEWLRLTVRQPLSGALCVGLAAALLAAMLAMAQAWIQGGVSGLRLEVWVGYWLTPAVVAVWLLGAGTAVARGRADAPAASLGWTLFAIPAVLAAWSVLALMYLSRGGAYVVSLLALVWVADIAAYFAGRAFGKRKLAPRVSPGKTVAGAVAGVLGAVAWIALSSQWDGTYGQALVERWSWWLALPAAALLGVVSIVGDLFESLLKRRAGRKDSSALLPGHGGVYDRIDAILPVAPLALLMSGVLF

SEQ ID NO: 51479 - protein, 171 aa, Bordetella pertussis
MGAWRRSAVVALLSAALAAGAAWTAQGWRKDAAIARQAAAFALERDRQAQATVAALEAVREEGRRRTAAVEKARDDAQELAAAAAANAVGARAERDRLRTHANALARAAVARDPDAADGSPTGASAIDLLAYMLSRVSGRAEALAGVADRARIAGLTCERAYEAVRGNVRP

SEQ ID NO: 51480 - protein, 55 aa, Bordetella pertussis
MAKDIREKIKLESTAGTGHFYTTTKNKRNMPEKMLIKKFDPVARKHVDYKETKLK

SEQ ID NO: 51481 - protein, 319 aa, Bordetella pertussis
MPYLSGLMRRSGRLFLTLVKVMLPVMIAVQAAQAWGWIDILGQAFAPAMGLLNLPAEAGMVWMTGAFVGIYGAIAALISLAPALELTGGQFSALCSMLLFAHALPVEQAIVRRAGASFWATAALRVGAALGYGAAVSWFCHATGWLDEPVSLQWLQSTALAGEQAGGIWAWVRGTAVSLSFTYLIILALLVALDVMERTGITRAITVALTPVLRVSGLDPRVTPVTILGVLLGLSYGGALIIEEAEKQQLEARPRFLALAWLSLSHSLIEDTVLLMALGANGWIVLVGRLLVTLVVVAILARMLGGGGAARRPLGAPAG

SEQ ID NO: 51482 - protein, 107 aa, Bordetella pertussis
MNTLELSARVLECGAMRHTPAGLPALELLLVHESEVVEAGHPRRVELTISAVALGDLALLLADTPLGTEMQVQGFLAPARKDSVKVKLHLQQARRIAGSMGRDPLVG

SEQ ID NO: 51483 - protein, 1483 aa, Clostridium acetobutylicum
MKKRNIAILGMFMMTASLGISKNHVFADTVKASNSGVQIQFADTNTSTTMNTIAPKFKITNNTGAPLDLTTLKLRYYFTADGTQDENFWCDHAGMLNGYNYQTITSNVVGTFVAMDNATATADHYLEISFSNGAGQLDAGSSLEVQCRVAKNDWSNYDQSNDYSFTSNASDFTDWDKITGYVNGDLVFGNPPVVDPVITPTTATFDTANPTDVNVAMQLNGFTLSGLTDENGTAVDAANYTISGSNLVLSKAYLAKLALGKHSFNFNFAKGTTTISKPLALTVTDTAGITVDPASVVFDKVAPQDENVALKLNGHTLGDVVGPKGNLVKGTDYTVADDGTVTFSKAYLSTLPLGDQTITFKASDDSTKTAAVTVTVKNSNATNVTVGDVTGAKKGDTIKVPVSVSTVKTPIGLIDMEINYDPTELTAKDVVPTDLVKDTDNYSFIVNTSTPGKISITFTDPTLGTYPIGTDGIFAYLEFLVAGEKAGKYDLKVNPTTLILADENDNDIDCNPPKDGSVTVIGTPVVTPSQINVEQGSATDQPVKIDLNGNTLKDVVDQSGKTLVQGTDYTVTDTGITLSQSYLAGLALGQYTLTLDFNGGGASQTITINVVKNETVKLSVGTVSGNPGDTVKVPVTISQVSTPVGLICMDISYDASKFTVKDVLPNTDLVKDTDNYSFIVNTSTPGKISITFTDPTLANYPISVDGILAYLDFIINSNATAGDSALTVDPATLIVADENDKDIKDAASNGKITVTGSAPVVQSSVVNTSSVTYDQNAPQDQAVSITFNGNTVKDVKDASGNTLKAGSDYTATSDGITLSQSYLATLAAGTYTYTIDFSAGNAGTFTVVVKGKTVVGSATTLAVGTVSGKAGDTVKVPVTISKVTTPVGLICAEIDYDASKFTVKDVLPNTDLVKDTDNYSFIVNTSTPGKISITFTDPTLANYPISADGILAYLDFIINSNATAGDSALTVNPSGFIIADENDKDIQDAASNGKITVTGSTPVAENSVVNTSSVTYDQNAPQDQAVSITLNGNTITDVKDASGNTLKAGSDYTVTSDGITLSQSYLATLAAGTYTYTVDFSAGNAGTFTVVVKAKTVVSSATTLAVGTVSGKAGDTVKVPVTISKVTTPVGLICAEIDYDASKFTVKDVLPNTDLVKDTDNYSFIVNTATAGKISITFTDPTLEKFPISADGILAYLDFIINSNATAGDSALTVNPSGFIVADENDKDVDHASTDGKITITGSAPVVVNSSVNTSSVTYDPAAPQDQAVSVTLNGNTITDVKDANASVLKAGSDYTVTSDGITLSQSYLATLAAGTYTYTVDFSAGNAGTFTVVVKGKAVVNKTTLAVGAASGKAGDTVKVPVTISKVTTPVGLICMEIDYDASKFTVKDVLPNTDLVKDTDNYSFIANTTSAGKISITFTDPTLEKFPISADGVIANIDFVVNSGAATGDSDLTVNSSGFIVADESDTDIDHVSTNGKITVE

SEQ ID NO: 51484 - protein, 411 aa, Clostridium acetobutylicum
MNRRVVITGIGAVTPVGNNADSFWCSIKEGKCGIDKIKAFDATDFKVKLAAEVKDFTPEDFIDKREANRMDRFSQFAIVAADEAIKDSKLDLESIDKNRFGVIVGSGIGGIGTIEKQDEKLITKGPGRVSPMTIPMIIANMASGNLAIRYGAKGICTTIVTACASANNSIGESFRNIKFGYSDVMISGGSEAGITPLSLAGFASMKAVTKSEDPKRASIPFDKDRSGFVMGEGSGIVILEELEHALKRGAKIYAEIVGYGATCDAYHITSPAPNGEGGARAMKLAMEEDNVRPEDISYINAHGTSTAYNDSFETQAIKTVLGEYAYKVPVSSTKSMTGHLLGAGGAVEAIICAKAIEEGFIPPTIGYKEADPECDLDYVPNEGRNAEVNYVLSNSLGFGGHNATLLFKKYK

SEQ ID NO: 51485 - protein, 391 aa, Clostridium acetobutylicum
MRKLFTSESVTEGHPDKICDQISDAILDAILEKDPNGRVACETTVTTGIVNVMGEISTNCYVDIPKIVRKTVREIGYTRAKYGFDCDTCAVVTSIDEQSADIAMGVDEALESKKGEMDKIDAVGAGDQGMMFGYATNETKEFMPMPIALAHRLSRRLAEVRKDGTLDYLRPDGKTQVTIEYEDDKPVRVDAIVISTQHGPEIGHEQIEKDLIEKVVKYVISPELLDENTKYYINPTGRFVVGGPQGDSGLTGRKIIVDTYGGYGRHGGGAFSGKDPTKVDRSAAYAARWVAKNLVAAGIADKLEIQLAYAIGVAKPVSISVDTFGTGKIEESKIVEIVEKVFDLRPGAIIRDLNLKRPIYRQVAAYGHFGRLDVELPWEQLDRVEAIKKYL

SEQ ID NO: 51486 - protein, 230 aa, Clostridium acetobutylicum
MTIGIIGAMDEELEILLKEMEPQRQEKKAEMIFNLGKLSGKNVVIVRCGIGKVNAAICTQILADDFNVDFIINVGVAGGIGKDILPGDIVIANSLVQHDMDTTAFGDRVGQIPRLDTFDFRCSNRLVELAKKVCESFDKQKAYIGRIATGDQFVADIDKIKWLSSEFDALACEMEGGSIAHTAYLNNIPFVVIRSISDNANNGAHMDYEKFLPIAIKNSSTILKNMISLL

SEQ ID NO: 51487 - protein, 450 aa, Clostridium acetobutylicum
MSECFKLELKNTKPYLQDEELKNLKPAVAAAHEAIHNGTGAGNDFLGWVDLPVNYDKDEFERIKKSAEKIRNSVDAFIVIGIGGSYLGARAAIEMFSHSFSSSISKEERKNPEIFFCGNNISSTYLADLLEAIEGKDIAVNVISKSGTTTEPAIAFRIFKELLEKKYGKEEAKNRIFATTDAKKGALKTLSDNEGYETFVVPDDVGGRYSVLTAVGLLPIAVAGIDIDEMMKGAAKAREVYSEPDLEKNEAYQYAAARNALYSKGKSIEMVVNFEPSLHYFGEWWKQLFGESEGKDGKGLFPAAGDFSTDLHSMGQYIQEGRRQLIETFINVVNPKKEVTIQKDAENLDGLNFVAGKTMDFVNKQAFMGTVLAHHDGGVPVMVVNVPELTAYYFGYMVYFFEKACGISGYLLGVNPFNQPGVEAYKKNMFALLGKPGYEDLAKELNNKLK

SEQ ID NO: 51488 - protein, 386 aa, Clostridium acetobutylicum
MKKKKIMALAMAAALTGASVINICSRGVKAESLQIINNVGVSYQAHVQNVGWQTAVTDGAEAGTDGKGLRVEGLKLSLTNAPVGASILYQTHVQNVGWQPWFSDGQEAGTVGKGLRVEGLKIKLNNMPGYSIQYRTHVQNVGWQNWVSDGEEAGTVGKGLRVEALEIKIVKISDNSTVGVTYAGHVQNVGWQNEVQNGQISGTESRALRLEGLKMNLVNAPVGAKIDYQAHVQNIGWQAPVSDGAEAGTDGKGLRVEAFKVKLENLPGLSVQYRAYVQNIGWQDWVADGQEAGTDGKGLQVEAVEIRIVNAAGGVTPAPAPTAPTTETEPTIPTAPTTETEPAGTTTAGTTTTVITPTGTTTVITPSGTTTTGTTPTDIGAIYVDD

SEQ ID NO: 51489 - protein, 319 aa, Clostridium acetobutylicum
MINHGKNIKIFTGNSYPSLAEEIADIIGVQVGDSRVGKFSNGETAVDINETVRGTDLFLIQTLCEPVNDSIMELLIMLDAFKRASAGRITAVIPNYAYARQDRKAKARQPITAKLMADLIHTAGADRVLTMDLHAPQIQGFFDIPVDHLEGVPILAKYFINQNSNTDDLIVVSPDIGGVKRTRKFAEKLHAPIAIIDKRRPKPNVSEVMSIIGDVKGKKAILVDDMIDTAGSIVNAAEALVKMGAKEVSACCTHGVLSGPAIERLENSPLKEVVILNTIPIEGDKRIDKIKVLSVAPIFAEAIRRIYEDMPVSKIFQEE

SEQ ID NO: 51490 - protein, 153 aa, Clostridium acetobutylicum
MLSIIAALNENYVIGNENKLIWHISDDLKRFKKLTTGKTIIMGRKTFESLPGVLPNRKHIVITKNLNYSRENVSIVHSIDEIIELKDTTEENFIIGGGEIYRALIPYCSILYLTKVHSNQTGDAFFPKFDENDYSIIATEKHGDYDFVTFKRR

SEQ ID NO: 51491 - protein, 393 aa, Clostridium acetobutylicum
MDMYRIFNEGQINVLKDIKRACKEKKIKAYIIGGAVRDSILNVKSKDIDVCVEGDPLIIIKELKSLKDYVYYEKFQTSTIYFNNGVSVDLIRCRKETYLKDGMLPIVEPSSIKDDIYRRDFTVNALAYDIVDERIIDFYGGIDDINNKVIKSIHKNSYSEDCTRIFRAIKYSIRYGFEIEDDFVFNSLIGNNIFNTISFERYIKELYLICGEDKWIQMLKKCCMYGIIDLDCDMLGDSIQFSEQNINFLNMVYCSRDKILNRALVENSFLKKELLNPIRKFIVGRKELEHKLLNSKRNYDIYKVFNGMTKYELVLFSWNKELKYKVYNYTKNILNFKTVISGKEIKNLIERDGKIVGLIKEGILKRNVNMLMNFDYSTKNMGEILYDIEHKYR

SEQ ID NO: 51492 - protein, 881 aa, Clostridium acetobutylicum
MKEFDEMAKTYDPKEFEDRIYKWWEEEGFFTPKVDKNKKPYTIMMPPPNITGKLHLGHALDCALQDFMIRAKRMQGYEALWLPGQDHASIATEVRVEKEILKEGLNKKEMGREKFLERVWDWTKEYRERIKGQQKKLGVSADFTRESFTMDEKLNKAVRTVFVKLYEDGLIYQGNRITNWCPKCQTALSDAEIEYKEDQGFFWHIKYPVEGEDSFIEIATTRPETMLGDTAVAVNPKDERYKEFIGKLLVLPLLGRKIPVVADDYVDMEFGTGAVKITPAHDPNDYEVGKRHDLKEIVMLNNDGTIKEGFGKYSGMDRYEARKAIVSDLKEEGYLVKIKEHVHNVGTHDRCGNIIEPMVSKQWYVKMESLAKPAIEAVKAGKTKFVPERFDKIYFNWMENIQDWCISRQLWWGHRIPVWYCKDCGEIIVSEKEPKACSKCNSENLEQDKDVLDTWFSSALWPFSTLGWPDKNEDLEYFYPTDTLVTGYDIIFFWVARMVFSGIYNMGEVPFKHVYIHGLVRDAEGRKMSKSLGNGVDPLDVIDTFGADALRFMLITGNAPGNDIRYKTEKVEAARNFANKIWNASRFVLMNLDKEIMDKYKDLEEYSLADRWILSRCNSLVREVTDNIEKFELGIASQKVYDFMWNEFCDWYIELVKPVMYGEDEKAKGIAYNVLYKVLTVGLQLLHPVMPYITEEIYQHLGGEYKAIAISAWPTYEEKLKNETSENAMNQIIEAIKSIRNVRAEMNVPPSKKAKVMIFTEAENKAAFEMGEHYFEKLAYASSVSFLKSKDEAPENAVSSVTKGAELFMPLLDLIDVTKEIERLSKEKDKLKAEIQRVDKKLSNKGFVDKAPESVVEAERVKGEKYKKMLEAVEERIAALK

SEQ ID NO: 51493 - protein, 665 aa, Clostridium acetobutylicum
MGNKIFAVLQKIGKSLMLPVSVLPAAGILLRLGQPDLLNMPYVQAAGNAIFNNLPLIFAVGVAIGFSGGEGVAALAAVIGELILEAVEKTAGDTAAAALAKTAAASHHMTLAAFQKTQEYSNIVTKTTISMGVFGGIIIGLTAAILYNKFHDIKMPQVLGFFGGKRFVPIITSISALIIATIGVNIWLPIQAGINSLAAFATTSPIGPAMYAGGKRLLIPLGLHHIYYPLFLYQFGHFVSNGVTYVGDTARYFHGDPTAGNFMAAEYPILMFGLPGAALAMIAAAKKEKRKEMAGMMISAAFVAFVTGITEPIEFSFIFVAPVLFVFHVLAAFASGLITSYLHIRLGYTFSASFIDYVLGFKYAGHPLLIWLVGIGFFVLYFVVFYFTIKAMNIKTPGREDDDAEGVKKINVKGKAKAAKVLEAIGGKDNIKVLDACITRLRLNLNDPSLVDKATLKALGAAGVMTAEDSVQVVFGTEAERIKDDIKAIIQNGGYVEDDSDKEEEVQEDKQISKGAHELLSPADGEVVGIESVPDSTFAEKMLGDGFAVIPSGNEVHSPADGEVSVLFPTKHAFAITTEGGLELLIHVGIDTVALNGEGFTAHVKQGDKVKKGDLILTLDTEFIKSKGKNLITPVIVTNMDVVGNIDVKLGNVKNSEKAADVTVK

SEQ ID NO: 51494 - protein, 394 aa, Clostridium acetobutylicum
MNGRFGKFGGQYVPETLMNAINELEVEFNKAINDEKFMMEYKYYLEKYVGRETPLYFAENMTKNLGGAKIYLKREDLNHTGSHKLNNALGQVLLAKRMGKKRVIAETGAGQHGVATATAAALFGLECEVFMGAEDVERQALNVFRMKILGAKVNSVKSGTNTLKDAINAAMRDWVTNIDNTYYVIGSVMGPHPYPTIVKDFQKIIGEEARKQILKAEGRLPDYVVACVGGGSNSMGIFYPFIKDEGVKLIGVEAAGLGIDTPMHAATLTKGSVGIIHGMMTYVLQDEDGQITPAYSVSAGLDYPGVGPQHSYLKEKERASYEAVTDKEALKAFLYLSEKEGIIPALESSHAVAYAMKLAPSLSKDEIVIINLSGRGDKDVNTVMKNMEENKNGK

SEQ ID NO: 51495 - protein, 344 aa, Clostridium acetobutylicum
MRLSKTIAQSIVEEMMNLIPYNINVMNEEGIIIGSGDLSRIGNLHEGALEAIKEKSLNVIYSEKNSVKPGVNEPIIIDGKVIGVIGITGYSDEVKKFIKLVRVTAVLLIEQAEANEESQNRNLKRERFYYDLINRKTPYDEKFSKIAQDFGFDISKKHRAILVYGNNTSKKFYDLKKKYIFNYDLDINKTAFFISDDYKYKLLIDELKHYKDIEKIGIGEKEDIAAISLENSKKGVELGKKIKPNSKIYEYEELKFFIHLHHKNKEEIVNLISSIDKSEYKLELIQTIQIYVEENGQINDAALRLNIHRNTLNYRLERIKKITGKDPKNFFQLFELFCGLIWRE

SEQ ID NO: 51496 - protein, 438 aa, Clostridium acetobutylicum
MAKPLVTIVGRPNVGKSTLFNKLAGKRVSIVEDTPGVTRDRIYAESEWVGKKFTIIDTGGIEPENNDIILTQMRRQAQIAIEMSDVIIFMVDGKQGLTDTDNEVAIMLRKSKKPIVLVVNKIDKNVEENNIYEFYNLGIGDPVSISSSQGLGIGDMLDEVVNKFKSEGEDEEEEEYIKIAFVGKPNVGKSSLTNRILGEERVIVSDIPGTTRDAIDSFLETDFGKLVLIDTAGLRRKSRIKEEIERYSAVRTMAAIERCDVCTLILDATEPISEQDERIIGYAHENNKAILVIVNKWDLIEKDDKTMENFKKNLEMKFSFMAYAPFLFISAKTGQRVHKVLSEIKKCYDNYSKRIATGVLNDVISNAVLMKEPPVVAFKRLKIFYVTQTDIKPPTFIFFVNNPELLHFSYRRYLENKLRQSFDFEGTGIKMIFKERKN

SEQ ID NO: 51497 - protein, 319 aa, Clostridium acetobutylicum
MKTIAVLTSGGDAPGMNAAIRAVVRTAIEKGINVKGIQRGYSGLINGEIFDMNRHSVSDIIQRGGTILRTARCPEFLKEEVRQKAANVLRVFGIDGLVVIGGNGSFMGAQKLSKLGVKTVGLPGTIDNDLPYTDYTIGFDTTLNTVLDAINKLRDTSTSHERVSIIEVMGRDCGDIALFSGIAGGAESVIIPEIGYDFNELCKNILEGKLRGKMHNLIILAEGVGGAAELAKKVEEVTGIETRSTILGHIQRGGSPSAFDRMLASRMGVKAVEVLMEGKTSRVIGIKEGKIMDQDIDEALAVPRSFNKELYDIANMLSK

SEQ ID NO: 51498 - protein, 198 aa, Clostridium acetobutylicum
MKKTLKILAGFVAVVIIIALGIFTSRKLYQNHVDKINHIGKVMDSYKGVKVYYNGKKYAESHGKNYSKDGYYYGYKWQCVEYIKRFYYEAKGHSMPNGFGNAKDFFDPKVGQGKLNKDRGLFQYKNGENEKPKADDILVFTDTKYGHVVIVTKVTDDTVEVIQQNMGNKTRDQFKLEYENGKYFVCGKRKPKGWLRKG

SEQ ID NO: 51499 - protein, 455 aa, Clostridium acetobutylicum
MSILLSKTLRELIFWMAWIIIPLIMEIIPAFGGFFILVKKSFNSNREGFIGTLPEITLIIPIYNSEATLKGCIESIYNCSYPTRLIDLILVNNMSSDDSFQVFSQCQKEFCGLSMRYMNSKQGKSKALNMALFNSAGKYIIHIDSDGKLHYDAIKNMIVRFEKNPNIHCMTGAILSDIEGIEKTHKRFLKLIRRCEFFEYAQAFLAGRNFESEINSIYTLSGAFSAFRKSTILKTQLYNSKTVCEDTHITFQVRRLLKKKVYLCENSIFFVDPIENLNKLYTQRQRWQRGEIEVSHMFFKNKMNSPLGFFHNFMIRVVMYDHTFAFPRMIWYFAIIFLFFMNYPVKLVVGSLVIIYMLYVLSTFLFYLNVRIYLKEYKSIREYYKARWGYIFLMPIYNFVVFWIRFAGIINSIKIKSKWKTLTLNDEWTAFLKVIQSDFRMIGKGINKIRRLVND

SEQ ID NO: 51500 - protein, 91 aa, Clostridium acetobutylicum
MNKAELITSISEKSKLTKKDAEVALKAFIESVEETLEKHEKVQLVGFGTFETRERAERKGRNPRSKEEIVIPASTVPVFKAGKEFKERVNK

SEQ ID NO: 51501 - protein, 326 aa, Clostridium acetobutylicum
MPQDKVLLEVKNLKKWFPVKKGFFGGKVSNVKAVDDVSFTINKGETLGLVGESGCGKTTTGRTVLKLYEPTSGQIIYDGKDIAKLSYKEMLPYRRKMQMIFQDPYASLNSRMTVGDIIGESIDIHNLSKGNERKERIEYLLKKVGLNGDHINRYPHEFSGGQRQRIGIARALAVEPEFIVCDEPISALDVSIQAQVVNMLEELQEELGLTYLFIAHDLSMVKHISTKIGVMYLGNLIEVGESSELYNNPLHPYTKALLSAVPVPDPDEAAARQRIILEGEIPSPIDPPKGCKFRGRCKYAKPECGEATPAFKDMGNNHSVACYLYQ

SEQ ID NO: 51502 - protein, 441 aa, Clostridium acetobutylicum
MESDRNLNYINLFMIFVNLIIIVFTSEIMTITLYKISSEFMARDFLDQITVIPWKPQNITIVSIGAYIILIILITVKKKYAKFLNKWEIAALLLCEIFFSVAIMTALNMSYNGIILFIIADLVTNTKDKSNKIIFLILMIIIYIFSVYDFISLKIKMVSFENFLYYYTANRRSYLMELKSILNSINIIVFILYMIVFIQVQMRENEKITSLNKKLNLANEKLEVMNVQLKEYAVKIGSMAETRERNRMAREIHDTLGHALTGISVGIDACLTTIDVSKELTKKQLNIIADVAREAIKDVRRSVKKLRPDALENSSLQDALNNMISRISKATKTKVFLNANIKLLKFGHDEEDTIYRIIQEGITNSIRHGQAEEIYIDMIRRDKQLNITIRDNGKGCANVEEGFGLRHIEERVKLLNGTVEYDGSDSFLITVNIPIRWGDGS

SEQ ID NO: 51503 - protein, 602 aa, Clostridium acetobutylicum
MKKISSATVWIVVFLVVIFTILMLVQGGKATNTVSFDQFQKQYMGNNIKSFEMKDDKMTVDGKYKDGSSFETIVPLERLNQFLADHPTNGEIGESYAAPANIPVWISWMPTIIMILAMVVILVLFMQQTQGGTGKGVMGFGKSRAKMSSPDDLKQKVTFKDVAGADEEKGELEEIVDFLKQPKRYIEMGARIPKGVLLVGPPGTGKTLLAKAVSGEAGVPFFSISGSDFVEMFVGVGASRVRDLFEQAKKNSPCIIFIDEIDAVGRQRGAGLGGGHDEREQTLNQLLVEMDGFGVNEGIIILAATNRPDILDHALLRPGRFDRQILVGAPDVKGREEILKVHSKNKNLDDSIRLDVLAKRTPGFTGADLENLMNEAALLAVRNKKPIIGMEELEEATTRVIAGPEKKSRVISEEDRKITAYHEAGHAVLMELLPYSDPVHQISIVPRGMAGGYTMHLPEKDSSYMSKNKLKDEMVGLLGGRIAEKLVIGDISTGAKNDIDRATSIARKMVMEYGMSDKLGTITFGKDQDEVFLGRDLGTSRNFSEEIAAKIDNEVKELIDEAYTKAENLLKDNMSKLDAVAKALLEKEKLEADEFKEIFENA

SEQ ID NO: 51504 - protein, 165 aa, Clostridium acetobutylicum
MRIDPSTLDLKEKVVFINRVAKVVKGGRNFRFTALVVVGDENGHVGVGTGKSAEIPEAIRKGIEDAKKNLVEVAIVGTTVPHEIYGEFGTGRVLIMPASEGTGVIAGGPVRAVLELAGLNDVRAKSLGSNNPRNMVNATINGLSRLRTVEQIAALRGKTVEEILG

SEQ ID NO: 51505 - protein, 150 aa, Clostridium acetobutylicum
MKILFVCTGNTCRSCMAEAMFNSMCNIDGIEAFSAGASAIHGSKTSLNSAVVVRENLGKDISNRKAIQLTTFLVDECDLVLTMTSLLSDVLRSQMEKNSNKIYSLSEYTGVEGDITDPYGRSVEIYRQTYKDIEKRLKILIKKLNEDRSI

SEQ ID NO: 51506 - protein, 136 aa, Clostridium acetobutylicum
MYILKIEHSFDSAHFLNNYNGKCANIHGHRWRVEIEIQSETLIDDMIEDFTILKKRIKEVLDFYDHALIIEKNSLRKLTFDCLIEDGFKIIELDFRPTAENFSKFFFDEIRKLNYDVRKITVYETPNNSASYVKEV

SEQ ID NO: 51507 - protein, 295 aa, Clostridium acetobutylicum
MNFLSKFIFDVETGTVQLQKMKFNVYNVFELVIRVLVVIVMMYIIVKLVNKFIDKTLKKQEDFRFSLDKKRSKTIGAILKSVVKYGVYFFGITVILTLIFGSKLFSAVSLTFASIGGVALGFGSQNLVKDVVNGFFILFEDQYSVGDYITIGKSSGIVESIELRVTKIRSFKGDLHIIPNGNISEVTNHSRGPISINVNVSIAYEENIDDATKVINIACDEFSKDNEDIVEKPKVVGITELGSSGVNIRVSGKVKPMKQWANENQLRKYVKEALDKAEIEIPYNKLQFIGGEKSE

SEQ ID NO: 51508 - protein, 520 aa, Clostridium acetobutylicum
MVMIDVKKLPLDIKIGQMIMAGFTSKHYDSSLEKLITDDKIGNFILFSRNIEEKNQLTRLTEDIQKGLEINIKIPGIISVDQEGGMVTRINSGTTIFPGNMAFAAANHPHSTFRQGKIEGEELRGLGVNMNLAPVMDVNCNPSNPVIGVRSYSDSPEKVAELGLELIKGLKESKVVPVAKHFPGHGDTDVDSHLSLPVVKHSIKRLRKVELLPFKTAIENGIDAIMSAHVLFPEIEPKRLPATLSYRVLTDLLRNKMGFKGIIITDCMEMKAIAEFYGSDKAAVMAIKAGADLICISHSAAVQKACIRRIKEAVINKEISEERINESVKRILEIKEKYSISFNTVKRNYDINNSLFAEEISDKSITLLKNDKSLIPLKGRIVSISTKAVALTGAEDNMSLNNSFCHKLKENFGGSEFQIPINPHKEIIDKILEKCLDADSIVIGIYNAYNHEGQRKLVNEISKVNPNIVLVSLRNPYDFLYFKEVSAYINAYEYTNLSVKSVIKVLSGRVEAQGISPVRL

SEQ ID NO: 51509 - protein, 213 aa, Clostridium acetobutylicum
MMIIGINGSPRKNGNTIEMLKSALDGAKAQGAETELINLYDYNYKGCVSCFSCKLKGGRSYGKCALKDDLKPILEKIEKADAFILASPIYFGMVTGEMRSFMERLLFQYLVYDKDHSSLFNRKIKTGFIYTMNVPETYLDSVGYNKLFESNEATLKRIFGASEYILSTDTYQFDDYSKYEASMFDVEAKKKRREEVFPEDCKRAYEMGASFVK

SEQ ID NO: 51510 - protein, 412 aa, Clostridium acetobutylicum
MNIQNISNQLGRKKRIQEIIFPVLDVSLNGVNYFFHIFVSWYLIPRDYGRLNSLLSLISILTVLGVSFQTYTAKYISKGEDKEPDIKSILNCSLICFLIIVVFMLVFSSVIIKATNSDFFSLIIIILTLGSNIILSVIRGIFQGMKSFFMLNISFYIEVISKIAVLFVLLKNSRNIHSALLAILLGMVFSLFHGMYKVRKLINFKQKARISKRIMKKVANIYIANFFFNFFTSVDMIMVNYYLPENSGIFAVVLKYNQLLTFASSSIFTVFIPLLTERLCDRKRFNNCIRNLFLIMIAISVLTLGFYKFVMPYTVAMFFGKAYASAKNYLFIGIVSYIFLSFIFMIVNIYMIIEKWMHFVTLFVAAVIFVIIIALFHKSISSIIYIEIGFYAVLFFILLAGILKQNLKERRE

SEQ ID NO: 51511 - protein, 321 aa, Clostridium acetobutylicum
MKVGNLSFEGNVFLAPMAGVTDIVFRKICKGMGADLTYTEMVSAKALYYGSENTEELMKISDEEEYAAVQMFGSEPDIMAKACEKFNEDDKICIIDINMGCPAHKIVKNGEGSALMKSPKLAYEIVKAVKKASNKPVTVKFRKGFDEDNINAVEFAKVIEDAGADMITVHGRTRAQMYEGKADWDIIKAVKKSVSIPVIGNGDIVSGEDAVRMLEYTNCDGVMVARAAMGNPWIFREIKAAINSTQIIKPTPVEKLDMCIFHYKEAVKYYGEKKAVREMRKNIAWYIKSLKNCTDIKCLINSEESSDEVIGILEQYRKDFL

SEQ ID NO: 51512 - protein, 447 aa, Clostridium acetobutylicum
MKRKIISLLLIGALSATILSGCAQSKASASESKTVQITFWHAMSGKNGEALNKMVEDFNNSHSDIKVKAEFQGKYDEELNKLKSAEKGGEAPDIVQVYDIGTRFMIDSKWAEPIQNFIDKDKYDTSSLEPNLLAYYTVNNKLYSMPFNSSTPILYYNKSAFKEADLDPNKPPKTFSELERYSKALAKKDSSGNVTRYGFSMAIYGWLFEQYLVKQGKNYVNNGNGRSSAATKVDFDSNGGGLKFLKEWKQLVDSGYVGNLGRNEDDTENAFIAGKTAMYIESTADLKHDLNSIGGRFELGTAPLPSFDGTSDGGVSIGGASMWILKNKDAEKQKAAFEFIKYMVSSKQQAYWSTETGYFPVTKKAYDEDIMKENLKKSPQFKTAIDQLYASPKTAVGALMAVFPEARQTIEANIEEMLQKKESPEEAISNSSKLINQSIKDYNDKNK

SEQ ID NO: 51513 - protein, 430 aa, Clostridium acetobutylicum
MNNKIKPSILPGFMELLPKEQLVFNDIVSKITGVYEQNGFLPMDTPIIEKEEVLLAKSAGETEKQVYRIDNEDRKQVLRFDLTVPFSRFAAQYMSDLTFPFKRYQLGKVYRGERNQKGRYREFYQCDVDVVGNGNLSIKNDAFIINMASKALRKIGLDSYKFQISNRKILTGVLEGLNITNMQEVMILIDKYDKITEEQFLSELNKLIGEEKAKVISKVIKISGSSDEVVENLKKVEIKNEMLEKGIEEVEEVIKYLKLFGVEDSEYAINLKIIRGLDYYTGTVFETLLTGNESYGSICSGGRYDNLAQNYTENVLPGVGMSIGITRLFFVLREIGFIENYNSSLNEKYLIVPIGDTFEYCTKILNKLLVNGKSAEIYFEEGKLKKKLTYANKLDIKYVILIGEDEVTNKELVIKDMITGEQKKLNIEEI

SEQ ID NO: 51514 - protein, 563 aa, Clostridium acetobutylicum
MNENLKQDKDSEISKTEDEESSMNTAELVVKCLENENVEYIFGIPGEENLALIKALTKSPIKFITTRHEQGAAFMADVYGRLTGRPGVCLSTLGPGATNLMTGVADANLDGAPLIAITGQVGTDRMHIESHQHLDLVAMFAPVTKWNKQIVRPDTAPEIVRKAFKTAVDEKPGACHIDLPQNIADMPVQGKPLRHTVTDKSFAAYSSIEKAAIAISRAKSPLILSGNGAIRSKASKAVLDMAERLNIPVANTFMGKGIIPFNHPLSLWSMGLAQKDYINRIFEKTDLVIAIGYDIVEYSPKKWNSKGEIRIIHIGEKKAEVNNSYLPEVEVIGDISDSIQEIIRRSDRIETPKQALKIKEDMHKNYEEYSDDQSFPMKPQKVLYDLRRVMGEDDIVISDVGAHKMWIARNYHCYKPNTCIISNGFASMGIAIPGALAAKLVNPDKKVVAVTGDGGFMMNSQELETALRIGTPFVTLIFNDSNYGLIKWKQEERYGESAYINFTNPDFKMYAESMGLKGYRITKAEELIPTLEEAFSQKVPSVIDCAVDYSENLKLSHKLEELK

SEQ ID NO: 51515 - protein, 250 aa, Clostridium acetobutylicum
MHKFFVGAENICDNTAYIYGDDVKHIYKVLRLKVGEKVSINDCNSHEFLGEIEQINKENVKVKIIENLDINNESPLNVYLYQGFPKAAKMDIIVQKNTELGIREIIPLITQRVVVKNEKSELKKVDRWNRIAFEAAKQSKRSVIPKVKDIASFNSAIEELKEMDLVLVPYENQEKVGMKKVAAAIEKNKIKNVAIVIGPEGGFEETEIEELKKIGAYIITLGPRILRTETAGLVCTSLVMYELSDIGGII

SEQ ID NO: 51516 - protein, 337 aa, Clostridium acetobutylicum
MVIIFKQNTEKSEIEKIKRAIEGDGCETTVSHGKDYIVVGVIGDTSKVNIERIQANENVDKVVRVQEPYKKAGRHFHPQDTIVDVDGSKIGGKRLAVIAGPCSVESEEQIVEIAKRVKQSGANFLRGGAFKPRTSPYSFQGLELEGLDLLKLAKKETGLPIVTEIMSADFIDRFVEDVDVIQVGARNMQNFTLLKELGKTRKTILLKRGLSATIEEFLMAAEYIMSEGNENVVLCERGIRTFETYTRNTLDLSVVPAIKKLSHLPVIIDPSHAAGMWWMVEPLAKAAVAVGADGLMIEVHNDPANAKSDGQQSIKPDKFDEIMKKVRAIAEIEGKQV

SEQ ID NO: 51517 - protein, 487 aa, Clostridium acetobutylicum
MNFVTKITKNHIINTIIIAIAAIILLVSLSINPIIGKHDNGDFGRLMIYGGIDNLSNAYKDIYDGFLHIKYSTNPLNVLLLFYNDWTSCSIPVKISVILFLILHKFTGNLFDIRYLSFVYSILFLMGLYLIINFKKLSTSLKIICGSYMILFFTSTCYVEYFNSFFEEAGTIVFFLLCIGTYLNLIEKSKPQKRDFVYFFVASAFFLTAKAQNLPMVPFMLIIYLSLYLVYNKKKLILISSIFVIFLCIISYFSLTKVMNENNIYQSVFSGVLRDSKTPTKDLTELGLDKKLVVFKGHSFYNKNNGLDPLSNNMLKNFYPNISNWKILFFYLKHQDRMWQKIVDASNSNYRLDKPYSGNFVKGQYSKNKHLNTFRSYLISKFPYIHHNVYLFIIFSLIYFTTSVIYAIKSKDVSIKLLNLMLIFILITGSSQFILPVIGAGHGDFSKHLFLLNFSYDIMFGVALLWFSHIISNIFLFHKHNNYFTNK

SEQ ID NO: 51518 - protein, 528 aa, Clostridium acetobutylicum
MMDSKFEINKLQEQLKRDPFEKYEEYEIRIRNVKSVIVGKGTLEEESYDKDYGFCYIKIEWYGINSVEKVKSEYFFCMISKRNLNGDVDFNNKYDVSCKFVSIGEKVYIDNESLNISINGENYKIYCVNLYRQAFESNEEFKTRITNIKHIPIGRVKFNKNNYDIKTYSGIVGNEWNVIKEVRIPKIYSLFTAIDNVAIKEICKVDVEYVLYGKLMLIDKAISIDMGSLFIMINNKSVPIYSICLNSMYFYDVNKFKNNIEHISMISAGKVRMNPSKYDFESSTFLVDVIWKKWAAPFVNDLCSFSISISKEDASILYKGGGVYDVYINFEIQEDKISVDSINVITFSKNIKLEYEVQSSESVSQVIDNGVQIQNDLNQDMNMEFNLMRYISDKGKYGYMDSSKRKILIEPKYDYIGSFYEGLARVNINGSWGFINLNGDIVIEPKFSMVKDFHDGLAAFSLKKFGTKRWGYVNLSGKIVIEAKYSEAGDFYNGVASVRLQGIFASKKNIYISSDGKIVNYKQMLSVK

SEQ ID NO: 51519 - protein, 334 aa, Clostridium acetobutylicum
MAKIAINGFGRIGRLALRRILEVPGLEVVAINDLTDAKMLAHLFKYDSSQGRFNGEIEVKEGAFVVNGKEVKVFAEADPEKLPWGDLGIDVVLECTGFFTKKEKAEAHVRAGAKKVVISAPAGNDLKTIVFNVNNEDLDGTETVISGASCTTNCLAPMAKVLNDKFGIEKGFMTTIHAFTNDQNTLDGPHRKGDLRRARAAAVSIIPNSTGAAKAISQVIPDLAGKLDGNAQRVPVPTGSITELVSVLKKKVTVEEINAAMKEAADESFGYTEDPIVSADVVGINYGSLFDATLTKIVDVNGSQLVKTAAWYDNEMSYTSQLVRTLAYFAKIAK

SEQ ID NO: 51520 - protein, 194 aa, Clostridium acetobutylicum
MKKLNIIAATLISSGVILIGFTLGAKYWTYHKQNSMINAYEKKIKNIKHSNNKKVKAAEIKDTIKDGTIGILKIPKIDLKVAIGEGTDLKTLKYAVGHFRNTSMPGQNGNFCLAGHRSYTFGEYFNRLGEIGSGDEIDVETVNGTFKYKVYSTKVVLPSEVHVLDQTKDPTMTLVTCTPIRIATHRLIIKAKRI

SEQ ID NO: 51521 - protein, 343 aa, Clostridium acetobutylicum
MKKKVAILFGGQSTEHEVSRVSAASVLRNIDTSKYDLFPIGITKKGEWFEYTGSADKIENGEWEKDEFYKSPNGQAILFNKEVDVVFPVMHGLYGEDGTIQGLCKLVGVPCVGPSVLSSSVCMDKVYTKYVLEHFNIKQADYVVVHAHEYKTSKEEIIKEIENKLGYAVFIKPSNSGSSVGITKAHNRKELEAGLEEAMKYDRKILVEEALNAREIEVAVLGNEEPKAAIPGEIVPAKEFYDYEAKYENAASKLLIPANLSNENLEKIKNIAIEVYKALDCSGMSRVDFLVDKDTTEMYLNEVNTIPGFTSISMYPKLWAAAGKDYSKLIDELIELAASRNNA

SEQ ID NO: 51522 - protein, 353 aa, Clostridium acetobutylicum
MNQEFIQALKEIVEEKGISEELLFSTIEDALVAAYKKNYAKLTENVHNVRVSMNRENGEIHVYSQKKVVQEIEDSICEISLDDAKSIDPKYQLDDIVDIEITPKSFGRVAAQAAKQVVIQRIKEAERSLLYDEFSEKEFDIITGTVLRKDKGNILIDLGRIEAILGPSEQIPGEDYIYNSKIKLYIVEVKNTTKGAQVVISRTHPGLVKRLFELEVPEIYNGIVEIKGISREAGSRTKIAVYSHDENVDAMGACVGPKGMRVQNIVNELKNEKIDIIKWSKLPEEFISNSLSPAKVLDVYIDEDTKSARAIVEDNQLSLAIGKEGQNVRLAAKLTEWKIDIKSKSQYDSEVHE

SEQ ID NO: 51523 - protein, 77 aa, Clostridium acetobutylicum
MVFEKVKDIIADQLGIDATEIKMESSFIDDLGADSLDIVELIMALEEEFDIEMPDEEAEKVSSVGDVVNYIKAHTEE

SEQ ID NO: 51524 - protein, 418 aa, Clostridium acetobutylicum
MNNYIIGIDVGSSKICIALGKLTKKGEVQIIGVTSSKCEGVKKSIVVNIDSTAESIKNCMAKLKKMVEFDLDDVYVALHGSISELIHNKGVVAVSSDDRAITSSDVKRVIESTRFISVASDREIIGVEPQQFIVDGYDNIKDPVGMSGTKLEADVHVITVNSNIVDNLIKSVNKAGYNVKGLCFEPKIVSNVVLSKHERESGCALVDVGTENINIAIIKNDNIVYIDNVPLGGDSITHDIALGLKIPFEDAENLKRNYANIDASINNGEKINIKLPDNQNLKVDYNFFKLIVQSRIEELYELIRKKLISKSYYNEITNVVVVGGGIALVKGSISVGRRILDKNVRVGSPNFVGASNPIYASAVGIVSDIGYNMKSSSFSYDDESSKNENKDSRNKNIKRDEEETNIFSKVKEFITDLF

SEQ ID NO: 51525 - protein, 248 aa, Clostridium acetobutylicum
MFEDLVGKVALITGSSRGIGKSIAEEMAKMGIEVVINYRNDEKGALDTLKSIKNSGGIAEVYKCDITSYSEVKNMFEFIISKFGKIDLLVNNAGISKIGLFIDMKENDYNEIMDNDFRGVFNCTSLAVKYMLERKSGSIINISSIWGNVGASCEVLYSAAKGAVNSFTKALGKELAPSGIRVNAISPGVIDTEMNGSFSNDEKNDLENEIPMCRFGKTSEIAKIAIFLASEEASYITAQVITADGGML

SEQ ID NO: 51526 - protein, 289 aa, Clostridium acetobutylicum
MNNKVIKKEVEEYLSRYFEGKDNYNKRVYESMNYSLNAGGKRVRPLLLLASYAIYNKDYKEVIDIAAAIEMIHTYSLIHDDLPCMDNDDLRRGRPTNHKIFGYSIALLAGDGLLNEAMNIMFKYCIGKGEEALKACLMISKAASSDGMIGGQVVDILSEGKKINEDELRYMHKKKTGELIKAAVVSGAILGGAPLHDVELLSQYGDKLGLAFQIEDDILDIIGDTKIMGKTSKSDLENDKCTYVTLYGIDKCKSICRELTDECLDIIGKIQGNTELLKEITELLLKRNR

SEQ ID NO: 51527 - protein, 865 aa, Clostridium acetobutylicum
MDVDKLTLKVQQAINDCQTIAVRYNHQQIDTIHLFMAIISQEDGLIPNILGKMGADVETVKRDTEAELDRMPKVLGEGAQNASIYATRRFEEVFVRGEKISRDFKDLYISVEHVMLALMDIDSGAIKSILDKNNISKKEFLKALREVRGNQRVDTSDPEGTYDALNKYGRDLVKDAKKHKLDPVIGRDEEIRRVIRILSRRTKNNPVLIGEPGVGKTAIVEGLAERIVRGDVPEGLKNKIIFSLDMGSLVAGAKYRGEFEERLKAVLKEVERSEGKIILFIDEIHTIVGAGKTEGAMDAGNIIKPMLARGELHCIGATTFDEYRKYIEKDKALERRFQKVQIDEPTVDDAISILRGLKERFEIHHGVRIHDNAIVAAAKLSDRYITGRFLPDKAIDLIDEAGAMVRMEIDSMPTELDMLKRKIFQMEIEKEALSKESDKFSRERLESIQKELSDLKDKDKAMTAKYDKEKAQIQGIKELKTKLDEIRGQIEKAEREYDLNKAAELKYGEVPKLEHEIEEKENLIKQNGQNAMLKEEVTEEQVSNIVSKWTGIPVSKLVEGERNKLMRLSDELEKRVVGQTEAVKSVADAVIRARAGLKDMSKPIGSFIFLGPTGVGKTELAKTLARVMFDSEDNIIRIDMSEYMEKYSVSRLIGSPPGYVGYEEGGQLTEAVRRKPYSVILFDEIEKAHSDVFNIFLQIFDDGRLTDNKGNTIDFKNSIIIMTSNIGSEHLLNNKGVSNVDEETKDKVMNELKGRFKPEFLNRLDDIIMFKPLSINEIGKIIDIFLENIKSKLKEKNIKIDIAEEAKKIIAEEGYDPVYGARPLKRYIENTIETHIAKMFISGEISEGDILKIEGSDSKLTIVKK

SEQ ID NO: 51528 - protein, 170 aa, Clostridium acetobutylicum
MKKKVYKNRLALFLSAIIILTSFVGCSESSTSKKSNSNTAKTIAKPKPKTAQSVLDELKKKESAYMTNITVVTADNDSNKLLGRPNQYTEKVTWKDNRSKDSQVDCSIELFKNKDDATARKDYLEKIIKSMPMLTQYIEQKDNVLLRIDGVLTPEQSKEYINIFNSIFKN

SEQ ID NO: 51529 - protein, 254 aa, Clostridium acetobutylicum
MSFKEIKSTLEDMDEQSRLSAAHDIMDDTRKNVKSLGKKILNAYEKKQNEIARVKKLYEFDKQFGNIVIAGVDEVGRGPLAGPIVGAAVILELNVEKDLDLILGINDSKKLSSKKRQELSEIIKEKALAWEIASLDNNEIDKKGISWCNNEIFKIAISKLKKVPELVISDGYAVKGIGIKNHYIVKGDAQSASIACASIIAKVYRDNLMGEYAKSYSEYGFESNVGYGSKDHIDAIKKFGTTPIHRMSFLKNII

SEQ ID NO: 51530 - protein, 367 aa, Clostridium acetobutylicum
MKELEEIRKEIDEVDKIITELFEKRMNLVMEVAEYKEKNSIPVSDSKREKKVIDKNIGYLKNKEYSEVLKEFYINFMNLSKKLERKRIYNEEKTSVNTSIYGLIGEKLGHSHSSYIHKLIFEKVGIKGIYNLFEVPKEKLKESVDTFKIIKCGGLNVTIPYKVEVMKELYEISEKARKIGAVNTLKFSREGISGFNTDYIGFGKMLSKFRVEIKNNICVVLGSGGAARAVLQYLKDNFAKDIYVVTRNPEKTSEIYGEFKVISYDELSNLKGDVIINCTPKGMYPKEGESPVDKEVVAKFSSAVDLIYNPVETLFLKYARESGVKAVNGLYMLVSQAAASEEIWNDISIDEIIVDEIFEVLEEKIKS

SEQ ID NO: 51531 - protein, 103 aa, Clostridium acetobutylicum
MYAVIATGGKQYKVQEGDAIYVEKIAAEVDSTIELNEVLAVSKEDGLVLGKPVVEGAKVVAKVEAQGKSKKIIVFKYKRKKDYRRKRGHRQAYTKLVIEKIQA

SEQ ID NO: 51532 - protein, 334 aa, Clostridium acetobutylicum
MKKNHTITLIPGDGIGPEVTGAAKKVIEAAGVSITWDIVEAGAKVMDEYGTPLPEYVLESIKKNKIALKGPITTPVGSGFRSVNVALRQTFNLYANVRPIKTYEGIPTRYKDVDLIIVRENTEDLYAGIEHKIGDYAAESIKIITREASERIADFAFDMAVKQNRKKVTAVHKANIMKFSDGLFLDCARKVAEGYKEKEFEDMIVDAMSMKLVQNPEKYDVLVMPNLYGDILSDMAAGLVGGLGVAPGANIGKEISIFESIHGSAPDIAGKNIANPTAAILSGVMMLRYIGELEAADKIDNAIKVVLKEGTKVTSDLGGNATTDEFANEVIKNI

SEQ ID NO: 51533 - protein, 778 aa, Clostridium acetobutylicum
MNQENKVLPLIPLRGLIVFPYMVVHFDVGRDKSIEALEKAMMNDQQIFLSTQKDAKIEEPNEDDINSVGTICSIKQILRLPGDAVRVLVEGISRGKIDKYLKQEPFIEAEITEFKDEDNYEEYEIKALMRIITKEFGKYVKLSGAVTKDAVDFLKDIKEPGKFADIVSSYLIIKQEQKQSVLNSIDEKERLENVLTVIKDELQILELERNIGVKVKEKIDKSQREYYLREQIKVMQDQLGDDDEEKAEIKEYTQKIKKGKLTKEAKEKALHELKKLENAGAYSPEGAGIKTYLDWILSLPWKDKTKDNLDIKRAREILNKEHYGLSDVKDRIIEYLAVKKMSKSLKGPILCLVGPPGVGKTSIAKSIANAVNRNFVRISLGGVNDEAEIRGHRRTYVGAIPGRIIYGMKQAKSNNPLMLLDEIDKMSSSYKGESADALLEVLDTSENNKFRDNYLELDFDLSDVMFVTTANTLETIPRPLMDRMEIIEVSGYTYEEKFHIAKEHLIPKQLEEHNMPEDKKITFMDSSIYYIIENYTRESGVRSLERKIAAIIRKIITEIVEKDKSSISVNSRTVKKYLGEDVFSADKIDKEDKIGVVTGMAWTAYGGDTLPVEAVIMPGNGKLQLTGQLGDVMKESAQAGYSYVRANSVKYGIDKEFYKNKDIHVHVPEGAVPKDGPSAGVTMITAMVSALSDKKVKHNVAMTGEITLTGRVLAIGGLKEKTLAAYRAGVDTIIIPKQNEKDINKVPKAIRGKIKFILAEEVDTVLENALIGGINNDN

SEQ ID NO: 51534 - protein, 165 aa, Clostridium acetobutylicum
MIKIAILTISDKGSRGERVDGTGLELKKLLANLGYEISFYKIIPDERRDIEKELIYLADELKVNLILTNGGTGFAKRDVTPEATKSVIEKDVPGISEVMRMNSVKINSHAMLSRGVSGIRKDSLIINLPGSTKAAIESLEFVLPAIPHGIDILNGYSLNSSYIHS

SEQ ID NO: 51535 - protein, 643 aa, Clostridium acetobutylicum
MIVVSCKNIGKSYGIDKILENITFSINDGEKVGLIGPNGAGKSTLFKILTFQLEHDTGDLFIDKTKKLGYLSQHLDLDSNNTIYEELCTVFNDLLEIENKLKVLEIKMGEPYDPSKDEYHNKVIKDYTTYTELYSAKGGYTYKGLIGRVLTGLGFSNDYFDKKISILSGGQKTRVALCKLLLKNPEILLLDEPTNHLDLDAIEWLEEYLKNYKGTVILISHDRYFLDAITNKTFELINGHVNCFNGNYTKALDLKKKQYEIELKAYTLQQEDIKRQEKIIERFRSFNREKSIKAAESRQKALDKIERVKRPDKETGVTRIEFETLIKSGNDVLHVENLSKHFEDKTLFENLDMDIKKGEKIALIGENGRGKTTFFKILLDKIKSDSGIKVLGKNVFVGYYDQEQSDLHDEKTIIDEVWDDFPELTTTEIRNALAAFLFTGDDVFKIISTLSGGEKCRINLLKLMLSKNNFLLLDEPTNHLDIVSREALEDALLSYDGTVLVISHDRYFLNKVVSKILELKENGISEYLGNYSYYIEKKNNPTRFQEEEENKSLKTKTQINTEKKKKRENEKQKRVRKVELKNTEKEIADLEKELEDLQNKLCLEEVYSNPEKSVEVNNKITETQNTLDSLYEKWDELSSIMED

SEQ ID NO: 51536 - protein, 461 aa, Clostridium acetobutylicum
MINDVINTIEKNSMIKQNDRIVVAVSGGPDSICLLHILFKLKDKFNTSICAAHVNHCIRGEAADKDEEYVKKFCEKLDIQFYVKRVDVNKIAHEKKISSEMAGREIRYAFFEEVKERFKANKIAIAHNANDQAETIMMRIIRGTGTEGIKGIRPVRDGYYIRPLIEIRRSSIEKYCEDEKLMPRIDATNLERDYNRNKIRLDLIPYIVKNFNEDIVGALNRLGELVTIDNDYLEKLAKSKYKLYCNECEKQVIISKEAFSNDTAILSRIIRRAVFYLVNSKYNLEKKHIDSIIGCQKNTTGKQINLPNNMRAYNNYGDICLRIKEDESCIGKKEYNLHMDKLNSVHEENLIIGIRLIHNSKDIRLEGNKNVKYFDADKAGKYITLRYRSEGDKFMPFGMKNNKKLKDIFINLKIPREERNKIPLICFGGEIAWITGFKISEKFKIDNNTKKILEIKIEREE

SEQ ID NO: 51537 - protein, 153 aa, Clostridium acetobutylicum
MELRVAGFLDNSMVNGEGLRSVLFLSGCRRRCPGCQNTDMQDFKYGESVSAEEIFNRIKSNVPIIKGVTFSGGDPLEQAEGLINISKEIKKLGLNIWCYTGYTYEEILKEKDSNKLELLKYIDVLVDGEFKAELTENAPKYAGSSNQRIIRLK

SEQ ID NO: 51538 - protein, 1819 aa, Clostridium acetobutylicum
MAQEDIADLAIRLSMEDASFTQGVQNLKRNLTIIDSGFKESIAGLKDWGKNVDALKSNASALGEKIETQNKIVKSYQEQLDKTKKSLQENSEKMLELKEKVESAKTAWEESKQELGANAEATQKLKKDYDELNKEYTQTEQKVRSASKSVDGYTIQLSNQEAKLKTMQAELATTNKHIAEQNSVWLATGKQLGTASKTLKTVGEGFVSVGSTMSTHFTLPFVAGVGLATKAASDFEHQMADIQKEIAAKGEDVKSVMSQMSNSSLQWSKDFGQSTDNINEGLLTLVKDGYSGSESLEAMGIALNTARGANEELAPVVDGLGSSLEAYKMKTDNASETTSNMAHMADTFAYIANHTKASVISLSESFSTVGPTASALKQPMAETAAAIGELQSNGIDAGTAATSLQAGLVNLTKPTKKMKVALDELKFSAFDSKGNMKDLTTIINEMNGKMAGWTNEQKQAAIATIFGKESLASWNVLLNKGGGYLKDLSDHANNATGEVKKLSDSMKNTSKNNFKELEESVHALGVAFGEDVLPSVIPVVKEVTNGVNAFSKLDDATKKNIIEIGALIAVGGPALSLIGKTTKGLGKIINGLGKLSDWFGKKLIEKGLKDNTKAEAENTSSVATNTQTINNNTKAEAENTAATELNTKAKQSNSNTLENSRSKAKDLEKDVEESTKKTGKATDAVKDLGKETEETAGKLGNAAEKTEGLGGKIATTAGEAGTAAGTIEGLGAATGGAAEAAGGLGAEAGAAAGGLGAAEGGATALGGAAVGLAAPIAIAVAAIGALGFVGYEVHKKLTDNTIPTIDLFADDVQVKNGNISASSATMAGQVETSVTKISDSTKKAVGAYEKLNDSVTKTEEDMYINSDKFTTQTKNTVIKNFSDIVNSSTGFNDEFKSNRIKMFTDIVDNTNTLTAENKDTIVNAYKDLLHQTDGLTLQQKDAIIKNLKDTMTNSVGITQSQVSQIKSKYDQMTNMVNSATDKRAQDETKTLQNLFSKSTSISNDEQQAILFNIQRGARDQKAVTSAYEQQILQIYQNASSQHRSVNAQEWQQINQIRDTMQKNGVQILSKSEVDSKIIMQRLKDYNKNITEQQASDTVQNAEKARKGAVDAANKQYNDQLANIIQLRDGTHQITAQQADDMIKEAKRQRDESINKADDMKQGVIKKVGEMNQGAIWDMNTSTGQMLSPWQKLERDISTTFDQLGKDIGNAWDQINKTIQDKMVEAQKWIDKHPIIAKIQKGAVGAANELCKILSGDGFATGTENAPQGWHWVGEQGAELMWFNGGEQVIPHNDSQKIVEQMQKTGGSAPAMTADSDKLKTTEQYGQNLNTSFGKGLTNSLDYAINPLNNMTNKLNDTMNVTATRYISYGKKNIQNLGAGITQNAGVATESLGNLTDRLNTNMSTFASNAINHGLNTDTSIKNGINNKSQDVVNAQKNITDTLNNNLNTFATNAITHGVKTDSSVQSGLQNNSGAIYNALNNITNTAGNMLHNFANSCSNYGAEAVNSIGAGIQQSEGNLTNIVKDLTDKVTKAFNEGFDIHSPSRKLFWTGTMVGQGLMNGIQSKNLGGFIKKWLGNLTGNVQVAGGNISSILAAALSIDGEPLSWLPALEMITSRESGNPGTMGTGDAGLINNIGVGGEFATGLMQMLPSTFREYAKNGFGNILNGLDNAVAAIRYIADRYKTPFAIPNWNNSSYIGYKTGTDNASKGWHLTGEEGPEWVYFNGGETVLNNKNTSSVMDNFKSLLNTIKSTKISIPDVSGNTYNTTNNYVGNTTNSGGYGHAETIIVKSPIYLDSRQIGEAVTPVVSNKIARKFKGMR

SEQ ID NO: 51539 - protein, 306 aa, Clostridium acetobutylicum
MTNENIVDSNLRKKGLIFAVLASTLWGISGIAAQYLFQMEDFSPEWLVVIRLIISGVLLLAATYVATKKNIFKVFKNRHDIFSFIMFGFGGMLAVQYTYFVAIKYSNAATATILQYLSPVIITIYLIVHLKKLPSLYEVIGIILALIGTFFIITKGDIKTINISGITLFWGILSAIAAAVNTLQPRRILAKWGSNLVAGWGMVIGGVLMSFVHSPFQFKGHISLVSISCVAVVVIIGTLIPFWLYMESIKYIKPTEASILGAFEPLSAAILSLAFFNLHFSVLEWLGSGCIILTTIILSTVKNSSN

SEQ ID NO: 51540 - protein, 206 aa, Clostridium acetobutylicum
MPTVEVFNKEGKKVEDIELSEKVFGAKISESALHQVVVAQLANKRQGTQSAKTRTEVSGGGIKPWRQKGTGRARQGSIRAPQWIHGGVVFAPKPRDYRISIPKSMRRTAMLSALTSKVNDKEMIVLDELKIDAPKTKEIVKMLNAFEAKKALIVVAESDQNVYKSVRNIQGAAVIPANNLNVYDILKYDKFIVTKEAVSKIEEVYA

SEQ ID NO: 51541 - protein, 1065 aa, Clostridium acetobutylicum
MPLDKTIKKVLIIGSGPNNIGQAAEFDYSGTQACKAVKEEGIETVLVNSNPATIMTDSHIADKVYIEPLTEEAVEKIIEKERPDGILAGFGGQTALNLAMNLNDAGVLDKYNVRLLGINSEAIKKAEDREEFKNLMEEIDEPVPKSIIATHIDECIDFVNKFGLPVIIRPAFTLGGTGGGIASTMEELKEICDRGIKMSPIGQILLEQSVAGWKELEYEVMRDAKDNCIIVCNMENLDPVGVHTGDSIVTAPSQTLTDKEYHMLRHSALKIIRNLKIEGGCNIQFALNPKSNDYIVIEVNPRVSRSSALASKAAGYPIAKIAAKIAVGYSLDELKNYVTKNSSACFEPALDYVVVKIPKWPFDKFNTAERHLGTQMKATGEVMAIDRDFESALLKAVTSLEGKISGLRLEKFEYTTVRELLEKIKKQDDERIFAIAEAFRRGVDVKQIHEVTEIDNWYLNGINRIIDMEKELQDKNNKDKDKSIIKAKKMGFTVAEIARITSLEEGKIKNILNVNNVKPVFKMVDTCSGEFEAETPYYYSSYENEDENEVTDDKKIVVIGSGPIRIGQGIEFDYCCVHGVWAIKEAGYKSIIINNNPETVSTDFDTADKLYFESLYIDNVMNIIEKEKPEGVIVQFGGQTAINLADKLYKNGVKILGTSFESIDLAEDREKFSELLKELNIPQAKGMAVTSMEEAYEAVKEIGYPVIVRPSYVIGGRAMQVVYDKLALQKYMTEAVTLSTEHPVLIDKYIKGTEIEVDTISDGENILIPGIMEHIERTGVHSGDSITMYPYHTLPKEVVDKLVKYTKSLAKALEVKGLMNIQYVYDGENVYVIEVNPRASRTVPILSKVTGVPMVKLAVEILTGKNLKELGYGVDLKKDNKLYAVKVPVFSNEKLANVDIYLGPEMRSTGEVMGIDSDFEVAIYKGFRAAGIEVPKDGGNLYVSIKDVDKQESVPIIKKYTEFGYKIYASLGTGKFLQKQGIDCEVLRTDDLMKAIGDGKINLIINSPTRGNTVGTRGFSIRRKAAEYKVGAFTCIDTAKAFLTAIKVKREEAKVEYRAMKEYFK

SEQ ID NO: 51542 - protein, 215 aa, Clostridium acetobutylicum
MNIAKIIDHTALKPDTTKEQILKLIEEAKQNNFASVCVNPKWVKEASCALKDSSVKVCTVIGFPLGANTTATKVFETQDAIKNGAEEVDMVVSIGELKDKNDDYVEKDIEEVVKAASGKALVKVIIETCLLTEEEKIRACKLAKKAGADFVKTSTGFSTGGAKAEDIKLMRKTVGAGMGVKASGGIHTREEAIKLIEAGATRIGASASIDIISEN

SEQ ID NO: 51543 - protein, 257 aa, Clostridium acetobutylicum
MLNFIRSDKDKGKGNDNDINFSNIPKHIAIIMDGNGRWAKKRNLPRTMGHKAGGEALKRIVRECSDIGVKYLTVYGFSTENWIRPKEEVNAIMRLIVEFLKREFNELNKNNVIINPIGNILGLPEACITALNDAKNKTKNNTGLMLNLALNYGGRDEILNAVKNIFASYEENKISKDEIFNLSDEEFSSYLYTGCIPDPDIIIRPSGEKRLSNFLLWQCAYSEFWYSNINWPDFSIEDLHTAIKDYQNRDRRFGGVK

SEQ ID NO: 51544 - protein, 408 aa, Clostridium acetobutylicum
MRILHTSDWHLGKNLEGYSRMDEQEEFLEDFIKIVEENNIDMVVIAGDIYDTYNPPARAEKMFYSTLKKISQNGERVTLVIAGNHDNPERLVAAGPLARDHGIIMVGTPKSVVPTGEYGKHKVLSSKEGFIEIEVNGERASIITLPYPSEKRLNEVLYEEMDSEEEKVKSYGDRIKQLFDRLSENFRDDTINMVVSHLFAMGSEEGGSERNVQLGGSFIVNGDCFPKNAQYVALGHVHKPQLVPGTHKIARYSGSPIQYNKKEINFKKKCFLVNIEAGKEPIVDEIEFKVYKPIEVWKCTGVEEAIKKCEENKDRDCWVYLEIVTDKYIGEEEMKAMKSLKKDILEILPKVSVDNEIIDMASFKERPFEEIFKEFYKKERKVEPDNEVVDLLLSIINGGEAEDETHKS

SEQ ID NO: 51545 - protein, 304 aa, Clostridium acetobutylicum
MNLNGTEYYYIKNAQDDIIGLIDKAGTQVTSYTYDTYGKVISIDGSLKDTAHKINPYRYREYRYDSETGLYYLQSRYYNAEWGRFVNADVITAVTGDILSTNMYAYCKNNFINMSDVNGDFSMANIGAMIGTMIGTMMVDGIRSMMSSITGKINKAIDKHPYKTTVIQSTVDVTAGYKYNKIRTSRVFKTVRPVELTVYEELPFNKVLKFMGNKVGMLSAGLTVRSLILDYERNSGQKVVTAMLIDIGGFAATYYAGDLIGRATTPLIEVNPPAGIAATVVLVGASSVGIGIFTSKAKEYFSVN

SEQ ID NO: 51546 - protein, 387 aa, Clostridium acetobutylicum
MSKSYLMNTYGRFNVTFDKGEGTKLYDKDGNEYIDFVSGVAVNCLGHCNPSIVKAIEEQSSKLMHVSNYYWNENAMELTEILCKNSEFDKVFMCNSGTEAIEAGLKLARKYALLHGDENKKEIIYMDNSFHGRTMGALSVTGQPKYQESFKPLIGAVKSVKFNDLDDIKQKISSKTAAVIVEPIQGEGGIIPAKKEYLKLLRDLCDENNALLIFDEVQCGMGRVGSLFAYQKFEVVPDIVCIAKALGGGFPIGAMLAKESVASSFVPGDHGNTYGGNPLACAVAIAVLKELVDKKVVEINVNEKSKYLFDKLMTLKEKYKVINDVRGMGLLIGVEVACDVKKIINKCFESKLLLITAGKNVVRFLPPLNVSFEEIDKALGIFEESIK

SEQ ID NO: 51547 - protein, 331 aa, Clostridium acetobutylicum
MSETIRFGIVGTSSITEKFLDGSNHVKDFSLTAVYSREESKARDFAKKYGAENIFTDLEKMAKSDLIDAVYIASPNAMHAKQAEVFLKNKKHVLCEKAFASNVEEVNKMISVSKENKMVLMEAMKTEYLPGFFAVKENLHRIGKVRKYFGNYCQYSSRYDKFKQGIVLNAFKPELSNGSIMDIGVYCIHPMVYLFGEPNKLKANAVLLESGVDGEGSILFNYDNMEAVVMYSKITNSRVSSEIQGEEGNIVIDNINTFEKVKIVFRNGEEEDLSRVHIEDNMCYELEEFIRLVKEQDTKKALQRLKVSKSVMEIMDEARKQIGLVFPADKN

SEQ ID NO: 51548 - protein, 693 aa, Clostridium acetobutylicum
MPKVRIYELSKELGRSSKELINILHDEFGIVVKNHMSVIDEEDAELIKEMLSESNDEDKKSDLVEEYEDMISDSIKVRKNKKVKQKDKDKENTDEDEEEEQEFDDVIEIENTITVKDLADKLKKPITEVIKELMFMGVMAAINQEIDFETSSKVAAKFKVDVIQKAEEADKKELKSEFENEFEEDEDEGTWIKRPPVVTVMGHVDHGKTSLLDAIRKSSVTETEAGGITQHIGAYTVKMNEGKVTFLDTPGHEAFTAMRARGAEITDVVILVVAADDGIMPQTKEAINHCKAANVPIVVAINKIDKPGANIDRVKQELTEHGLIPEDWGGDTICVPVSAKTKQGLDSLIEMTILTADVMDLKADPKRHARGTVIEGKLDKGRGPVASLIVQNGTLKVGNSIIVGSTYGRIRAMFDDKGKKIKSAGPSVPVEILGLSDVPEAGDKFNVVKDEKTARNMAKIRVEKLRSANLASKHKVSLEDLYSQIQEGKVKELGIIVKADVQGSVEAVKQSFEKLSTDAVKVRVIHGAVGAITETDVILASASNAIIIGFNVRPDNNASALAEKEKVDIKTYRVIYTAIDDIKSAMIGMLDPEYKEEVIGNAEVRHIYKISSIGTVAGCYVTSGKITRSSSIRVIRDGIVILEGELASLKRFKDDAKEVARGFECGLTIDKFNDIKEGDVIEAFQMVKVKQEG

SEQ ID NO: 51549 - protein, 342 aa, Clostridium acetobutylicum
MNLNLTKNMKYILLLILLFIVLIFTFIFSISTGSLKINFGEVFNILFKIGDFNDGDYQIVWNIRFPRAIGALIGGSALSVSGLLLQVLFKNPIVEPYVLGISSGATLFVALVMLGGISFGFAASSPFLVFLAALIGSTLIMFLVILFANKVKSVVTLLIIGIMVGYICSAVTNVLSAFADKQQLQFFTMWTLGSFSGFTWKNIYILFFIGIPSLLAAFLIVKPLNAFILGEQYAKSLGIKIKFFRIIVIIISSLLTAVVTAFAGPIAFIGLAVPHISRLIFKTSNTIFLIPGTILLGGIITSICDVISRTVFSPTELPISAVTAFIGAPIVIFLILKRGTFS

SEQ ID NO: 51550 - protein, 245 aa, Clostridium acetobutylicum
MSLNKRYLGAVILAPLLIILFLGGIYLKIFVFALSMIGLYEYYKVSREANLKPISIVGYLLCIAYYVLINYKLNYKFVLFMIVIGIFIMLCVPTLDTKYNYIDISVTILGFIYVAVFFSFIALTNDLKYGNYLLWIIFIASWLCDTLAYYSGRIFGKTKLCPKVSPKKTIEGSIGGVLGSVIGCTVYGFIISKYGVNIAIYHYIIIGILCGVFSQFGDLAASSINEHAQVKDYSNLIPGHWRYFG

SEQ ID NO: 51551 - protein, 265 aa, Clostridium acetobutylicum
MSMQKKTKDIQLKTSEENIKIFGFLDLGAFVAALYINKNIYFNLVILAVTILATIYLMGINDKKQYETAKLVTTLAKTLELRDNYTAVHSKSVAEYARFIAEKLKYSEEDCEKVFIGALLHDIGKIGISDTILNKPLKLTEDEYKTIQEHPQIGFSILELNEDFKENKILDMILYHHERYDGMGYPSGLKGNEIPQCASIVAVADAFDAMTSNRVYRKGKDRSFAVKEIIKNSGTQFDPQVVAAFIEYLSENMDSVKCEDELLVI

SEQ ID NO: 51552 - protein, 315 aa, Clostridium acetobutylicum
MLEIEKPKIECVESTEDGSYGRFVVEPLERGYGITLGNSLRRILLSSLPGVAANSVRIEGVLHEFSTVKGVKEDVTELILNIKALCLKMEGEDSKVIYIDAHGPGEVTGADIRTDGSVEVINKDLHIATLDEDGKLYMEIEVNRGRGYVTQNKNKRDDMPIGTIAVDSIYSPIKRVNFTVENTRVAQITDYDKLTIEVWGNGTIRPEEAISLAAKILIEHFKLFMTLTDHADDVEIMVEKEEDKKEKVLEMTIEELDLSVRSYNCLKRAGINTVQELTQRSMEDMMKVRNLGRKSLEEVEQKLKALGLSLKLNDE

SEQ ID NO: 51553 - protein, 242 aa, Clostridium acetobutylicum
MHYSLAVKLVCEMLGTAILVLFGNGAVANVELKGTKGYRNGWIIIAIGYGVGVMLPALMFNKISGSQTNPAMTIGLAVNGLFPWSEVIPYILAQFVGAIIGQVILYFIYLPFYKQTEDTKSILGTCSTISASGSHINGFVTEFFGTFLLVLGAMFILNSTGVKSTPAVGYVGLGFLVCSLVASLGGPTGPGLNPARDLGPRIVHSLLPLKNKGNSEWTYAWIPVLAPMFGSIIAIFLFNKIY

SEQ ID NO: 51554 - protein, 570 aa, Clostridium acetobutylicum
MKMSNMLMLTLRESPAEAEIESHKLMLRSGMIRKMASGVYNYMPLGLKALKKVENIIREEMNAAGAQEFLASALLPSELWKESGRWEVFGPEMFKLKDRNEREFCLGPTHEEVFTDFARSEIKSYKQLPVNLYQIQTKYRDERRPRFGMIRSREFVMKDAYSFDKDNEGLDVSYNKMYEAYTKIFKRCNVSCSAVAADSGAMGGSGSAEFMVKSEIGEDEIAFCTECNYAANIEKAPAVPEKADKEELGELKKVETPHAKTIEELVEFFGVDSKKFVKTIIYRAENKVVAVMVRGDREVNETKVKNAVGSVDVELADEKTVKKATGAEVGFAGPIGLDVDYLLIDNEVTYMYNFIVGANETGYHYANANYDRDFKGTVGDFRNAVEGEKCPKCGKPLTIARGIEVGHIFKLGTKYSEAMKAYFVDENGESKPLIMGCYGIGVNRTMSAVVEQHHDDNGIVWPLSVAPYEVIVVPAVFKSEEQMKEAEKLYTELKKIGVDALLDDRNERAGVKFKDADLIGIPMRITVGKKISEGKVEFKCRNSEEVEVIDLDKVIARVEEEFEKNNLALK

SEQ ID NO: 51555 - protein, 209 aa, Clostridium acetobutylicum
MSKVTQISHPLILHKLAFMRDKKTGSKDFREMVEEVAMLMAYEVTREMQLETVEIETPICITKCKMLAGKKVAIVPILRAGLGMVNGVLKLIPAAKVGHIGLYRDEKTLKPVEYFCKLPQDIEERDIIVTDPMLATGGSAIDAITLLKKRGAKYIRLMCLIGAPEGIAAVQEAHPDVDIYLASIDEKLDENGYIVPGLGDAGDRLFGTK

SEQ ID NO: 51556 - protein, 881 aa, Clostridium acetobutylicum
MKYMGLNDIRESYLSFFEKKEHLRLPSFSLIPKNDKSLLLINAGMAPLKPYFTGLQTPPKTRVTTCQKCIRTGDIENIGKTSRHGTFFEMLGNFSFGDYFKEEVISWAWEYITEVLKFPKDRIYITIYLDDDEAFKIWTEKAGVDPSRIFRFGKEDNFWEHGSGPCGPCSEMHFDRREKPDLIKTREKFIELQDKDEVIEFWNLVFTQFDKDEDGNYNKLKNPNIDTGMGLERIATIMQNTDSIFEIDTIREVLDAVCKICNVKYGENHKNDVSLRIITDHIRSVTFMISDGILPSNEGRGYVLRRLLRRAARHGKTLGIEKTFLCGLCDVVIKNSKGAYKELEEKQDYIKNVIEIEEKRFDETLDSGMEILKNYIDELSLENKKVMSGEKAFRLYDTYGFPVELTQEILEEKGIEIDMNDFHSEMEKQKNRARDAREESNYMGKEIKLIDKLPESVTTKFVGYNSTSTDSKVEVLIKDDEFVSTINEGESGIVVTEETPFYAEMGGQIGDKGIIFGKNGEAKVVDCKNNISGKIIHIVQVVKGSIEKNENVTLEVNYKKRKDICKNHTATHMLQAALKKVVGSHINQSGSYVDNERLRFDFTHFTALTDEEILKVEAMVNDEIMAAYDVKTDIMSVDEAKKTGAMALFDEKYGNRVRVVSVGDFSRELCGGTHVNNSGEIGLFKIISESGVAAGIRRIEAITGKEAVRYTEENDNLIRNIEQELKCSKKDILNKINQYHSELKEKEKEINILKGKLASGFEENILSSVKEVSGVKYVASEVKGISGDTLRELCDKVRNKIDDGMVLLASKDGEKVQFVAMASKNAVKKGVHCGKVIKEVASMCGGNGGGRPDMAQAGGKDGEKLETALKEVGNIMEKLVK

SEQ ID NO: 51557 - protein, 451 aa, Clostridium acetobutylicum
MPWFKKAIFYHIYPLGLCGAPLSNDFTSKPIPRLKEIENWIPYLKSLGITALYLGPVFESTSHGYDTADYYTVDRRLGTNDTLKKLINKLHKNGIKVVLDGVFNHVGRNFPQFMDLIINKQTSSFATWFSGVDFNSKSPYNDDFSYDTWNGCYDLVKLNFNNNEVKSFILNAINFWISEFKIDGIRLDAADCIDINFLREISNFSKSISDDFFLLGEIIFGDYTRFASKNILDSVTNYECYKGLYSSHNSLNYFEIAYSLNRQFGDGGIYKNIPLYNFVDNHDVNRIASTLIDAANIYPIYTILFTIPGIPSIYYGSDFGITGVKQNNSDKYLRPRLKINELKNSKENKPLNNFIKKLCHIRINSEALTEGLYKQLFISNKLFAFLRYTDSEKIIVALNCSKECSQIEFSNDMNATSLFDLIEKKSLKLEPNGTISITLQENQARIFKVSF

SEQ ID NO: 51558 - protein, 256 aa, Clostridium acetobutylicum
MEVLRIENLRKVYGSKFGGVKYTALKDINLKVNKGEFVGIMGPSGSGKTTFLNVISTIDKPTAGNVIIDGKDIVKLREPGLSKFRREKLGFIFQDFNLLDNMTIKENIVLPLALAKTPYNVIQKRLEDISKKLGINEILNKHTYEVSGGQKQRAAAARAIITEPSLILADEPTGALDSKSSKELLNSLGYLNEKNEATILMVTHDAFAASYCKRVIFIKDGKLFNEIYKGDRDRKGFYESILKVLSVIGGEANDIM

SEQ ID NO: 51559 - protein, 274 aa, Clostridium acetobutylicum
MENSQELTPWQRLTIARMLERPTSLEYIDLIFDSFMEFHGDRAFGDDAAIVGGVAEFNGMPVTVIGQQKGRNTNENIKRNFGMPSPEGYRKALRLMKQAEKFNRPLICFVDTSGAYCGVEAEQRGQGEAIAKNLISMANLKIPVISVVIGEGGSGGALAMAVADEVWMLENSVYSLLSPEGFASILWKDSSRAKEAAEVMKITADDLKGYGIIDKVIKEPDGGAQNDITMVANALRENLKKAIEGLSSTGINELLDNRYNKFRQIGKFIENEDN

SEQ ID NO: 51560 - protein, 84 aa, Clostridium acetobutylicum
MRLDKYLKVSRIIKRRTVAKEACESGRVSINGKVAKPGTDVEEDDIIEIRYASKVFKAKVVNITNHALKEDAKKMYEVISGEEI

SEQ ID NO: 51561 - protein, 285 aa, Clostridium acetobutylicum
MKIKDALIKAYSVLKETNDEFYMEDSQILLSYVLKKDRIFLITNREYEIEENSLKQYFDYINMRKKKMPIRYITEKCEFMGLDFHVEKGVLIPRPDTEILVEAVLEYIELNNYKKVCDVCTGSGAIGLSIAKYAKDVEVLCSDISPDAIRVSKINRQGLNLEDRVKIENGDLLEKPIERGEKFDIVVSNPPYIREDEIPKLMDDVKDYEPIIALVGGEDGLDFYRRITSMSKKVLKPGGLIAYEIGSDEANEVSNILENEGFVSIETRKDFARMDRVVLAVRGGL

SEQ ID NO: 51562 - protein, 722 aa, Clostridium acetobutylicum
MRHIYNIVSIYKRDIKSIIKNPIALLIIGGLCVIPSLYAWVNIQACWNPYEHTSSIPVAVVNNDKGGSFRGKYLNMGNQIVDNLKKNHKIGWVFVNTRNANMGIIDGSYTAMIEIPENFTGRFTSILKTPPKKPEIIYKVNTKLNPVAGKITGVAKDTLTNEITTEFIATVNKAIFSSLNKVGGEAEKNKNNILKLKNNIIDVNNNMDLILSLLNSINNNSNNLSMFLTQLKATIPTINSSLSMISKNNTDNKTMILNTQNTLNNSFNNIALNLNNAEAASYRIKNLTDALNTNFSSSNASIIYSDISKINTELDNLNNSISSIIEFLQNISATSPNESLANMLVSLKNTQGSIASQKSDINNLQKQLLSTNNLNKALVASITNRSSTMNKDLINTNTSYNGSVKASLNSISQNLVNVTNDASSILGTAQDLNNGINNLLQTSIDGSNLSSKVSLDLKNRLLQFKDIISALSSKLQETNNNDLIQIISILQSNPDFMGNFISTPFSIKDESIYSIPNYGSGMAPVYTVLAIWVGTLLLVSLLKTRVPDSQGLHILTLREKHFGKMLTFITLSLIQSFIVSLGDILLLKIYTVNPALLIAFALMSGFTFCVIVFTLVSTLGNIGKAISIIFLIIQIAGSGSTYPIQVDPLFFRILQPMLPFTYSVGGFREAIAGPLISSVMLDFTALILISVVFIFFGFFFKIPLHRPISKFEDGFKKSGVGE

SEQ ID NO: 51563 - protein, 179 aa, Clostridium acetobutylicum
MYEFLDRRYALALYEVGEKNQKLEEYINDFGEIVHLLKNDENINQVVNHPQISTSEKKKIFMEIFKGKIDEKLLNFLLLLLEKKRIHDAEGILTQLNKISLEKHNKVVAEVRTVIPLTDNEKTTLASKLSAKYNKIIIFKEIIDKTIIGGVYVRVGDDVIDGTIKFKLESMKKVMLKEE

SEQ ID NO: 51564 - protein, 232 aa, Clostridium acetobutylicum
MAGEKILVVDDEEHIVKLIKFNLENNGYKVITAADGGEALEKAKGEVPQLVLLDLMLPVMDGYDVCREIRRDQSISNMPVIMITAKGEELDKILGLELGADDYITKPFSVRELVARVKAVLRRTKVDYIDKTFKFGNIQIDFQRHNVTKEGEKVELTLKEFELLQVLIKNKGRVMTRDFLLDKIWGYEYIGETRTVDVHVRHLRQKIEDDDKNPKYIETIRGIGYRFNYSGD

SEQ ID NO: 51565 - protein, 518 aa, Clostridium acetobutylicum
MSISEQCVIEIDKYIDYFKKNTSQPNILAKLFKTDSSYYVYDTGTNKVLTCGEYEYSILGKIIDNKFDEISRINDDADKSGFYEALENVRQAIEKEDILRGGKEWKFVSKGHFEELDKKLNYELDQITLELTEKCNLRCRYCIYNESYEHKRNFGNKDMPIEIAEKAIDYANLHSGKEKGVGVTFYGGEPLVNFKLLKHSIEYSRKVIKDKKLTFSLTSNLTLMTPEIATYLASIENLTILCSIDGPEEIHDSYRKDINGNGTFKRAIRGLKYLIEAFGDKANKAVMMNMVFTPPYSIEKVNKIETFINSLDWLPKGLRISMTYPSTGSVDDTPPKGCEKNYGMELIQWSESKYKSELKSDGKIDMFNEEFVVHPILRIHGRRISAKSESGYPVNGCCIPGSRKLYVTVDGNFQICERINGSPIIGNVFNGIDENKIKNEVIDEFINKSIKDCSRCWAARLCNVCYSHCYTDGKLDMKEKKRYCIRSRERALRSLVFYHKCAEINPEKLKYLNKIEVS

SEQ ID NO: 51566 - protein, 478 aa, Clostridium acetobutylicum
MEILDMTVEQLRNAILDKHLKSEDIVKAYFDNIKRNEPEINAYITLCEDYALKEAKDVDKKIANGDKVGRLAGIPIAIKDNICTDGIKTTCASKMLYDFVPPYDATVIKKLKAEDAIIIGKVNMDEFAMGSSTENSAFKITKNPRDITRVPGGSSGGSAAVVAAKMAPISLGSDTGGSIRQPAAFCGVVGLKPTYGLVSRFGLIAFASSLDQIGPLGKTVKDCAELLEVISGEDELDNTSSKKHEKEDYLEGIDDGIKGMKIGMPKEFLNDGLDPEIRKCIDDTIEKLKSLGAEVCEMSLPITEEGLSAYYIISSAEASSNLARFDGIRYGYRPDDFEDVYDLMETSRSEAFGDEVKRRIMLGTYALSSGYYDAYYKRALKLKKKIKNEFKEAFENYDLILSPVSPVLPFKIGEKKADPLQMYLADIYTVNINLAGIPAISLPCSVSKEGLPIGLQLLGPHFGEKKIFRAARALEKER

SEQ ID NO: 51567 - protein, 441 aa, Clostridium acetobutylicum
MNNTRKIVLDVLNKVLSHDGFSNIVLNKALKGEEISSKDKGLVTEIVYGTIKYKYSIDIIISKFVKTKINKIDKRVLNVLRMSIYQIRYLDKIPDFAAVNEAVNITKKYISLKSSKFVNAVLRNYLRNPNIAFYNKDNSVEKLCFNYSFEPWMVKFFLKQYKNKAEEILKGLNENPSITIRVNRLKTSHKELWNELEKLDYNIEEGYILKDAIRIKKGHSIENNPLFVRGEFTVQDESAMLVSECMDIKENLVIFDMCSAPGGKTTHMGELLKNTGTIYAFDLHESKIKLINENAKRLGVENINASVLDASSYHDDFVNKADRILVDAPCSGLGIIRKKPEIKWNKNIKDLKELSDIQKNILQNASLYLKKEGILLYSTCTLNKDENEKSIIQFLKNNPNFKVEPIEFGEFPNLIYSPYGVTILPNEYMDGFFMCKLKKTR

SEQ ID NO: 51568 - protein, 164 aa, Clostridium acetobutylicum
MSVSFLRIDDRMIHGQTCTRWALEYPCDGIIAVNDAAANNPVLKAAYKSASGKKTFVWTYEHWKLKCDTVLKSSTRYFVITKEPIIMSKILVDDKFNPGIKEVIVGPCNDRPGTVKLGNNQSINQKEAEAFERIMQAGYNVEFALLKEEAIGNWKKFRGQFGFK

SEQ ID NO: 51569 - protein, 381 aa, Clostridium acetobutylicum
MKAIINGKIITEDSILENKVLLFDEKIIDIVDEKNLDRKTTYVIDAEGNYVSPGFIDVHIHGFSGADTMDGTLDALKTISRDITKNGVTSFLPTTMTMDRQKIYTALDTIREASTKCLGGANILGAHLEGPFISEKFKGAQAKTHILKPDYDFIKDYIDIIKIITLAPEEDENLEFIKTVKKNSDIVLSIGHSNASYDEAVNAIKNGINHVTHMFNAMTPLTHRNLGVIGAIFNNNIPSEIIADKIHLHPDIYKILIKTIGTNNITLITDCMRAGGLGDGVSELGGQKVIVKDDSARLENGTLAGSILTLNKAIKNVYENTDLKLNEAVKLATINPAKNINVFDKKGSLNNGKDSDITIFNDAFEIKLTIIGGDIIENSNC

SEQ ID NO: 51570 - protein, 173 aa, Clostridium acetobutylicum
MVISIGCDHIVPDIKMKISEYLKSKGHTVIDNGTYDFVRTHYPIFGKAAAEKVASGEADLGVILCGTGVGISNSANKVKGIRAALVRDVGTARYAKEYLNANVIAVGGRITGIGLIENIIDVFLEAKYKPTKENQEIIKGIDELIENDKGQFGNEHFFDEFIEKWDNGGYPKE

SEQ ID NO: 51571 - protein, 483 aa, Clostridium acetobutylicum
MIKVVGLGPGSKNALTLGTLEAVKNSQNIFFRTKKHPVVEYFDEIGIKYSTYDDKYETGESFDEVYDFIARDLVSKAKELKDIVYAVPGHPLVAEKSVQILIELCEKENIKVDIVPAVSFIDALMESLKIDPVKGLKIVDAFDIKNQILDKRLGIVITQVYNSFIASDVKLALLEYYKDDTEIYFVRAAGIENEESVRKIPLYELDRQSDIDYLTSVYVPCDINNNKDFYDLLNIMEILRGENGCPWDREQSHDTIKRALIEECYEAVEAIEKNDDDMMVEELGDVLFQVVFHAKIGKDEGYFNINDVISGICNKMIERHPHVFKNEQIKNSTEVLQKWDEIKRKQQDLNSYTEEMKHIPKILPALIRAEKVQKKASKVGFDFRNVEEALDKVLEETREVKDVYKGIIRDRIAEEVGDLIFSVVNIARLLDIDSEFALNYTIDKFIKRFYYIEKAAKDKNLKIESMSLEEMNALWDEAKLKIQ

SEQ ID NO: 51572 - protein, 159 aa, Clostridium acetobutylicum
MNITLITVGKLKEKYLKDAVNEYAKRLQKYCKLNIIELQDEKTPEKASLKEEKLIKEKEGEKILSSIKDNSYVVSMDLKGKMFSSEEFSAFIDDLGVRGNSSIDFVIGGSLGLSDAVLARANYKLCFSKMTFPHQLFRVMLLEQVYRAFRISRGEPYHK

SEQ ID NO: 51573 - protein, 371 aa, Clostridium acetobutylicum
MSKPKLLQKVEVDFVLFATVLLLVAIGVIMIYSASSYSALNSSMYNYDDMFFLKKQGVWAIGSIIILLIIEKIDYHLLKKVTSKLVVVTVILLLVVLAFPPINGAYRWIRIGPFGNLQPSEIAKYVIVLVLAKAIEKNGDKIKKFIPNFVAYLLIAMFFAGLVYIEKNLSIATVIMVVSLIVMFVGGAKLRHIVSIFVAMIPAGLFFITAESYRYKRFMTFRNPWKDSQGVGYQLCQSLLALGSGGLKGLGFGQSRQKCYYIPEPYNDFIFSIIGEELGLIGCIFIIILFIVLIQRGIKIAMNAKDTYGMLLAVGITSVIAVQAIINIAVVTGSMPVTGVPLPFISYGGSSLLFNLIAMGILLNISSQGNK

SEQ ID NO: 51574 - protein, 344 aa, Clostridium acetobutylicum
MHEILKLQQKIVPELMDLLEKRYDILRTIKYNQPIGRRILANKIGIGERVVRTEINFLKKQNLINISNPGMSVTKDGEEIIDKLKNFIREFKGLTDIEEFIRINLNIKKVIIVPGDIDEDSTVMNEIGRTAAKFIQSIILDGDIVAITGGTTMKTVVDNYSYSPRYQNTVVVPARGGMERNLQTEANTLAANFADKLGASYKLIHVPDNLSNEALSTIINEKSIKNAIDTIRKADIIIYGVGRADEMSKRRGLSEDEISHILGSGSVAEAFGYFFDKEGNVVYHTPSLGLKTEDIKKAKNIIAVAGSKLKAEAIVATQINGRGNILITDEGTAKEIVKILKGTK

SEQ ID NO: 51575 - protein, 249 aa, Clostridium acetobutylicum
MEKLLSGKVAVVTGAGRGLGRAIALKLAAEGANLVVNYRSSEAETQKLIKEIEELGSKAVAVKADISKYDEAETIIKKALDEYGTVDILVNNAGITKDNLLLRMKEEDFDSVINVNLKGAFNCIKHTSRVMLKKKSGKIINISSVIGLIGNAGQVNYAAAKAGIIGMTKSVAKELASRGITVNAVAPGIIKSDMTDALTDKQRESIVAAVPLNKVGEAEDVANLVLFLASDLSSYITGQVINVDGGMVM

SEQ ID NO: 51576 - protein, 131 aa, Clostridium acetobutylicum
MAVQKNKKTRRRKEKKNIEHGCAHIKSTFNNSIVTITDVNGNALSWSSAGGLGFKGSRKSTPFAAQMAAETAAKTAMEHGLKSVDVFVKGPGSGREAAIRSLQAAGLEVTLIKDVTPIPHNGCRPPKRRRV

SEQ ID NO: 51577 - protein, 1182 aa, Clostridium acetobutylicum
MELNKFDALQIGLASPEKIREWSRGEVKKPETINYRTLKPEKDGLFCERIFGPIKDWECHCGKYKRVRYKGIVCDRCGVEVTKSKVRRERMGHIELAAPVSHIWYFKGIPSRMGLILDMSPRALEKVLYFASYLVLDPKETPLLKKQLLNEKEYREAADKYGEESFEAGMGAESIKKLLQEIDLNQLSEELKENLKTSTGQKKVRIIRRLEVVESFRKSTNKPEWMIMDVIPVIPPDLRPMVQLDGGRFATSDLNDLYRRVINRNNRLKKLLDLGAPDIIVRNEKRMLQEAVDALIDNGRRGRPVTGPGNRPLKSLSDMLKGKQGRFRQNLLGKRVDYSGRSVIVVGPDLKMYQCGLPKEMALELFKPFVMKKLVETGAAHNIKSAKRMVERVQNQVWDVLEEVISDHPVMLNRAPTLHRLGIQAFQPILVEGRAIKLHPLACTAYNADFDGDQMAVHVPLSVEAQAESRFLMLAAHNILKPSDGKPVCVPTQDMVLGSYYLTIDKDGVKGEGKAFTNVDEALMAYQLGEIDIHAKIKVRLEKEIDGKMVSGIIETTIGKLIFNESIPQDLGFIDRSIAGNELLLEINFLVGKKNLGGIIDKCYRKHGPTKTSIMLDKIKAKGYHYSTISAITVSTSDMTVPPNKGELMSEAETAVEKIEKMYRRGFISDDERYERVISTWTKTTEKVADALMDNLDRFNPIFMMADSGARGSKSQIKQLAGMRGLMANPSGKIIELPIKASFREGLDVLEYFISTHGARKGNADTALKTADSGYLTRRLVDVSQDVIVRNEDCGATEGFEVSEIKEGNEVIESLSERLIGRYTSEDIIDPTSKEVLVKQNEYIDEDKAIRIEKVGVKKVKIRSVFTCNCKYGVCAKCYGMDMATAEKISMGEAVGIVAAQSIGEPGTQLTMRTFHTGGVAGSDITQGLPRVEELFEARKPKGLAIVSEVSGTVRIEETKKKRIVFIATESGEEVSYDIPFGSSLKVKNGETIGAGDEITEGSVNPHDIIRIKGVNAVKNYLLSEVQKVYRLQGVDINDKHLEVVIRQMTRKVKVEDSGDTELLPGTMIDIFDFRDENKKVEENGGRPAQARVSLLGITKAALATDSFLSAASFQETTRVLTDAAIKGKSDPLVGLKENVTIGKLIPAGTGMNRYKNIEIDPLVTETNADDENFIAEDKIEG

SEQ ID NO: 51578 - protein, 302 aa, Clostridium acetobutylicum
MNSHLEDLTTEKVNDDTVNIDVMNTEDMLKAINNEDIKVAYAVQKEIHNIVKAVDIVSEKLKNNGRLFYIGAGTSGRLGVLDASECPPTYGTNPELVQGIIAGGNEAILKAVEGAEDDEDMGRSIIKERNMTSKDVVIGITASGRTPFVIGAMKEARKNEIIAIGISNNKNSLINKNVDIKITPIVGPEVIMGSTRMKAGTAQKLVLNMITTAVMIKLGKVYGNLMIDLSLSNKKLIDRAVRIIEHATKVEKEKAMEYLKRANLKPKVAIVMIKTNTKSYEAERLLNMADGFVTKAIKLGSK

SEQ ID NO: 51579 - protein, 332 aa, Clostridium acetobutylicum
MGGVTFIGGGSFGTALAIMLAKKGHNVVIWDRNKEILEDINTLRTNTRYLPNNIIPCCVKAVDDIEKAAKESKYIVLAVPSFAIREVCRKIKGFLREDQIIISIAKGMEEETKKRLSEVVKEELYKNPVVVLSGPSHAEEVANDIPTTVVVTSTDMKYAEEVQDVFMTNSFRVYTNSDIVGVEIGGAVKNIIALASGIGDGIGYGDNTKAALMTRGMSEIMRIGVKLGGKPETFFGLTGMGDLIVTCTSMHSRNRKAGILIGRGMSCREACDKIGMVVEGVKACHTFYELKESLGVSMPITTSLYKVLFENGDPKKEVYELMARDKKNEYYF

SEQ ID NO: 51580 - protein, 290 aa, Clostridium acetobutylicum
MLFNILTGEYNIVIIKFLQQFSNPFLDKIAQAVTMTAEEYFLVGFIGIIYLCINKRLGYIMALTILFSSTINYYVKCIFKIKRPIGTQGVRSLRLQTADGYSFPSGHTQGAAVFWGCLIKNIRNRYIDMLGYVMIFLVAISRIYLGVHRPIDVIGGFVFGILCVGIFNRVFRLNVYKKNLLIFILVILPMLTITIYIGDFKLYEELGSILGLISGHNIQEKYIKFNPKTNIRNNLIKIIIAVLGILILKNILDFIFPHTRLISFITYFCILFWITTGNLWIIKKIGLNGV

SEQ ID NO: 51581 - protein, 488 aa, Clostridium acetobutylicum
MGVTNKLLAACQKLGKSLMTPIAVLPAAGLLLRLGQPDLLNISWMMAAGNGIFNNLAMIFAIGIAVGFAEENNGVAGLSAAVGYFVLTNVATSFNKHIDMGVLGGIIVGILAGNLYNKYKSTRLPDFLGFFGGRRLVPILTSLCSLVLGLISGLVWPAIQNVINAFGNSVSHAGVVGSFIYGLLNRLLIPIGLHHVLNTLFWFQFGTFKSASGKIVTGDLHRFFALDKTAGTYMTGFFPIMMFALPAACLAMISAAKKENRKKVSGMLLGIAFTAFLTGVTEPIEFLFMFLAPVLYVVHAVLTGLSMAITSALGIKSGFTFSAGFVDYIMNFNISTKPILLIVIGILYAIIYYFLFLFTIKKFNLPTPGRMDDLDDLDDLDDLDDLDDLDEEPENTPKIKSSPSKNSTLEEKAVGILEAIGNKNNIQSLDACVTRIRLTVKDGSKVDEPKLKKLGATGIMKLDDKNFQIVVGTTADIIATHIKEIIKK

SEQ ID NO: 51582 - protein, 186 aa, Clostridium acetobutylicum
MFKSIRYDINRVLQNDPAARNGLEVFLLYPCIHALIWYRIAHVFYKHKMFFIARLLSQIVRAFTGIEIHPGATIGKGLFIDHGMGVVIGETAEIGDNVVMYHGSTLGGTGKETGKRHPTVGNNVFIGSGAKVLGPIKLGDGCKIGANAVVLKDVPSNSTAVGIPAKVILPSSKKEKVIDFNDYCNK

SEQ ID NO: 51583 - protein, 86 aa, Clostridium acetobutylicum
MVTKSVVVKSSTGLHARPATLLVKKASGFKSDVTMEFNGKKANAKSLIGVLSLGVSKDSNIKLIVSGDDEALAAEEIVKLIESLDE

SEQ ID NO: 51584 - protein, 215 aa, Clostridium acetobutylicum
MDKNKTIRIALTKGRLEKAAVEIFENIGLDCSELKDKGRKLIFHDFKNSIDFVLVKAPDVLTYVEHGAADIGIVGKDTLLEMKKDFYEVLDLKVGKCKFSLASISSFKLNEGFNRMKIATKYPNVTREYFREKGIDVEIIKIEGSVELAPILNLADAIVDIVETGTTLKENGLVIFDDICDISARMIVNRASMKLNKDRITDIIQKVKNYVERES

SEQ ID NO: 51585 - protein, 217 aa, Clostridium acetobutylicum
MRLNIAIDGPAGAGKSTIAKLVAKKFRLMYINTGAMYRAVTLMAMRQNIRANDVKKLCDLIESLSMHFENDKLIVNGEDVSEEILLPKTSQNVSDYASVLEVREKLVYLQKKMAGRYDVVMDGRDIGTVVLNDAPFKFYLTATPEERAKRRYKELSAKNIKVCYDDILNDIIRRDYIDSNREVNPLTKAYDAVEIDSSNMCIEEVVDYIVQYISKKI

SEQ ID NO: 51586 - protein, 605 aa, Clostridium acetobutylicum
MEKITRNDIRNIAIIAHVDHGKTTLVDALLRQSHVFRANEKVEERVMDSNDLEKERGITILSKNTSLMHDGIKINIVDTPGHADFGGEVERVLKMVDSVLLLVDAFEGPMPQTKFVLKKALELKLKPIVVINKIDKPNARPMEVVDEVLDLFIDLGADEDQLDFPIVYASAKAGIAKLDVDDESETMEPLFETIVKYVKGPEGYLDEPLQMLVSTIDSNEYVGRIAIGRVERGSIKKNQQAVLIRRDGAKENVKISSLFTYEGLKRVEADEVKFGDIAVVSGIPDVNIGETIADASRPEALPFVDIDEPTLSMFFMVNDSPFAGREGDFVTSRHLRDRLEKELETNVSLKVEETDSADKFKVSGRGELHLSILIETMRREGFEFQVSKPTVIYKEENGKKLEPIEELTIDVPEEFMGVVMEKLGPRKAELVNMTSAVNGYTRLEFKIPSRGLIGFRNEFMTDTKGNGIMNSTLIDYEPFRGDIPERSRGSIVVFETGVSVVYGLYSAQERGRLFVGAGVDVYEGMVVGECSRAEDIEVNVCKKKHLSNTRSSGADDALKLVPIPDMSLEKCLEFIASDELVEITPKSIRMRKKVLDTNLRKKKRK

SEQ ID NO: 51587 - protein, 112 aa, Clostridium acetobutylicum
MAKGGFPGMGGGNMNNLIKQAQKFQKQMEDMQKEIENKEFTATVGGGAVSATVSGKKEITEIKIKPEVVDPDDVEMLQDLILSACNEALKKAEEETSGEMKKLTGGLNIPGL

SEQ ID NO: 51588 - protein, 294 aa, Clostridium acetobutylicum
MRFVIVTGLSGAGKTQAIRSLEDLGYFCIDNLPPALIPKFAQVCYESESKINKIALVIDIRGGEFFDNLFESLKYLKEAGYKYEILFLDADNEVLIKRFKESRRKHPLAPNGRILNGIQMERKKLKTLYNMANNVIDTSKLATRELREKINSIYQEEGQIESKLIVTVVSFGFKYGIPVDSDLVFDVRFLPNPFYIPELKRFSGIEKPVKDYVMSFDQTKEFVNKIEQLLKFLIPNYLKEGKRQLIVSIGCTGGRHRSVTIANEIYERLKNDGETVNIDHRDIEEDINKGGKKL

SEQ ID NO: 51589 - protein, 224 aa, Clostridium acetobutylicum
MEQYKQEFIEFMVESNVLTFGDFITKSGRRTPFFINTGNYKTGNQLNKLAKFYAKAIYDNFGDDFDILFGPAYKGIPLSVSVAMALDNIYGINAAYCSNRKEVKDHGDKGILLGAKLEEGDRVIIVEDVTTAGTSVYETMPILKSQAEVDVKGIIISVDRMERGKGDKSALTELKEKFGFKTCSIVTMEEVVEYLYKKNINGKVIIDDKMKDRINEYYKEYGVK

SEQ ID NO: 51590 - protein, 839 aa, Clostridium acetobutylicum
MGLLEKIFGTYSDREVKRIIPLVDKIDALDGSMQALSEDELKAKTAEFKQRYENGETLDDLLVEAFAVVREASSRILGLKHFREQIIGGIVLHQGRISEMKTGEGKTLVATLPSYLNAITGKGVHVVTVNDYLAKRDMEWMGQLYQYLGLTTGVIVHDLDQKQRQEAYAADITYGTNNEFGFDYLRDNMVIYKEERVQRPLHFCIVDEVDSILIDEARTPLIISGEGEKSTEFYKVADNFAKMLRKEKDFTIDEKTNSAILTDEGVEKAEKYYHIDNYADPQNMEIQHHTSQALKANYLMKRDKDYMVKEDEVVIVDEFTGRLMEGRRYSDGLHQAIEAKEGVKVQKESKTLATITFQNYFRMYEKLSGMTGTALTEEVEFREIYGLDVVVIPTHRPIARIDAPDIVYKTELGKFKAVVEDIVETNKNGQPVLVGTVSIEKSELLSSLLKKRGVRHQVLNAKYHEQEAEIISHAGEKGMVTIATNMAGRGTDIKLGEGVTDVGGLKIIGTERHESRRIDNQLRGRAGRQGDKGYSRFYVSLEDDLMRIFGSDKLKNMVEKLGLGDDDAIESKMVSSAIENAQKKVEGNNFDIRKTLIQYDDVMNKQREIIYKQRSEVLEGENLKDQIEGMIKDLIYNAVNSHISGVDEELESDIEAILNYLDDICLPRGIVEVEELATMSNDEIKEKLYSLAKEIYERKEEEFSSDQMRELERVILLRVVDTKWMDHIDSMEHLKQGIGLRAYKQQDPTQAYQMEGSDMFEEMVENIKVETVRYLFHVQAERAPERQRVVKETEINYSGPDAGDTKKEPVRRKEKKIGRNDLCPCGSGKKYKDCCGRRA

SEQ ID NO: 51591 - protein, 377 aa, Clostridium acetobutylicum
MIELKNIYKKVNNRIILNNVNLTINKGELVTLIGPSGCGKTTTLKMINRLIRQTSGEILINGNKIQNEDAIKLRRNIGYVIQQTGLFPHLTVEENISMILKIEKVDQTKIDKKVEELLNLVGMNPEDYKYKYPSQLSGGQQQRIGIARALAMDPEIILMDEPFSALDPLTRNQLQDEIFSIHQNLKKTIVFVTHDMDEALKLADKICIMKDGKVIQYDTPDKILKNPKDDFVKTFVGENRIWNQPELIKVKDIMINNVIKSSPERTSIQALEIMKSNHVDRLIVASKDNKLLGIVTLRELKFSINENKKLKDIMKNNITTINENDSIVNVLDIVENQKIGFIPVINNDSSLVGLITKSSLLSVLSNQFINKEVNLYE

SEQ ID NO: 51592 - protein, 510 aa, Clostridium acetobutylicum
MDKQLVLVIDFGGQYNQLIARRVREHNVYCEIVPYTYSIDKIKEKKPSAVIFTGGQNSVYGEDSPRMDKEIFDLGVPVLGICYGHQLITYTLGGEVMGSEIREYGKTDVTLDSVCELFEGIDIENSCWMSHTDRVAKVPEGFKVVGHTNVCPVAAMANTEKKIYGVQFHPEVLHTPFGEQLFSNFLFKICGLKEDWSMSSFAKEKIQEIKDIVGDKKVLCALSGGVDSSVAAVLVHKAIGKQLTCVFVDHGLLRKDEGDQVESIFRKQFDMNLIRVNAKDRFLGKLKGISDPERKRKIIGEEFIRVFEEEANKLGQIDFLVQGTIYPDVVESGTDTSATIKSHHNVGGLPEDMQFELIEPLRELFKDEVRAVGEELGIPHKLVWRQPFPGPGLGIRVLGEVTEEKLEIVREADAIFREEIANAGLEEKIWQYFACLPNIHSVGVMGDGRTYCETIALRAVTSSDAMTSDWARIPYEVLDKVSRRIVNEVKGVNRIVYDVTSKPPATIEWE

SEQ ID NO: 51593 - protein, 351 aa, Clostridium acetobutylicum
MKGIIYLEDGTVFYGTGFGKEGNEFGEIVFNTSMTGYQEILTDPSYAGQIINMTYPLIGNYGVNESVNQSKCVYAKGFIVKNIDENPSNYTSEINIDQMLKNMGVVGVFGVDTRSITKKIRSYGTMKCIISNGELSIEELKKMMDASNIVDDYVNTVSTKEIIHIAGNGNKVAVMDFGIKNDIIENLKERQCDITIFPYDTDYNEILNINPDGIFLSNGPGDPKSIPEAIENVKKLIGKRPMFGICLGHQIIALASGGNTYKLKYGHRGGNHGIYDVQRDKAYITAQNHGYAVDEESVLENGMIITHRNLNDGTVEGMKHKSIPLFSVQFHPEGAPGPTDTTYLFDQFVNL

SEQ ID NO: 51594 - protein, 255 aa, Clostridium acetobutylicum
MKKAKEKYLIFILIFLLLPINAKAESKGILGKKEEKIAFLTFDDGPTPNNTVKIINELNKNKIKATFFIVGEKGEEHTKAMEELVKNKMCIMPHSYTHKLSIYKSLDNYNDDLDKCIGFINKVKKNKKELKYVRMPGGSYSRYNKYVVSSIRKGILKRNMNYVDWNVCSGDAEAHYVSREKIISNVKKQCKDQKIIVILMHDSYYKKTTVESISEIAKYLKEKDYKFKTFDNISEKERKELIRMGVMNKKQKIDK

SEQ ID NO: 51595 - protein, 360 aa, Clostridium acetobutylicum
MFDYLIVGCGFSGAVSARLLAEKGKKILIVDKRNHIGGNAYDYYDDNGILVHKYGPHIFHTNSKRVWEFLSRFTKWYLYQHKVLSYVDGRLVPMPINVDTVNQLYGTNYSNDTISEFFDKVREKDIEINNARDMVVTKVGSQLYKMFFEGYTKKQWGIMPEELEKEVTARIPIRTNRDDRYFTNVYQGLPLDGYTKMFENMLNHENIHIMLNTDYKFIKSEIQYKSLIYTGCADEFFDYKFGRLPYRSINFEFETLNQDYYQKVGTVNYPNDYDFTRITEFKHLTGQKCYNTTIVREYSCSDGEPYYPVPQSKNQKLYLEYKKQVENLENAYFLGRLGQYRYMNMDVVVDEAIKLVDKLK

SEQ ID NO: 51596 - protein, 1153 aa, Clostridium acetobutylicum
MSLRFIYGRAGSGKSQFCIESINTRIEKGGDKPLILIVPEQFSFQSEKNILDLIGEKSINRVKVISFKRLAYRIFDEVGGIAREHMNSSGKSMLFYHIMNTLKSEFRVFALSARQKGFVNTIADTVSEFKKYELTTEVLRDTIDEIEDEELKNKLHDLSLIYDEFNRLLYKNYIDPDDDLTILKDKIKQSTVLQGAEIWLDEFSSFIPQQYGIIEELLKKCSRVNITLTMDYDNASKDNDIFSVTQNTEKRLLKLAENNNISIEKPINLNGRPFYRFKNSPELSFLEKNLYSFPYEIYKKGPDKIEIFKTSNLYTEVEKIARNIIEFVREDNVRFSDIAVVTGDLGSYEKTVSVIFKEYRIPFFIDRNKDIEDNTLIILIKSIIDIFVKNWSYETVFRYLKTGFADIEPDEIDILENYVLAAGIKGKKKWTEEEWTYNVYGDALEGDISEESKEKLSKVNEIKNRFLRPILNFRERVLRRNNVAEICRALFEFLYDINVPEAVEKMVNEFRESGRQILANEYSQIWNIIIELMDQLVEVMGNEKVNLEQFSRILFIGIKEHKMGLIPSSLDQVLVGSIDRLKSHAIKILYIIGVNDGVFPSAAMEEGILSDRDREILNSKGVELAKDTKTQAMEQRFLVYTAITNSKEYLFLSYPIADYEGKTLRPSLIVNRVKTLFPKIVEKSDVIKIENDEESMKLISATVPTFNEMISSFRKEIDGEGEVSSIWHDVYRWYSKSDEWTGKCNNMFKAISYTNQVDYISEEKALKLYGGSLKMSVSRLEKYIECPFSYYVQYGLNIKDRKIFSLTPPDLGSFMHKVIDRFCETIKEENIDWNEVNDHICEEKIYKIVDQEIEGRGGSILNSSPRYSYIALRLKRILKRTVRIVAEQFKRGSFKPVGYEVSFENGGSYPPITVGLNDGSEVVLTGRIDRIDMMEKDGSTYIRIVDYKSGNKIFKLSDVYYGFDIQLLLYLNAILENENLDEEDKVLPGAILYFTMDDPIIKGKNNLTDEQIREEIMKSLKMKGLLLSDPDVIKEMDREMEGSSIIIPASIKKDGTLGRSSAATKEQFDILIEHVRNLVVKNCENLLMGDIRIKPYKKGKEKPCDYCMYSSICRFDTMFDGNNYRYVKEKSDEEVWKLIEREMSEEGDERGED

SEQ ID NO: 51597 - protein, 451 aa, Clostridium acetobutylicum
MKFIDWIKPGIKLKRWIMLGGMGVLFISFALAELITKGSYYNVYYKAFYIFLIVVGAFILYISLTQGMKSIISLINKGYLNVSLDSRKLGNLIYEKRLLVKGPKIVAIGGGTGLSTMLRGLKYYTSNITAVVTVADDGGGSGALREDLGILPPGDIRNCILALSDTEPLMEDLLQYRFKDGRLKNQSFGNLFLAAMDGISTNFEEAVHKMSSVLAVTGKVLPVTLDNVVLKAKLKNGVVVEGESNIPEQAILYESPIEKIFIEPENARALHETVQAIKEADAVILGPGSLFTSVIPNLLVKDIGNALLKTKALKLYVSNIMTQPGETDNFSVSDHVNAITKHVGGKVVDYTLVNNGTVSEKLKKKYFEKTSELVKIDKNELDKIGVGIVEGNFIKIKDGFVRHDSDEIAKILVETIMDKKLFYDRKKIIEYFYLSQRLKENRKLEKENRGN

SEQ ID NO: 51598 - protein, 871 aa, Clostridium acetobutylicum
MERLLVLDGNSLMNRAFYALPELTNAEGLHTNGIYGFMTMLIKMRDEIKPDYIVTTFDRKAPTFRHKEYEDYKAGRKKMPPELSEQFPVLKELLEKLAINIFEIDGFEADDLIGTLACFAKEKGIEVYIVTGDKDALQLADDNVKVVINKKGMTEKEIYDKNRMIEEFGVTPVQFIDVKGLMGDNSDNIPGVPGIGPKTAFKLIQEYGSVENVLDNIQNIKGKKIKENLENYAEQAVFSKKLATIMTNVPIEIDIEEIRSKESFDVEGARHLLRRLQFKSIIEKIPSLNVEAEKSDFVVEYNLIDEFPKFHELFSAIKDTEIYMSYSIGNGELYSKIYIDTIFMKVEEKTYIVDLKKIIEQNREDVLKDLKEFFENKKIAKIIHDSKNMYTVLMKNGIKIENLAFDTAIAEYLINPSKKEYNLKDAAEEMLLLDLTGEDNDIKIKEVYVMDKIYNKLKDKIKEYDMDELYYKVELPLIEVLSSMESEGFKVEKNKLQQIGDKFTVEIAKVKDEIYNMAGEEFNISSPKQLGKILFEKLDLPVIKKTKTGYSTNAEVLEKLMDKHPIIEKVVYYRQLTKLYSTYVEGLKPVIDVDEKIHSSFNQTVTTTGRLSSTEPNLQNIPIKNEMGREIRKVFVPENDNCIILSADYSQIELRVLAHIADDENLINAFKHHSDIHTKTASEVFRVPIEEVTSRMRSNAKAVNFGIVYGISDFSLAQDIKVSKKEAKEYIDTYFERYPNVKKYLEDIVVTAKKNMYVNTIMNRRRIIPEIASSNKIVKGFGERLAMNTPIQGSAADLIKLSMVNVYSKIKQLKLKSRLILQVHDELILNVHKDELEKVKELVKLEMEEVMELKVPLEVDIESGNTWYEAK

SEQ ID NO: 51599 - protein, 318 aa, Clostridium acetobutylicum
MKKYILRRFLQMIPTLIGVSIIIFYLFSLMPGDYIDSNRNLTPQRAHELRVLNGFDKPIIVRYLIWLRNILHGDFGFSLKYLEPVTTLINQYIWNSFIIAIVTLILTWSIALVIGIFSATKQYSFFDRVITLLVFASLSFPSFFIGLLMIKFFGVDLKILPIGGMVETGSTTIGLSHILEVIRHMILPVGILTFLSIGSLTRYFRSSMLDVLKQDFIRTARANGLKERKIIFKHALKNAILPAITLLSFELPGLFSGAIITEQIFNWPGIGRIQLEALSFRDYPVLMTFTMLLSFLTIFGNFCADILYAAADPRIRLE

SEQ ID NO: 51600 - protein, 642 aa, Clostridium acetobutylicum
MRKVMLAEKAGFCFGVKRAVDMALLTQKEYNKKIYTLGELIHNNDVVDKLKDNNVYPIGIEDIDNLKENDVILIRSHGISEEIYKILLSKGLTVINATCPFVTKIQEKVKKYNELGYDIVIVGDKYHPEVIGINGWCDNKAIISKQGENLENITSESKVCIVSQTTEKLENWEKVLKEVKNRAIEVISFNTICNATSERQKIAKDLSNKVDFMVVIGGKQSSNTTKLYEICKSNCNETIHVENSGEIPENILKNKNCVIGVTAGASTPDWIIEEAISKMSENQISNETNNEMADAMKFIAENEGKIYVGASVTGEIIQVSEKEVFLNINYKRDGVIPKSEIDDDGKDLKELFTVGDKIVAKIIKLKDADNYVVLSVKELQREQGYKEIKEAFENKTTLNVVVKEDVKGGIIASYKGIRIFIPASHVELFHVDNLKEYIGKSFDVAIIEYSTKKRQTKIVASRRALLSKEKEKVEETVWNKLEEGQVVEGEVKRLTDFGAFVEIEGVDGLLHVSEISWGRVEKPADVLKIGDKIKVYVLSVDKENKKLSLSVKKLTENPWNNVEEKYPVGSVVLGKVIRFADFGAFVKLEPGVDGLVHISEISHKRIAKPSDALNVGEEIKAKILEVSSEEKKIGLSIREVEE

SEQ ID NO: 51601 - protein, 354 aa, Clostridium acetobutylicum
MKNIKKIIALAATVILTCSSLTACNLKPGSDKKTITVFNWGEYIDKDILKDFTAKTGIKVNYETFSTNEEMYEKVKSGTNNYDLICPSDYMVDRMIKENSVQKIDFKSLSNYSNIDNKYKNLSYDPKNSYSVPYMWGTIGIIYDKTQIKDKLDSWNDLWNPKYKDKVYMSDDMRNSLGISLKRLGYSMNSKNKNEISKASSALIEQKKLINPVYVGDEIKDDMRNGEKPIGVIYSGDAAVLMNENPNKYEYVIPKEGTNLWFDSWVIPKNAKNKEAAEKFLNYLLDAKVNKKNVDYIGYGTPNTKTFDMLNDKVKNNKASYPDDASLKNSEVFTDLGNFKKLYNDAWVNITAKK

SEQ ID NO: 51602 - protein, 2052 aa, Clostridium acetobutylicum
MESNNGEKFIGRLTLDLNKLKEDISQANKILEDLSKVKIDSIDIESGKKSIEVLRSIEAEFEKLKTASGKSFDSDIFRNIEEQLSKLGITLDSNTTKITKFYKGTSEEAKNGANTFKQITEQIDELGRKYQEIKNLEINENGEILDKGSVTKVTENLEKEEKARNEIQAAIKKTINAREEERRTIEENQAKNINKQLDQEEKDRQKIESEISKTINAREQERRIIEENQATAINKSLEQEYRDRQKITEQLEKQRVAELKEYTQIQANSSAYLKLSESISQISSKSSLAMGSGNANNTFLDRMKISAAYAGSAVVIASVTGEIRNAISTNTEYEKNLVDLGRVLDSNKKSLQDFGQYAVRTSKEFGQDLGGIQSAMSSLAAQGVSAKKDLESMTKTVSLGLNTSEITNSNEMVQLLVSSMKQLGINFSDSEKVLDSWNKTADISMAKTADFAQVTDKAGMTSKDMGISLNQLNGITAVLADNTGKSGNEIGDALKSMENRLERPKTLETLRGYGIEVMKDKDHFKDFGDIVKEVSSALDKFGDNTTQSNSILDALGGTMRKDWIDVLAKNWKDVDKFAKQSANSAGYSAKKNAQAMSTVEKQVKVLEASVKEFFVTLGQSGGLTEIRTVVNGANDVVQALEGVNKGFGSLLLLIPQVALAIKGLNFASNAITGKSWKQLFNDHGGESTASIKAYSSAVKSVQRDVASGNITLEESATILDVIRQKVGLSKAQVDIFAAAEENLKAKVAAGTMTEEEASEALEAMQIKMKATTVSAEEASSANNALSVAQKSATLSTMGLNLALGGIVGALTIGLSMAISDIIEKHEEQKQKVDKLKQGYEDLTKAMKDNSITADNDDYKNLEKEQSTLENALKRKAELEGKINSVNKSKKNDKWGNSLGDTGKLKDFQSELNKVNKVISETQKNLDTTGYSYDKTTGKIKLLSEASEQIANNKSIEGVARDLTENSDKAKTSIGQLIQSYVTLYKQSDKTALESQKQKGLAQQLALVFGDLTLSTDKNGDTIIKNASALQKDTEAFIKGNAVVKDAILNDKELQQAQEKINKAIQSTTNSYKSYLSYSNQIERNNKLDAQSVADIKKNHQELVPYLNNTKQLYSKIQQGISSFKNTVVMSYAQMQMAEQKNYSKLGAEYQQYTKLQRQISKNKGSSKELADAKKQVGKIAQDLANKIKGLSTVTDKNGNVTLKAGNKEKEIIKILKSEGNTYKELEKIKLGSSKSTTMIEDGNTAVTQKQAQYRIGYYTKEAKMIAAKAKVKINASTLEIKAGQALTSKAQKNAKERIKALQEEIDSLKEASKEIDKLFEQAQSAADSSMNTVDSDNIGDYASEDAAEKAEEKAEKAEEKAEKKQQEAEEKAERQREETQRKAEEAQRKAEEQQRKSLEEEKKHMDEALESSYKIEKQHQQEIIDMYKSQLDELEKKHALQESNNEQQEYENKLLEDKQKLENAQTEKTVRDITTGQWITDSDAIYEAQKQLNEDQKEYDQWKEEQDYKQQEDTLNGQLESAQSKMDEIENNYQNQKDNVDQSYESKEEALGGYVDGTDYVPESGFYDLVEDGKPELVVKSSKQFLPKGSMVINNENLNKLGSITSNQATEKAPSPNSSNDINEISVNAKPIVSLVKDITKSLLSFEKNSSNFSKNTLKNIGDAITDNKELTLTPQQKFQQDIDKTISQFVNNTINYGKNSDKNIGQGISDEKQNVIDPINLLTAEEAQLLNDFSKSCASYGSDLVTELGNGVKSSEDNLTNIVQDLTQKVITKFKEGFGIHSPSRVMYEIGDYLMQGLINGMSDNDVTEFIKSQVSSAIGVAGGAASGSLSEWIRTAMSLTGVGEEWFAPLTQIIEHESGGDPNSINLWDINAIEGHPSKGLMQLIDENMQDWHLPNLPDDIYNPISNIAAGIRLIEHDYGNIFNVPGIKALAAGRPYVGYARGGKVEDNGLATINEYGQEMRMLNAGDQVVTAQKTQSIVNFAENIPNLMASIRTPKIILPSSLNVNGNSPNSSGLANQRVFHINNLNVQANDAKQLIKSLELMVETGDY

SEQ ID NO: 51603 - protein, 243 aa, Clostridium acetobutylicum
MLMIEAKNLTKTFGKLTVFEDLNVNISKGEVLVIIGPSGSGKSTFLRCLNHLEEPNGGQVIIEGEVLNHKDKKKYREIIEKTGMVFQSYNLFPHMTVLQNVMEAPITVKKENKSEVRKRAEALLYKVGLSDKMNVYPSKLSGGQKQRVAIARALCMQPDIMLFDEPTSALDPELVGEVLSVMKELAEEGMTMVVVTHEMGFAREVADRVIFMDGGKIVEENTPEGIFTNPKEERTKEFLNKIL

SEQ ID NO: 51604 - protein, 554 aa, Clostridium acetobutylicum
MKYNGSRIILECLKEQGVDTIFGYPGGAVLNIFDALYSFSEIRCVLTSHEQGASHAADGYARATGKVGVCLATSGPGATNLVTGIATAYMDSVPMVAITGQVATSLIGKDSFQEVDITDITMPITKHNFIVRKVEDLADTIRKAFYIAQSGRPGPVLIDIPKDVTGNECEYEPRKPEKIEKSSVRDAEVEGAIELLLESKRPVIIVGGGCNISEASKELKILQEKLKCPVCSTMMGLGAFSGKDDMFTGMVGMHGTKASNKSICESDLVIAIGCRFSDRVTSNADTFAKNAKILHIDIDEAEVSKNIKADSFIIGDVEEVLKKVNEKLTAREGNEWTEYALGLLKKDKSKVLRINKCDSVNPVYVIKKLYELTDGEAIITTEVGQNQIWATQGYIYTKPRSFITSGGLGTMGYGFGAAIGASVGKDKMTFDIAGDGSFRMNINELATVVRYKLPVKIIVLNNNVLGMVRQWQNLFYKKRYSSTTLERDTDFVKIAEGYGALGLRVDTNAGVESALKKAIDYDGPVVIDFTVGEDEMATPIVPPGADIENMVVLD

SEQ ID NO: 51605 - protein, 272 aa, Clostridium acetobutylicum
MKKKFLSVLLSGAVLIGALTGCSSSTSSSTSSNDKKTIVVGATAVPHAEILNNAVKPLLKKEGYTLKVKVFTDYVTPNTALNDGDLDANYFQHVPYLETFNKEKHMDLTYTVKVHIEPMGLYSHKIKKLSELKDGDEIAVPNDSTNESRALKILEQNGIIKLKKADLVTKLDIIENKKNIKIKELDAAQLPRVLDDVTASIINSNYALQANLNPTKDAIVSEPKDAPYANVLAVRKQDKDKPYIKALNKALTSPEVKKYINDKYKGEVVPAF

SEQ ID NO: 51606 - protein, 272 aa, Clostridium acetobutylicum
MDKLLFGISGIPNGSGNEKFTYETGIDYLKSIGLDAMELPFVRSVNITNKNREGILNKKHEKDFYLSAHGSYFINLNAEENEKQEASLKRIVSGADALKSVEGKSLIFHPGFYLKDSKEETFNTIKENLKKLPDIGVDYRLETTGKPTQFGSLEENVALASEVKTCKLCIDFCHLHARYNGLFKTIEDFDKVLSYVGEKLGEAALNDMHIHMSGINYGIKGEKNHLPFKESDFPYEKCIKSFVKFNIKGCIICESPLLEKDSLLLKSIYEAS

SEQ ID NO: 51607 - protein, 756 aa, Clostridium acetobutylicum
MDLKKLLNEEQYKAATKIDGPILILAGAGSGKTRVLTYRIAHMVKDLEIYPSQILAITFTNKAAKEMKDRVKALIGGNEIDNMWISTFHSCCVRILRREIDKIGYNKNFTIYDSDDQKVLMRECIKQVGINEKDITEKEIISKIGSAKDGLVSANQYKNQNSGNFKLNKIADVYLLYQKKLKENNALDFDDLIFKTVELFKKAPDVLAFYQRKFRYIMIDEYQDTNKSQYEFARLLASANKNLCVVGDDDQCIYGWRGADIRNILNFEKDYRNAVIIKLEENYRSKGNILKAANGVIKNNPHEHLKSLRTRSEDGAKIKVYRGETDLDEASFAAFKINKEVKEEKRSFKDFAILYRTNAQSRVFEDIFIKRNIPYRIIGGLKFYDRKEIKDIMSYLKLIGNPLDNISLKRIINVPKRSIGQTTLGRLQQFADEVEECLYDALLDIENIPGIPKRAISSIKEFTGMINSFIRRKDEINVSVLIKEILEQTGYLNELKASDDIQDKARIENIEELVNAAVDFEENSDDKTLAAFLEKTALVADVDNYNEDADTVVMMTVHSAKGLEFPVVFMAGMENGIFPGMASFNSEYEMEESRRLAYVGITRAKEKLYMTSAKLRRVFGKTQAFEESDFINEIDENLKEYVTLDGEGRRKKDTTGLFSTISSDIPPKNAMFSNFMSKSGFNANEMIKKSVKEEKKSIKTLNEEDAVKGAKVVHMKFGKGTIITTSRADGHINLTIAFENMGIKNLRLDMAPLQLL

SEQ ID NO: 51608 - protein, 263 aa, Clostridium acetobutylicum
MSKADEKYLDIIENILENGYYDNNRTGIETYKLPHQIMQFDLSKEFPILTTKFVAFKTSVKELLWIYKDQSNDVRKLQNENVTIWDEWMLEDGTIGKAYGYQVAKFKQIDNLIDTLKTDPQSRRMLISLWNIADLKDMSLTPCCYETLWDVQNGKLNCMLVQRSGDMPLGVPFNMCQYAVLVHLIAQVTGLKPGLFTHVINNAHIYKNQIEGMKIQLKRRDKAYEAPKLWINPNIKNFYDFTADDIKLIDYKHHDKIKMEVAV

SEQ ID NO: 51609 - protein, 180 aa, Clostridium acetobutylicum
MVPRLKEKYEKEVIPALMEKFQYKNIMEVPKLEKIVINMGVGEAKENQKVLESAVADMQLISGQKPILTRAKKSVANFKIRENMPIGCKVTLRKNKMFEFADKLMNVALPRVRDFRGVSSKSFDGRGNYALGIKEQLIFPEVEYDKIDKVRGMDVIFVTNAKTDEEARELLRFLGMPFAQ

SEQ ID NO: 51610 - protein, 451 aa, Clostridium acetobutylicum
MNLKTTLFNTTYKFKDIKDVLAKANEKKSGDEMAGIAASGARERVAAKTVLADITLEELRNNPVVSYEKDEITRVIQDSVDEEQYKKIKALTVGEFREFLLENDEDKIKEIRDGLTSEMIAAVTKLMSNMDLVYAAQKICNTAKCNTTIGRRGTFSSRLQPNHPTDNPQGIMASLIDGISYGVGDAVIGLNPVADTIESVSDVLKVFNDFTRKWRIPTQNCVLAHITTQMEALKNGVPIDLMFQSIAGSEIANKDFGISVALLDEAYELMKTKKSSKGPNFMYFETGQGTELSSEGNNRADQLVMEARCYGLAKRYKPFLVNTVVGFIGPEYLYDGKQVIRAGLEDHFMGKLTGLSMGVDTCYTNHMKADQNDLENLAMLLLAANCNYLMGIPCGDDVMLMYQSSSYHDIATLREISDKRPIKEFEKRMEELGIMKNGKLTRNAGDPSIFM

SEQ ID NO: 51611 - protein, 155 aa, Clostridium acetobutylicum
MKIYEGKLISKNLKFGIVAGRFNEFIVSKLLSGAVDALKRHGCDEDSIELAWAPGAFEIPLISQKMAESGKYDAVICLGAVIRGATSHFDYVSSEVSKGIAQTSLKTGCPVIFGVLTTDNIEQAIERAGTKSGNKGFDAAVTAIEMANLIKTIGE

SEQ ID NO: 51612 - protein, 182 aa, Clostridium acetobutylicum
MINSKKELRKNMVLKRDSLEPDLKSIKDNMIYNKVINSIQYKSANNIFVFVSYKSEVDTHNIIRTAIADGKKVFVPKVISKEKGMEAAEIRGFFDLEKSAYGILEPKSSNYIEPESIELLLVPGLAFDESGGRIGYGGGFYDRYMSLLDKSAVKVGICYDFQVIDKVIMNINDVPVDKIIVG

SEQ ID NO: 51613 - protein, 459 aa, Clostridium acetobutylicum
MKEFDTIAAISTAIGNSGISIIRVSGKEALSIVDKVFKGKSKKGIIEMNTYTMRYGNIVELSNGDIIDEVIVSFMKGPKSFTGENVVEVNCHGGMYPTKRVLEEIIRAGARLAEPGEFTKRAFLNGRLDLSQAEAVMDIINSKTELSMKSAVAQSEGVISREINKLRQRILEIIAHIEATVDYPEDDLEEVTAENVSKDLNDILKEIDELILSADEGKILREGLNTVIIGKPNVGKSSLLNLLLDEKRAIVTDIPGTTRDVIEEYINISGIPIKIVDTAGIRETEDVIEKMGVERSKEKMENADLIIFMIDSSKKIDAEDLEIIDYIKDKKYIVLLNKVDLKNREDKSKLDLLNKDNIIEFSVKEKVGLEKLKDTIENMFATGNLQHSNTMITNTRHKEALLRAREHCTTSLKALQDTLAIDLASIDIRNAWTALGEITGETLQEDLIDKIFKDFCLGK

SEQ ID NO: 51614 - protein, 114 aa, Clostridium acetobutylicum
MASGYRKLGRPTDQRRAMLRNLVTSFLKHGKIETTVTRAKETRSLAEKMITLAKRGDLHARRQVLSFVTEETVVKKLFDEVAPKYSERNGGYTRIYKMGPRRGDGAEIVILELV

SEQ ID NO: 51615 - protein, 359 aa, Clostridium acetobutylicum
MNKKLRVGLLGGTGLVGQRFATLLDNHPYFEVTCIAASPRSAGQKYSDAVKGRWKLDIPMPEYIKDFIVKDIYDIDEISKEVDFVFCAVNMDKSEIKKIEENYAKHEIPVVSNNSAHRFTEDVPVIIPEINPEHLDIIPKQKERLGTKKGFIVAKPNCSIQSYVPAISALLEFKPTKILVCTYQAISGSGKTFEQFPEIVDNTIPYIPGEEQKSEDEPLKVWGHIEGNKIVSKKDPLITSQCIRVAVSDGHLAATFVSFENKPTKEQIVEKLKNYKGKPQLLNLPTAPEQFITYFEDEFRPQPKLDRNIEKGMGISIGRLREDTLFDYKFVGLSHNALRGAAGGAVLTAELLYKEGYLY

SEQ ID NO: 51616 - protein, 239 aa, Clostridium acetobutylicum
MANTTNPLNDLSTVTITENSKTAGGTQIVRNAGNTLGQDAFLKILIAEMSHQDPTSQQDSTQYIAQLAQFSNLEQMTNLNRTMTFSGASSLMGGTVTLKQYDPDGVPYRGEVQKVTKNGDTIQIYVKLIDSNGNYVRQEKVDGNGNVVRDSKGNIEYETETVPQTDSNGNVVKDSNGNIMYKTQDVYKVIAFDYSQVNSVSALKDNIYDTTQKQIDDQVASKSDTSSSSSTTSNTSSST

SEQ ID NO: 51617 - protein, 231 aa, Clostridium acetobutylicum
MLKRDNFFKVFIKVFSVFIAVTFVFSVMPNNVNAKTGKKIILIDPGHGGIDGGANLKDGTLEKDINLAIGLKLKKNLEKKYKVVMTREEDKGLYSENTSTIRKKKEEDLNNRCKLKSTSKCDVFLSIHLNMFPQSQYNGAQVWYANNDASKKLAGILQSNFKENLNKNNKRKEKVSINDYRVLRNSGEVPSVIIECGFLSNPDEAAKLKDGGYQQKLADTIEQSLNEFFNK

SEQ ID NO: 51618 - protein, 373 aa, Clostridium acetobutylicum
MLDFDVDVQQFAQIKVIGCGGGGNNAVNRMILEGLKNVEFIAINTDKQALALSQASQKIQIGDKLTKGLGAGANPEIGQKAAEESKDEISQAIKGADMVFITAGMGGGTGTGAAPVVAEIAKSMGILTVGVVTKPFPFEGRKRMLHAESGIKTLKERVDTLVTIPNERLLAIVDKKTTLVEAFKSADDVLRQGVQGISDLITIPGLVNLDFADVRTVMINKGLAHMGTGRGAGDTRASDAAKQAISSPLLETSIVGATGVLLNVTGGEDLGLLEINEAARVVQEAADPDANIIFGAVIDENLKDEIRITVIATGFESEGENGEIIRREVRPEVSEPKSEQEAASALDNTGSFDAPEKDLNIPAFLRRQNKNKY

SEQ ID NO: 51619 - protein, 232 aa, Clostridium acetobutylicum
MKPKKLVDSFNHALEGIIYAVRTQQNVRIDLIAALVILTMCFFTNLTRVELLIITITITMVISAELMNTAIEATIDLTSNYYHPLAKIAKDVAAGAVVVTAINAVIVGFIVFWDKLEPVTNHVIYKIKNSNPYMIFVILVIVCILTLIIKAIFGEGTPLRGGMPSGHSTIAFSLATIITLISPQPVVIILSYFLAVIVAQSRVDSKVHSSLEVVCGAVFGFLATLLLFKLFH

SEQ ID NO: 51620 - protein, 166 aa, Clostridium acetobutylicum
MEDFFSIGQIINTHGVRGELKIYPLTDDINRFDDLDSVYVDNEIKKVISVKKQPNKLILKLEGIDTLDEAVKYKNKYIKVLREDAVELKEGQYFIKDIIGCNVFDENDKDLGEVYDVISTKNNDVYCIRKEGQQDILVPALKDIVLKIEIENKKIVIKAVEEWLES

SEQ ID NO: 51621 - protein, 830 aa, Clostridium acetobutylicum
MLNEGKVLPVDISSEMKKCYIDYAMSVIVSRALPDVRDGLKPVHRRILYSMHELGLTPEKGYRKCARIVGDVLGKYHPHGDSSVYGALVRLAQDFNLRYTVVDGHGNFGSVDGDSAAAMRYTEAKMNKIALEMVRDIGKNTVDFIPNFDGEEKEPVVLPSRFPNLLVNGSAGIAVGMATNIPPHNLGEVIDGITMLIDNPEATILELMAQIKGPDFPTAGIIMGKSGIRAAYETGRGKITVRAKSEIEVEDNGKQKIIITEIPYQVNKARLVESIADLVKDKRIVGISDLRDESDRDGMRIVIEIKKDANSNIILNQLYKHTRLQDTFGINMLALVDNRPEVLNLKQILQHYIKFQEQVIRRRTEFDLEKASARAHILEGLKIALDHIDEVISLIRGSKTAQEAKLGLMDKFGLSEKQAQAILDLKLQRLTGLEREKIEDEYNELMKTIAELKSILADENKILAIIRDELNEIKAKYGDERKTAIERAENDIDIEDLIQEENVVITLTHAGYIKRINADTYTSQKRGGRGIQAMTTKEDDFVENIFITSTHNNILFFTNKGRMYKLKAYQIPEAGRAAKGTNVVNLLQLDPNEKIQAVISIKEFDEESFLVMCTKKGIIKKTVVGMYKNIRKSGLIAINLNDDDELVSVRITKGDDDIIIVTNKGLAIRFNEVDVRPLGRNALGVKGITLKEDDFVVGMEVPNQESDVLVVSENGFGKRTHVGEYKCQHRGGKGLITYKVSDKTGKLVGVRMVEDGDELMLINNLGIAIRINVSDISTTSRNAMGVTLMRNNGDEKVLALAKINKDDSEQLEDSEEVSEVHDAEENNSEE

SEQ ID NO: 51622 - protein, 292 aa, Clostridium acetobutylicum
MDNLIEQYFAEIRKKNLSLNTIDAYRRDIKKFHEFLDEKGEKLREVDVITIMSYVQYLQKNGRANSSIVRNIVSIRNFFKYLEIKGIMDDNPVTQYEMPKIRRNFPDILTIEEVEKLLMGPDGNTDKGIRDKAMLEIMYATGMKVTELLNLTIYDINLKLSYIKCRGIKNKERIIPMGSYAVKCLEIYLKVRTKLNVQNIDYLFFNLQGDKMTRQGFWKIIKQYAQESGIKKKINAYTLRHSFAVHLLQNGADIKTIQELLGHSDMATTQIYSGMYRKTRIAEVYKKTHPRA

SEQ ID NO: 51623 - protein, 596 aa, Clostridium acetobutylicum
MECLIIAEDIIQKVKDLNDIVDIVSEKVKLKRTGRNYSGLCPFHHEKTPSFSVSQDKQIYKCFGCGEAGNVITFVMKTKNFSFVEAVKYLADKVNITIDDNKDKYYAKNKEKYDKLYSMNVEAARYFFRNLDSNSKAKKYFLDRGINQKTMRRFGLGYAKDDWRQLLSFMKSKGYTELELIEAGLIVQKNKAVYDRFRNRVIFPVFDYKGKVIGFGGRVLDDSKPKYLNSPETKIFKKGTNLYGLNFAVKNNIGDTIIIVEGYMDCISLHQYGINNVVASLGTALTKDQAKLLKRYASKVVISYDADTAGQAATLRGFDILREAGFDIKIIKIPDGKDPDEFVRKNGKEAFMRLVENAVSIIDYRINRAFENVNLKDSESVIKYVKDISEIIEELDPVEKDVYIKKISDKTGIREQAIYDLISTDIQKSGNNIEKMNKNSNYGQNLYVESAHVKSERYLLRLMIEHKDIRSYIESKISADDLIMESHKKIYNIILNFEDNLSSDLKSKFGFIESRCDDGESSSEIVKIEEQNIMLSENNVKDLVDDFITNIKKFRLEESKKKIMSEIKGLEEKGLFDETIELIKRMEEIQNQLDNL

SEQ ID NO: 51624 - protein, 243 aa, Clostridium acetobutylicum
MELNICHLYPDLLNVYGDIGNIRILKYRAEKRGIKVNISNVSLKDNFDKDAYDIAFFGGGQDYEQSIVSEDLTNTKKESIRDYINSEKVFIAICGGYQLLGKYYTTPEGEKLSGLDILNIYTEPGDKRFIGNTVIKNELFNETYVGFENHSGRTYINDLKPFGKTIVGYGNNGSDGYEGCIYKNTYCTYFHGSLLSKNPELADRFIKTALELKYKKEIILDPIDDSLEFKAKEFVINRETNTK

SEQ ID NO: 51625 - protein, 398 aa, Clostridium acetobutylicum
MKILITTDAYYPMINGVVVSTNNLYKQLKMAGHDVRILTLSYNGREYIEGDIYYLNSHFVKVYPDARIMKPFGNKVISKIVEWSPEIIHSQTEFSTMLVAKYIKRKLDIPQVHTYHTMYEDYLKYFLGGKVIRKGTMAKLLKILLNTFDEIIAPTEKVKNVLREYEVYKDIKIVPTGIDIKSFQKELSSKEREKILNHYGWKTKDKILVYVGRVAEEKNIDEIINLFKKGLNELKDIKLLIVGGGPYLSQLKELVSRYGIEDIVKFTGMVDSDQVYKYYKMGIAFVTASQSETQGLTYIEALASGCPVICKWDPCIKNLIVNGVTGFAYTDTSEFVKAVESLKSNEILRRKIISNAKQKSCEYSTENFGKSVMDIYNKVLLGRNVKKRNLVQIIRTIF

SEQ ID NO: 51626 - protein, 818 aa, Clostridium acetobutylicum
MDTKTLRIEGMTCAACARAVERATKKLEGVEEANVNLATEKLTVSFQDDKVSVPNIQEAIEKAGYKALTEATNKTLAIGGMTCAACAKTVERVTSKLEGVTSSSVNLATEKLSISFEASKVSINDIKQAIEKAGYKASEEVESVDTDKERKEKVIKNLWKRFIISAVFAVPLLIIAMVPMIFNSIGVMLPSAIDPMNNEKIYGVLELILVLPVMFQGRKFFQVGFKTLIKRSPNMDSLVAIGSSAAFVYSLFGLYQIFTGINGAQLYFESAGIILTLITLGKYMEAVSKGKTSEAIKKLVGLTPKTALVVKGEKEEEVAIEEVKPGDVVIVKPGSKIPVDGIVIEGNTSIDESMLTGESIPVSKGPGDEVIGASINKNGSIKYKVTKVGKDTVLSQIVKLVEDAQGSKAPIAKLADIVSGYFVPVVITLAIISSLAWYLSGENLTFTLTIFISVLVIACPCALGLATPTAIMVGTGKGAEYGVLIKNGTALENTHKIKTIVFDKTGTITEGKPKVTDIKAIDEVSEEELLKIAASVEKASEHPLGEAIVKEAEFKGMEFLKVSDFKSVTGHGIEALIDSKRVLLGNKKLMDNNNIEVKSVLDYVDDLAKQGKTPMYIAIDKQVKGIIAVADSVKESSAKAIKKLHDMGIEVAMITGDNKRSADAIAKKVGIDRVLAEVLPEDKASEVKKLQAGGKKVAMVGDGINDAPALAQADIGMAIGKGTDIAMESADIVLMKSDLMDVITAIELSKKTIKNIKENLFWAFGYNVIGIPVAMGILYIFGGPLLNPMIAAAAMSLSSVSVLTNALRLKRFKPEYML

SEQ ID NO: 51627 - protein, 67 aa, Clostridium acetobutylicum
MKAKELREKAPEELNLQLNDLKTELFTLRFQLATGQLENPMRIKEVKKSIAQIKTILREEELKACED

SEQ ID NO: 51628 - protein, 250 aa, Clostridium acetobutylicum
MVKILLNGCGGKMGTAITNLSNNYDNASISAGVDKFPKSNTGYPVFKSIAEVNVDCDVILDFSRPDSLDEILKYSSQKKLPIVLCTTGYTNEQIDKINEFSKSHTVFRSANMSIGVNIVNNILKSVSSILYENYDIELIEKHHNQKVDSPSGTALLLADTIKNAISEQIDYIYGREGVSKKKHNEIGIHAVRGGSIVGEHDLIFAGEGETIEIKHTAQSRDVFAAGSLKACMYICDKGPGLYDMNDVLGM

SEQ ID NO: 51629 - protein, 296 aa, Clostridium acetobutylicum
MFKSGFVTIIGRPNVGKSTLLNHIMGEKLSIVSSKPQTTRNNIQTILTGEEYQIVFVDTPGMHNPRHKLGEYMVKVAKESMNEVDVALFVTTPDVEVKRGDLHILEQLKSAKVPVFLVVNKIDETTEERLAATLKNYSEAFEFQEIIPISAQKGKNVDKLIELMVKHLNEGPKYYPDDMIIDKQERFIIAEIIREKALRFLSQEVPHGIAVEILQMKEENEKYKIEATIMCEKDSHKGIIIGKGGEMLKKISQSARKSAEKFLDKRVNMKIWVKVKKDWRDSPFVLGELGYKAPKK

SEQ ID NO: 51630 - protein, 124 aa, Clostridium acetobutylicum
MIKGVGVDIIEINRVKNAIDRNYKFIEKLFSRREIAYIKAEKTKAQYIAGRFSAKEAVSKALGTGFRGFSFKNIEIHKDDLGKPIVVLNGGARAIAEGYGKYQVQLSISHDREKAIAYAVLEVF

SEQ ID NO: 51631 - protein, 200 aa, Clostridium acetobutylicum
MNNLIVFAHPNPNSFGKGILDEVVKASEESGAAVRIRDLYQLGFDPILKPADFETFQRGEVPQDIKDEQENVKWANMITFIYPVWWAGLPAMLKGYVDRVYSYGFAYEYVDGQPRGLLTGKKALIFCTTGTPSDVYGANGMHNSMKQTTDEGIFKFCGIEEVRHNFFGAVPHVSDEIRKDYLRAASEIVKEHISSSKSFV

SEQ ID NO: 51632 - protein, 99 aa, Clostridium acetobutylicum
MRYIMSVSKKDVEYVAELARLSFSEEQKEGFMEDLNSILGYVDKLSELDTDNVDIIVNPYYIENKFREDEVEESMDLKDVIKNAPKNLEEYIVVPKIID

SEQ ID NO: 51633 - protein, 268 aa, Clostridium acetobutylicum
MNKRFEGWILISDMDDTLIGSDKRISEKNLNAIKKFQSLGGRFTIATGRTMESAYRYIRNLQVDLPVILYNGAKIYDFNKSKTIFEIELDDRVKEIIKKVKEYDTSFGIEIYSNENTYIYNTCRFTERFKKRGYSVFYEIPEELWKEKWTKVLVVGEKNQEDYLEENFERLFGKVNLVRSGENYLEIIPKGLSKGAALENLCNLEGVDINKVISVGDNMNDYELIKKAGYGFCVSNGNNRLISMCSNICPSNDDNPLEYIVNWALENL

SEQ ID NO: 51634 - protein, 351 aa, Clostridium acetobutylicum
MKNRIETLLVAFTFVSATFFIPLNVHATIYKGIDIYEYDNIQDWQQVKDSGVSVVIQKATQGLYHNDSLLNYRYPKITNAGLKIGYYHFANNSANPVAEAQHFLSRIQGLKMDTCLWLDIENQPNWTKQQAIDYTNKFISYVQSQGYKIGIYTGLSFYYEYLQGHVPNVPLWLASYGKQPQQYPNLVSWQYSESGSLSGVIGDVDLDYFNDSIFTGQAPQVTTAVQETNPVKIIQQQLNTVLYSSNLTIDGIQGNATTQQIRVFQQVCGLKIDGIWGQQCVNAIQQIYGKDLCGRPYIHRIPTRVIQYNMGISFDGIYGKGTASRVQAWQSGHGLNTDGLFGNKSWNKLFK

SEQ ID NO: 51635 - protein, 428 aa, Clostridium acetobutylicum
MDNLLNIVIILLLVFMNAFFVAAEFSMVKIRKSRIETLVLDGDKNAKYALGVINNLNSYLSACQLGITLASLGLGWVGEPAVSKMLSPLFNLLKIPKQIIGSISVVVGFIIITGFHIVLGELAPKSVAILNTESIAKATAIPLTLFYKFTYPIIVAFNKSTDLVLKLFGIKQVDEHEEAHTDEEIRMLVEESYKHGLIDKTELTFVDNVFDFSEKTVKEIMVPRTDMKCIFVEDSFDDIVGVTIDEHFTRYPVCEESKDNIIGLIHIKDLYKLKINKEDEKIESIIREIKFVPESMSISELFRMFQKERMQMAIVIDEYGGTFGLVTIEDILEEIVGEIQDEFDEEMEEIIKTENGSYVVDGKVLIEDINELLDIEIYEENIDTIGGWIYSKLKKYPKTNEKINYGNYQFIILKCDRRRIEKILIKNL

SEQ ID NO: 51636 - protein, 498 aa, Clostridium acetobutylicum
MKKYIIALDQGTTSSRAIIFDHEQNILEISQKEFTQIYPSKGWVEHNPLEIWSSQYGVLQEVMAKANITQENIAAIGITNQRETTIVWDKNTGEPVYNAIVWQCRRTADIVEGLKRDKEFSDYVKENTGLILDAYFSATKIKWILDNVEGAREKAEKGELLFGTVDTWLVWKLTNGKVHVTDYTNASRTMLYNIKELKWDERILRKLNIPRSMLPEVKNSSEVYGYTNLGGKGGIRVPIAGMAGDQQCALFGQTCFEEGSVKNTYGTGCFLLMNTGENIIQSKNGLVTTIAIGLEGKVQYALEGSVFVGGAVIQWIRDELKLVSDAADTEYFAKKVNDNGGVYVVPAFTGLGAPYWDMYARGAIFGLTRGANKNHIIRAALEAIAYQSRDLIDAMKEDSGCEITRIKVDGGASRNNLLMQFQADITGTEVVRPIITETTALGAAYLAGLAVGFWKSKEEIAEKWSVSEVYTPNLDEDEKIRLYNGWKRAVERVQGWEE

SEQ ID NO: 51637 - protein, 396 aa, Clostridium acetobutylicum
MIQLLALKRDLKVEIREKFSIIEKRIGDKDVLLKEVCNEVVILSTCNRIEIYFNSEKNRKQIIEEIFSKMGWNINFLENFFYCKGDEAINHLMEVACGFDSLILGEDQILGQIKAAYDTALKNKTSGSELKKLFQLVITCGKEFRSISMLNRIPVSSASIAVNKARQENLRRFMVFGFGDVGSLVCKYILSSDFDVLYIVVRNKAAVSIKDKRIKVLSFNEKNSYYDDVECMISCTSAPHPVIWEKELPYRKFTIFDLAVPRDVEETVYGRNNIDIYDIDQISMIDNNNRKKRKEIMMANRHIMSKYIVEFYDWQKVQEIVPDIIKLKLYGESVNKRRYETFKNKKATKDNDMLVNMLIKSTSNVYINRAIEVLKEEQLKGRGEDCLRILRRIFQK

SEQ ID NO: 51638 - protein, 570 aa, Clostridium acetobutylicum
MYCIEEKIEKALGIKEASLVLKNCNIVNVFSSEIIRGDLAIDGDTIIGIGKYKGKTEIDLSNKYVAPGFIDSHVHIESSMVSPKEFARAVISRGTTTIIVDPHEIANVCGMDGIKYMMEETKNMPLDVFFMLSSCVPATSFETSGAVLKAEDLKELIDSDRVLGLGEMMNYPGVLSREEEVLNKLKLAGSYNKIVDGHAPSVRGNELNAYNLAGIKTDHECSSIEEMNEKIRNGMYIAIREGSAAKNLDILIKGVNAKNERRIMFCADDRHPDDILKSGHMDNCVRRAIYNGIENTAAIRMASINAAECYKLERVGAIAPSYKADLVVLEDLKDVKVNMVIKSGEVVFKDNKHLKDMGSKSDITKVSNTVNIKKVSEENLELKLDTDVCSIISVALNSISTKNVKRKVNLSNGIFKCELNYGINKVAVIERHKKSGSIGIGLVENFGLKRGAIASTVAHDSHNIIVLGNNDEDMVKAVNEIERVGGGITISLDGKIIETLELEIAGLMSNKSMEFVAERVSKMINICHNTLGVNKDIQPFMTLAFLALPVIPEIRITDKGVFDVVNFKFL

SEQ ID NO: 51639 - protein, 329 aa, Clostridium acetobutylicum
MQEPDFWNDVKRAQEISMEIKFLKGRIDRFNSIESRIEDDNVLIEMCREDENEEEADEILKEVRDLHEEVDNFKIEIILSGEYDRNNAILNLHTGVGGTDAQDWTQMLLRMYTRWAEAKGFKVDIIDMLPGDEAGIKSVSINIDGEFAYGYLKAEKGIHRLVRISPFNANGKRQTSFASVEVLPQLTQSQDIVIRPEDLKVDTYRASGAGGQHVNKTESAVRITHLPTGIVVQCQSERSQHSNKETAMNMLKSKLVELKERMHKEKVEDLAGELKDMGWGNQIRSYVFQPYTMVKDHRTGVETSNVDAVMDGEIDKFIIEYLNKENSQK

SEQ ID NO: 51640 - protein, 571 aa, Clostridium acetobutylicum
MLLRKDATEERLTGRYFTPKDLASYIIDWVIQDNNINKILEPSCGNGVFLECLGERRLEDGRNITAIEIDEDVSFEASMQIDNSLRFNNCYDYQRALRNDGDIVNNGIVIINDDFYKVYEQELQGQRFQAIVGNPPYIRYQYLSEQQREEQSKILIRNNMRPNKLINAWVSFVVACAEILDGNGKMGLVIPAELLQVAYAEDLRRFIMRTFQRITIVTFRELVFPNVQQEVVLLLVEKEILHTREHQLRIVEYQDINELTESNDLDEYPFNDVEINESKWTKYFLSANDIRLINNIRENDKFVRFSDVARVEVGITTGNNDYFCVNRRVVEEYDLERVCRPLIARSVNINGVKFTYEDWKSNIENGAKTYLIDFPDVPYDEYQLSYKQYIEYGIHNDKNSGYKCRIRDRWYKVPSIWVPDAFFLRRNHLYPKFVLNSQEVNAVSTDTMHRVRFNNHDDRERILLSYYNSIALAFTEIEGRSYGGGVLEILPREVGRIIMPDLRNRELIDDATVSNLLNRIDGYIRSNDNILGIVDEIDEIILVEIMGVDENVVREFRNIWLTLQRRRLNRR

SEQ ID NO: 51641 - protein, 65 aa, Clostridium acetobutylicum
MTGTVKWFNGEKGFGFITGEDGNDVFAHYSQINVDGYKTLEEGQKVSYDVVKGPKGLQAENITLA

SEQ ID NO: 51642 - protein, 182 aa, Clostridium acetobutylicum
MNLNIDNQILKGKELEISAFLKKRFLLSPISISKEIEKMLEGDYSILETEKDQEEFKNILFKEDLKNKNKVDNDTNADVLKIELSKLKRSNQKKDEDIQSLKNALQKAAEDNNRLKGLLSITVNKELVVVEDEEIDELFVRYMTSSGAVKKYKKAIVIEELGIIPKSFYIIKKGVSKDEEHE

SEQ ID NO: 51643 - protein, 253 aa, Clostridium acetobutylicum
MKIKCILIEDEISNEKELYFILRRYDDIEIVGMVQNTDEGIDLVKKLRPQAVFLDINVPNFNGIKLAEEIKDVDSTIAVIFVTAYDKYAVAAFEIKALDYILKPFSIARIEKAVERLKEYINVNKSMKEKLFELICEFNNMERKYIINKIPCENKGKIVLVDVNDIYFFYIKSEKTYVKLNDIIYVTSSTLNDMEKKTGFFRAHRSYLVNLNKIFEIYSWFNGTYKLIMSDYRKSEIPVSRGNVRKLKEIINI

SEQ ID NO: 51644 - protein, 200 aa, Clostridium acetobutylicum
MNNKKSTNVVWQETKIKRQNREKMLKQKGAVLWFTGLSGSGKSTVASALEKKLYEMGYLTYLLDGDNLRYGLNSDLGFKSEDRTENIRRVSEVAKLFADAGIITITTFISPFIEDRNNARKLLGKDFVEVYIDCPIEVCEKRDPKGIYKKARNGEIKNFTGIDSPYEKPEKPEITVETYKDTEEKCVDNIIEYLKQHKIL

SEQ ID NO: 51645 - protein, 320 aa, Clostridium acetobutylicum
MRIIGLRTLKTALGAAIAIIIAEFLGLKYAAAAGIITILSVQNTKKTSIIIAFQRLASTLLALIISCIIFMIFGYNPISFGVYLAIFIPLTVLFKLTEGIAVSSVLVTHILVEKTISVFWLKNELLLMVVGAGIAILLNTYMPKIDKRIKENQIEIENLMKKILLNMARELRGEAIQTENLSLFSELSKAIKSGSERAYRNLNNNIIVSDKYYVMYMEMRNMQFEILKYMRNHFTKFYMSFEQTKLVADITEKIGEQLHEENPVDTLIEDLRELFKTFKEQKLPETREEFENRALLFQFLNDLEYFLEIKRKFIKNKVSV

SEQ ID NO: 51646 - protein, 584 aa, Clostridium acetobutylicum
MKKLMLGNEAIARGAYEAGVTVATAYPGTPSTEITESIAKYHEVYAEWSPNEKVALEVAIGSSIGGARALCSMKHVGLNVAADPLFTVSYTGINGGLVIVVADDPGMHSSQNEQDSRRYAKAAKIPMLEPSSSQECKEFVKEAYEISERFDCPVIIRLSTRIAHSQDIVEINERCKCDIKDYIKDINKYVMVPAIAKVRHIKVESRMNKLVSFSESSQLNNIEWGKRNIGIISSGIAYQYAREVFKDVSYLKIGMVYPLPREIIERFANKVEELYVIEELEPFIEEYIKELGIKVIGKEVLPMVGELNSEIINNSFSSKKPTVNKKIAKDIIARPPAMCPGCPHRGIFYVLKKLKLNVSGDIGCYSLGALLPLRSIDSCICMGASIGIAHGMEKARGTEFINRTVAILGDSTFIHSGITGLIDIVYNKGNSTVIILDNAVTAMTGYQSNPTTGYNIKNEATKKVELEKLCRAVGVERIKVVDPFNVDEVESVVKEEIAACEPSVIIARRECERIKEHKSKAIPLKVNQSKCVKCRKCLEIGCPCICIEDEDIVVNKSLCIGCKLCMNICKMDAFEEDGDVNEEY

SEQ ID NO: 51647 - protein, 644 aa, Clostridium acetobutylicum
MSEKKKFYITTPIYYPSAKLHIGNTYTTVASDALVRFKRLQGYDAFMLTGTDEHGQKIQRIAEDKGITPKAYVDEIVAGIKDLWKMMNISYDKFIRTTDEEHVKAVQKIVKKFYDNGDIYKSAYEGWYCTPCESFWTETQLVDGKCPDCGRPVEKTKEEAYFFKMSKYADRLIKYIEDHPDFIQPESRKNEMLNNFLKPGLQDLCISRSSFDWGIPITFDEKHVIYVWIDALSNYITALGYGSDNDELYNKFWPADLHLVGKDIIRFHTIYWPIMLMALDLPLPKQVFGHGWLLVDGGKMSKSKGNVVDPVVLINEFGTDPVRYYLLHEIPFGSDGLFNNEIFIKKINSDLANDLGNLVSRTAAMIEKYFDGSIQPPVDKEEIDNELIDMAISLPEKLDEDIKKLKIPEALDHIWDLIKRANKYIDETTPWVLAKDENKKARLGTVLYNLVESLRFVATTLTPFLPETGEKIKTQLNIELDTWESLSAFDGTRAGTKVSKGEVIFPRIDVDKKIEELNKLKEEQLKATRKMQPLKPEISIDDVDKLDLRVVKVLECEPVKKSKKLLKLKVELGGEERQVLSGISQFYKPEDLIGKKVVLVANLKPAKLMGQLSQGMILAVATDDDSKLYTLDIPEDIPTGSIVR

SEQ ID NO: 51648 - protein, 287 aa, Clostridium acetobutylicum
MSIRKAVIPAAGLGTRFLPATKAQPKEMLPIVDKPTIQYIVEEAALSGIEEILIIIGRNKKSIEDHFDKSAELEEELKNNHKEELLRMVRQVSNMVNIYYVRQKEPMGLGHAISLAKSFAGNEAFAVMLGDDIVDSKVPCLKQLMDCYDRYNTSILGVQEVRKKDVCKYGIVDGINIENKICKVKNLVEKPSIEMAPSNIAILGRYIITPTIFPILENTKPGKGGEVQLTDALEELLKREAIYSYCFDGKRYDIGDKLGFIEANIDFALKNDKLNSELKEYLLNINK

SEQ ID NO: 51649 - protein, 262 aa, Clostridium acetobutylicum
MATIEWKSFLIPYEQAVEELKVKFKSIRKEYRKRNEYSPIEFVTGRVKEISSILEKANKFNIPDERIMLEMEDICGIRIMCQFVDDVTKVVNIIRSRKDMHIMYEKDYVTNVKSSGYRSYHIIIKYPVSMAEGQRDIIAEIQIRTLAMNFWATIEHSLNYKYKHDIPDEIKAKLKIAADAAFQLDGHMLEIKDEIKDAQKLFEVKSSIVSNIIRNILTITSMGKLSEADIYKSKLNQLINKGEVFELNNLLRSTEKTIEMGR

SEQ ID NO: 51650 - protein, 159 aa, Clostridium acetobutylicum
MEFNLVTIGFTIVNFIILMLILKHFFFDKVNKVIDDRNNEVALTIKKADAQNEEARLLKVESEKNLEDSKLQGKTIVENYKVKAEKVSEEITAEAKTEAQNILERAKRETQREKEKAEDEIKNQVVELAVLISSKALENSINEAEHRKLIEDFVSKVGI

SEQ ID NO: 51651 - protein, 257 aa, Clostridium acetobutylicum
MNTMVELRKLIVFLLSFTFLLYLLYVGINISKKLRIRRSPFFLMISGVGLITLGTFLDAIDKFIDVGIKNVIAACFTFGAILFVVFIIFLSNNFVCTVSLLYEDANMDKMTGAYNRKGINEIFQRSIAKQNSFYLMLFDLDETKRLNDKYGHAVGDKYIIGASAIIKDTIGNKGFVGRIGGDEFIALLKLENEVDVEKIKKLIKDQFCESFKQYGANISIGYSRFKEDGQEFEEIFQIADKNMYDDKKSNKKNKACF

SEQ ID NO: 51652 - protein, 255 aa, Clostridium acetobutylicum
MHVIYARKVCVKKLFFPIFLLIFCVGIFMYMHKNNIGVFVDKDKKLPIYSVDTKDKKIAITFDSNWGNDNTMKILDVLDKYNAKATFFLIGRWVEDYPNETKEIYRRGNEIGNHSYKHLDMTTMSKQNIKKDIAMADEKIYSVTGTKTKVFRCPSGSYDSSTIEVAESTGHKCIQWNIDSIDWKEQGQNVEYDRVIKNIKPGSIILFHNNAKYTPKNLDRMLNKLKSDGYKFVRISDLIYDNNYYIDYMGRQVKK

SEQ ID NO: 51653 - protein, 157 aa, Clostridium acetobutylicum
MASKVLNKVMGIIGLNDEDFDEYEDEVMEEKAIARENSYDYDEKLNDKNSSNSNNKVVNIHTASSVKVVIVKPKDYDEATQICDDLKNRKIVVVNVTDLEPKTAQRLLDFMGGASYVLNGELLEIDKGVYLLSPSNVDISRDLKNDLASKSIFNWSK

SEQ ID NO: 51654 - protein, 476 aa, Clostridium acetobutylicum
MRNTYETPLNTRYASKEMSYLFSDDMKFRTWRKLWVALAESEMELGLNITNEQINELKAHIDDINYDVAQEREKIVRHDVMSHVYAYGVQCPSAKGIIHLGATSCYVGDNADIIIMKEALILIRKKLLNTIHHLSKFALNYKSLPTLGFTHLQPAQLTTVGKRATLWIQDLMIDLENLDFVIENLKLRGVKGTTGTQASFMDLFNGDQEKIKTLEKKVVEKMNFKSAYDVTGQTYPRKIDSIVLNTLSEIAQSAYKFSNDLRILQNMKEMEEPFEKNQIGSSAMAYKRNPMRSERISALSRYIIVNSLNPAITAATQWFERTLDDSANKRISVAEAFLALDGVLNLYINVSSNMVVYENVITAHVKSELPFMATENIMMEAVKKGCDRQELHERIRKHSMETAKRIKADGLPNDLIERIKKDSYFKLTEKEIDEIIDPNKFVGRAPYQVEEYIINCVKPILVKNKDIVGIEVSIDV

SEQ ID NO: 51655 - protein, 230 aa, Clostridium acetobutylicum
MVFIWSLIFIVILSVVFTTNIKKNYKGWYALASFISILVSIYEVMRIVSHPKLNGVILSIEQAFMKGNVAIAFFILVMFAGALSTKQVIGKKLMSIRAELAILGSILILPHGIIYFVRFLIIKLPKILNGKANATLYLIYISIGIIAFIIMIPLFITSFKSVRKRLGGFRWKKLHRWSYVFYCLIYLHIILALLNGKINFIKIILYTFIFMVYTVMKFIKHRNIKLRRKS

SEQ ID NO: 51656 - protein, 142 aa, Clostridium acetobutylicum
MKIAIGADTDGFELKEHLKNYLKSKGIEVIDKTPEKGINLVKSASLVAQAVMNKEADRAVAIDEYGAGSFMVGAKHKGIICAEVSDEHSAKMTSQHNSANMLAIGAGIVGKRLAEGMLDAYIAEKYAGGRHQIRVDMLNKML

SEQ ID NO: 51657 - protein, 141 aa, Clostridium acetobutylicum
MAKKVVGLIKLQLPAGKATPAPPVGPALGQHGVNIMAFCKEYNAKTANQAGFTIPVVITVYQDRSFSFILKTPPAAVLIKKAAGIESGSGVPNKNKVGKITKEQVKEIAQTKMPDLNAASLEAAMSMIAGTARSMGVEVVD

SEQ ID NO: 51658 - protein, 624 aa, Clostridium acetobutylicum
MAVKQFKAESKRLLDLMINSIYTNKEIFLRELISNASDAIDKCYYRSLVDTNITFNKDDFYIRISADKENKTLTITDTGIGMTKDDLENNLGTIAKSGSFAFKSENEAKEGVDIIGQFGVGFYSAFMVADDVTVISRSVDSEEAYKWESKGVEGYTIEKCEKETPGTEIVLKIKENTDDEKYDEFLDEYKLRSLIKKYSDFIKYPIKMMTKKTRPKKDNDKETEEYLEDETLNSMVPIWRKNKNELKQEDYDNFYMDKHFGFEKPLKTIHSNVEGVVSYNTLLFIPASAPYDFYTKEFEKGLELYSNGVMIMQKCGDLLPDYFSFVQGLVDSPDLSLNISRELLQHDRQLKFIAKKIKEKIKSELLSMAKNDRENYVKFFNSFGRQLKYGVYSDFGSNKEVLQDLLMFYSSTEKKLVTLDEYVSRMKEDQKYIYYAAGESNEKIEKLPQTEVVKDKGYEILYFTDDVDEFAIKMLMKYKEKEFKSVSNKDLGFEADEKESKKETEENKDLFDFMKEVLDGKVKEVRASSRLKSHPVCLSNDGELSIEMEKVLKMMPDNNNVKAEKILEINTNHEMFNSIKAAFKDDKDKLKKYASLLYNEALLIEGLPIEDPVQFANDVASLMK

SEQ ID NO: 51659 - protein, 1255 aa, Clostridium acetobutylicum
MNTKVRRIFVKKKAGFDVAAKELLKDLVENLGIKTLKDLSILNRYDVSGINDSEYEDAKAIIFSEKTVDDVYDEKFEVSSEDKVFAVEYLPGQYDQRADSACQCIKILTGNEDVLIASAKVIILKGNISVSDLEKIKKYVINPVDSREASLDKPETLEVIYDLPYEVETIENFISMSEDELKVFLDSNGLAMSMEDLKFCREYFKNEEKRNPTITEIKVIDTYWSDHCRHTTFQTRLQNIQFEDGKYTEVLKSAYKNYVDARKYVYGNKEKEVCLMDIAVIGMKELKKKGFLNDLDESDEINACSIVVDADVNGKDEKWLVMFKNETHNHPTEIEPFGGAATCLGGAIRDPLSGRAYVYQAMRVTGSGDPRVRIEDTTKGRLPQKKITLGAANGYSSYGNQIGLATGQVSECYDEGFIAKRMEVGAVVGAAPKENVVREEPKPSDVVILLGGRTGRDGCGGATGSSKEHDVNSLQNCGAEVQKGNAPTERKLQRLFRNNKVSTLIKRCNDFGAGGVSVAIGELTDGLDINLDLVPKKYEGLDGTELAISESQERMAVVVEKKDAEKFIEYADKENLEAVIVAKVTDTKRLKLFWKGNAIVNISRAFLDTNGVRQNVDVFVKAPKKEDNYFKTENKNKDVKEEVLETLRDLNVCSQKGLSERFDSTIGAGTVLMPFGGKNQITPAEGMAAKLPVLNGETSTGTVMTYGYNPKIGKWSPFHGAMYAVIESLTKIVCMGGDYKKTRLTFQEYFERLNKEPERWGKPFAALLGALKAQEIFNTPAIGGKDSMSGTFMDLNVPPTLVSFAVNVVDINNVISPEFKKVGSSVVLVKCERDENEVPLFDELKKNFDTVQALIKDKKVISAQSVRHGGLIAALSKMCFGNKIGFEMLKEEELFTPDYGSIVLELEESLDIKELFKDVKYEVIGKTIADSKIILNNVSISIDEALEAYTEPLEKVFPTKVEASKKINLALYDEVKYENIKRVSAVNKIAKPRVFIPVFPGTNCEYDSKRAFERAGAEVNTLVFRNMKATDIEESINEMVEEINKAQIIMLPGGFSAGDEPDGSGKFIATVFRNEKIKEAVMKLLNARDGLMLGICNGFQALIKLGLVPYGEIREIDENCPTLTYNNIGRHVSKIAYTKIVSNKSPWFSNVEIGDIHSIPISHGEGRFAASKEVVEELIKNGQIATRYVDLNGNSSYETEVNPNGSVLCIEGITSPDGRILGKMGHSERFSKGTYKNIIGNQDQKIFESGVQYFK

SEQ ID NO: 51660 - protein, 395 aa, Clostridium acetobutylicum
MEKKTVYNITNSIAISEEEAVNCNIPEVNKAEINLSQLKRNFDIIQGFLKPNTKFMAVLKGDAYGHGIRPIAKELINLKCDVFGVVRLIEAFTLRKAGIKTPIMLLAPISPSQAAWVIRYNIIPMVDSEEIVEALDQSASQNDTIVKLHVKINTGLNRYGVNPENAVKFIREIHEKYLHVQVDGVYTHFQDPDYNPDFTHKQIECFNNIIFQLQKQKLRPRIIHAANSTGIIRYPEAHYDMVRCGTLLFGLEHEQGQRNMPKGIKTLMELKGRIMKVRTIRAGEAGGYGSTFVAKKDSKVAIIAFGYGDGISRGWKEVLVAGKRVPVVNYFMDGLMVDISNIDETVKELDEAVIVGNQGDESITWLEACKSLGSYVDEQIQCITERVPKKYFYEK

SEQ ID NO: 51661 - protein, 460 aa, Clostridium acetobutylicum
MIDMGDYTLKELETWNEKIEGIVNEMGLNYYNQEFEIISYNGMLEAEAYTGMPSRYPHWSYGKAYEKQKTLYGYDLVGLPYEMVINSNPCIAYLMKENTLLLQILTMAHVYGHNDFFKNNRLFREGTDASETVNMFKNDADTIRNYIDNPAIGNEKVEKILDAAHAIRYQTHRVIGEKRLSYEEIRNKIIQDYNSSYKPRSIIEPYEKPVEPDLSKIPLEPEDDIIYFIENYGNLQEWERNVIEIVRRETAYFIPQIETKIMNEGWASFWHYTILNELKLPDGLHLEFLKRHNDVLSPILGSLNPYYLGFKILKDIEDRYGRDKIFEVREIERDESFIRKYLTRELCEELNLFEFSKRRGEYIIDNVADEEGWKNIRNSICSGCGMNSIPVIRVVELSKKDNNLILEHLYDGRELNMQYAEETLKYVVNLWKGKVTLKTTIEGKEYRIVCDENKKICEVK

SEQ ID NO: 51662 - protein, 327 aa, Clostridium acetobutylicum
MESVFDYEDIQLIPAKCIVRSRSECDTSVILGEHSFRLPVVPANMQTIIDENIALFLAQNGYFYIMHRFEPEKRLSFIKNMKSKGLFASISVGVKREEYDFIKQLAQENLSPEYITIDIAHGHSNTVIEMIQHIKKYLPKSFVIAGNVGTPEAVRELEHAGADATKVGIGPGKVCITKIKTGFGTGGWQLAALRWCSKAASKPIIADGGIRTPGDIAKSIRFGATMVMIGSLFAGHEESPGETIEKDGKLYKEYFGSASEFQKGEKRNVEGKKMFVEYKGPLKDTLIEMEQDLQSSISYAGGKSLDAIRTVDYVIVKNSIFNGDRIY

SEQ ID NO: 51663 - protein, 310 aa, Clostridium acetobutylicum
MLLEIKNLVKRYGDFLAVDNVNLSIEEGEILGLLGPNGAGKTTIIDCIIGLNKIDSGSIRIFGMDFLKNEMAIKKSIGIVTQTISVYDDLNVYDNVMYFGGMYGLRGKKLKEYAREALNFVGIWDNARKFPKQLSGGMLRRLNIACGIVHKPKLIIMDEPTAGIDPKSRSNLLESIKELNKNGATIIYTSHYMEEIERICSSIAIINEGRIIAKGDKEELKSLAAKEEKIKIKPSALNYTIVDEIKKIYGVKECSINADYIDIVSDKNSKNIAKIIDMIVGSGLEVLDVIIDRPSIETVFLALTGRNLDN

SEQ ID NO: 51664 - protein, 340 aa, Clostridium acetobutylicum
MKNWLNSDLKDNDIVITTRIRLARNIKGIPFPDKLSDDEGRDVVKKIKDTLIVSNDGKENFTCIDLWKNDNNCNAEYLEKHLISKKLIENYNRSAFILNKDETISVMVNEEDHLRLQAITAGLNLEEAYECIDRIDDKIEENLDYAFDEKIGYLTACPTNIGTGMRASVMIHLPALSMNNEMPRILNALSQIGITIRGLWGEGSKAIGSLYQISNQITLGMSENDIISNLKTVVEQIINQENLSREQLMKKYKYELEDKIARSLGILKNSVILDSNECLNLISNVRMGVEIGIINDISKKSLNNLLVNTQRATLQEIYNKELSKKEENIKRALYVRENLR

SEQ ID NO: 51665 - protein, 588 aa, Clostridium acetobutylicum
MANSIVFQNAASQLRSAIYGYDGTNYQPVKVNSTGELQINVGTINAVGTITRLGVLGTVNAVGTVTRLGVLGTVNRVAGVATITRLGVLGTVNAVGTVGRLGVLGTVNRVAGVATITRLGVLGTVNAVSAVGTVGRLGVLGTVNRVAGVATITRLGVLGTVNAVGTVGRLGVLGTVNRVAGVATITRLGVLGTVNAVGTVARLGVLGTVNRVAGVATITRLGVLGTVNAVGTVARLGVLGTVNRVAGVATITRLGVLGTVNAVGTVGRLGVLGTVNRVAGVATITRLGVLGTVNAVGTVARLGVLGTVNRVAGVATITRLGVLGTVNAVGTVARLGVLGTVNRVAGVATITRLGVLGTVNAVSTVGTIARLGVLGTVNRVAGVATITRLGVLGTVNAVSTVGTIARLGILGTVNRVAGVATITRLGVLGTVNAVNTVGTIARLGILGTVNRLAAVGTLTRLGVLGTISGDVNSRIVGSGVYATVQDIAVSSTGTYTNFIDISQYSATGWYIKKISNVPATLTARIALVPSTNRAVYTPYIDLPVGTITSDITKALVLDRTQYLKYAAVNLISSSTTIPTVQVVFDAKN

SEQ ID NO: 51666 - protein, 812 aa, Clostridium acetobutylicum
MSTYSTKVDEKWQKKWEETSLYKFDENNLEKKLYVLEMFSYPSGAKLHAGHWFNYAPVDSWARFKKMTGYNVFQPMGFDAFGLPAENYAIKTGIHPKDSTLKNIETMEKQLKSMGAMFNWDHEVITCTPDYYKWTQWLFLELYKNGLAYRKKAPANWCPSCNTVLANEQVVDGSCERCGTEVIKKDLTQWFFKITNYAEELLQKLDELDWPEKTKAMQKHWIGKSKGAEVTFKVDNSDLKFDVFTTRVDTLCGVTYVVLAPESPLADELTKPEYKEKVEEYKLQAQKQSEIERQSLTREKTGVFTGSYAINPINNKKVPIWIADYVIYTYGTGAVMAVPSHDERDFAFATKYDLPIVRVVEGGEELPFTGYGPLVNSGEFDGLKGNKAKEAIVSKLSENDLGRWKVNYRLRDWLVSRQRYWGAPIPVVYCEKCGIVPVPEKDLPVELPYNVEFNPTGKSPLTTSEEFMNTTCPHCGGHATRESDTLDTFVCSSWYYLRYADNENSDAPFDKEKISKMLPVDKYVGGPEHACMHLLYARFITKALRDIGYLNFDEPFLSLRHQGLILGPDGQKMSKSKGNTISPDDIIAEHGSDVFRMYLMFGFDYAEGGAWSDDGVKAMSKFVDRFSRMIETAKEEINNPKNSKTDMGKEEKELNYVRNHSIKAVTEDMDKFQFNTCIARLMEFTNSLSKYLTVDNKNIKLLKDTTIDIIKLIAPFAPHFAEEQWNIIEEKYSVFNEKWPEFDEKALVKDEVEIAIQINGKIKAKINIATNLSEDEIKSAALADDKVKAATDGKNIVKVIVIKGRLVNIVVK

SEQ ID NO: 51667 - protein, 179 aa, Clostridium acetobutylicum
MSRVGKQPVEIPSGVTVTVTPDNVVTVKGTKGQLEKAMHKDMKIAVEDNKVVVTRPSDSKNHKALHGLTRALINNMVIGVTEGFSKTLQLVGVGYKAQLKGKSLILNLGYSHPIEVASIEGVTFEIPDANTVVVKGINKELVGSVAADIRTFRKPEPYKGKGIKYSDEVIRRKEGKTGK

SEQ ID NO: 51668 - protein, 207 aa, Clostridium acetobutylicum
MENNNEIFKEKSRENFNKTADIYDESHDGKFVAPMYDEIIKRILRANPKTVLDVGCGTGNVLKILAKDENLSLYGLDLSEKMIEIAKKNLKGRAELKLGDSENMPWKSNSFDVIVCNASFHHYPNPKKVLIEMKRILKKDGTLIIGDPTAPVIYRQILNLYCKISNKGDYKLYSKKEIENIMKECGFEPFNFIHINHGSFAVNAKIR

SEQ ID NO: 51669 - protein, 401 aa, Clostridium acetobutylicum
MNFKFNTVEEAILDIRQGKMVIVVDDEDRENEGDLVAAGATITGETINYMARYARGLICTPMDSDSMERLGINTMVEKNTEYFGTDFGVSVDAARTRTGISAYERAETIKKLSDKDAKEEDFVKPGHTFPLRAKKNGVLDRNGHTEATVDLVRLAGFYPSVGVCCEIMNEDGTMARLPKLMEFSRKNDIKIITVEKLIEYRKKNEALIKREAEAKLPTKYGEFKIVGYKSLIDNKENLAIVKGELKAEEEVLVRVHSKCLTGDVFGSLRCDCGNQLSYALSAIEKQGAGVVLYMDQEGRDIGLLNKLKAYMLQEKGLDTVEANLKLGFEADLREYWAAAEMLKDLGVKKVKLMTNNPEKINELNKYGIDVVSRVPINTEHVKENEFYLRTKKQKMGHLIEI

SEQ ID NO: 51670 - protein, 254 aa, Clostridium acetobutylicum
MVDIHSHIIPGIDDGSNSLETTLKMMEIANEAGLTKMVATSHYFRGRFENSISAITSEAEKLNSIFKKKAVDIEVIPGQEVFIDNHTLEAHKNGIIGCIRDTNYMLVEFDMMSLLENAADILYEIQIRGIKPIIAHPERYTYIQRDLYKINDLIDENIYFQVNAGSIEGLFGKTVQKTAIKLIEEGLVSFIASDAHSAGKRCPGYEGALKLVAKIDSVLPGKFVKNADLLIENQEIKARSQKLKRKKGFFTFFK

SEQ ID NO: 51671 - protein, 190 aa, Clostridium acetobutylicum
MKLVCIGDSLTYGYGVSSTSSWVELLKAHFSINVINKGINGDTTSGILSRSYSDIVKEKPNYVIIMAGTNDMLMDYSTKLIKDNIELLLKEAKENNITPILALQPPVISPLAKTYWDSEIDYEKVAISLLDYIRWAKAYCINNNIAFVSFNIVFINKDNIEALYNDGIHPNSEGHKLMFNELSKILNKII

SEQ ID NO: 51672 - protein, 310 aa, Clostridium acetobutylicum
MEDIIYITGHKNPDTDSICSAIAYSELKNKLGFNTVPGRLGNISRETEFALNYFKANAPKLLENLSSNQDIIIVDHNERAQSVDNLEDLHLLEIIDHHRIADIQTSYPIFFRNEPVGCSSTIIGSMYFEKGIEPSKRAAGLMCSAIISDTLLFRSPTTTARDKEVLKKLAKIADIDPEKYASEMFKAGTSLKGKTVEEIFNSDYKAFNLGDKKIGVSQVTTMDIEGFDEYKKDMLAYMNKKVKDENFNAVLLLLTDIIKEGSLIIATGENTDLVNKAFNVELKDNAVYVPGILSRKKQVIPPLTSAIEGK

SEQ ID NO: 51673 - protein, 663 aa, Clostridium acetobutylicum
MKLIEDLIEKLNKYSYSYYVLDNPIVADKEYDIMYDELKRLEEETEYINPNSPTQRVGDIILDKFEKTHHKNKLWSLDKAQKKDEVKAFVNKCVKFVEQYNLTHSEKLPSPQFVVTQKLDGLTINCSYNESRLIKSATRGTGEIGEDITEQSKTILNLPNAINYSGEIDVHGEALMTKNALEQYNSNLKVNETPLKNLRNGAAGALRNLNIKETARRKLVAQFYDLSYTDKKLKKYSEILLFLKSQGFNITEYNICNNFDEINQAIDNIGEVRSSLQYDIDGVVIRLNDIETSRLMGYTIKCPKYAIAYKFKAKETTTKLIDVEWNVGRSGRINPTAILEPVELAGVIVKRATLNNMDDIKRKKIKKGARVFLRRSNDVIPEIMGVTEETEGETKEIEAPTICPYCGSEIVKEGVHLFCENTLSCKPQMVKSIVHFASRKAMNIEGFSEKTAEQLFEKLNIKSISDLYRITKEELMSLDKFKDKKASNLINAIEKSKECDLDSFVYSLGIPNVGKKTATDLCKQFKSFENIKKASYFELILVQDIGSIVAKSIVDFFKQEKIEKSLNELFKLGVKPSYEESEVSESVFNDKTVVATGSLQNYSRTEIKEKLESLGAKVAGSVSKKTDYVIAGENAGSKYDKAVALGVKILTEEKFEELIESVK

SEQ ID NO: 51674 - protein, 449 aa, Clostridium acetobutylicum
MAFEGLSTKLQAAMKKLRGKGKLSEKDIKDAMREVKLALLEADVNYKIVKNFVKVVGEKCLGNEVMESLTPGQQVIKIVNEELTNLMGKEESKIEFEENGITVIMAVGLQGAGKTTMCGKLSLSLKKKNKKPLLVACDIYRPAAIKQLEVVGKSIDVPVFSMGDKVNPVDISKAAMKHAKENGLNVVIIDTAGRLHIDDQLMNELENIKSEVNPKEILLVVDSMTGQDAVNVAESFDNKLELTGVVLTKLDGDTRGGAALSIREMTGKPIKYVGLGEKMNDIEIFHPDRMASRILGMGDVLTLIEKAQSAIDEKQAKELGDRMLSQEFNFDDFLQAFEQMKKLGPIGKLLEMVPGFNSSMLKGVDLSKNEGEMKKYEAIIKSMTAKERKNPSLITSTASRKRRIALGSGTTVQEVNKILKNFEQMKKMMKQFKGNKFSKKGLFGGKMPF

SEQ ID NO: 51675 - protein, 637 aa, Clostridium acetobutylicum
MSEKNEIYDESQIQVLEGLEAVRKRPGMYIGSTGTRGLHHLVYEIVDNSIDEALAGYCSHIKVFIHKDNSVTVSDDGRGMPIGIHHKMKKPTVEVIMTILHAGGKFGGGAYRVSGGLHGVGASVVNALSETCEVEVKTEGHIWKQTYHRGKVASPFEKIGDSDEHGTKIYFKPDPEIFEDTEYDYDTLSQRLRELAFLNKGIKIELTDERHDKNEIFHYEGGLKSFVSYLNRNKEVVFKEPIYVEGSIDSNYSVEIALQYNDGYNENIFSFANNIHTIEGGTHLAGFKTALTRVINDYAKKFGYLKENDKNLSGEDIREGLTAVVSVKLTEPQFEGQTKTKLGNTEVRGIVDSIISERVSTYLEENPQIGKLVIDKALVASRAREAAKKAREITRRKSVLESTSLPGKLADCSSKDAEECEIYIVEGDSAGGSAKQGRNRRFQAILPLRGKIMNVEKQRIDKILNSEEIKAMATAFGGGIGKDFDVSKLRYHKIIIMTDADVDGAHIRTLILTFFYRYMTELISEGHVFIAQPPLYKVTKTRKEYYAYSDKELEDVLQDVGGKDKNTDIQRYKGLGEMNPEQLWETTMNPEQRTLIKVNIEDAMAADEIFTILMGDKVDPRRKFIEENATKVVNLDV

SEQ ID NO: 51676 - protein, 93 aa, Clostridium acetobutylicum
MSRSIKKGPFVKESLLNKIVEMNKAGDKKVVKTWSRSSTIFPEMIGHTIAVHDGRKHVPVYISEDMVGHKLGEFVLTRTFRGHGNTEKTTSVK

SEQ ID NO: 51677 - protein, 663 aa, Clostridium acetobutylicum
MNIDNLAINTIRILSAEAIQKAKSGHPGLPMGCAPMAYTLWSRHLKHNPNNSKWKDRDRFVLSAGHGSMLLYSLLNIFGYDVSVEEIKNFRQFKSKTPGHPEYRWTDGVETTTGPLGQGICNAVGMAIAETYLANKFNKESYNIVDHYTYALVGDGCLMEGISGEASSLAGTLGLGKLIVLYDSNNISIEGSTDIAFRENVALRYEAYGWQVIKVDDGTNLEKIDLAIKEAKVEKNKPTIIIVKNVIGYGCPSKQGKAAAHGEPLGEENLKLTKENLNWNYEPFTVPEEVRAYTKEFKVRAQRQEDKWNSMFEEYKKEYPKLYKEWEVWFSEKTPMKLLDNGEFWKFDKNMATRQSSGVLINRLAKLIPNLIGGSADLAPSNKTHMDDRGDFSAENRSGSNMHFGVREHAMAAIANGMYLHGGLKVFVATFFVFSDYMKGAMRLSSIMKLPIVYVLTHDSIGVGEDGPTHEPIEQLAALRSMPNMTVFRPADSNETAAAWYSALNTKNGPTALVLTRQALPLYDSSGKNALKGGYILKDSKNKENPDVILMASGSEVELILNAAKELQNENIDARVVSMPSFEVFEEQSEDYKNSILPRNIRARVAVEAASPFGWHKYVGLDGEVIAMESFGASGKSDILFKEFGFTVENVVEKVKNVLKNLK

SEQ ID NO: 51678 - protein, 198 aa, Clostridium acetobutylicum
MEFYPVAIEKLIEEFAKLPGVGYKTAQRLTMHVLNLPKEEVEGFADALKKARGTIKYCSVCGNYTDTDPCAICSNPNRDKSLVCVVEEPKDIISMEKVREFNGVYHVLHGVISPMLGKGPDSIKLRELVSRMNGKVKEVIVATNPNVDGEATAMYISKILKPLGVKVTRIAHGIPVGGDLEYADEVTLAKALEGRREI

SEQ ID NO: 51679 - protein, 241 aa, Clostridium acetobutylicum
MIKLEKVSFTYKNRAALCDVNVDINEGEAVAIIGPNGSGKSTFLKVLNGILFPSSGRYVFDNNEINENTLKNNKFLKLFHKRVGFVFQNSDAQLFCSTVFDEVAFGIMQMGLEGEEVDKRVRDCLKLLNIEKLKEEHPYNLSGGEKKRVAIASVLAMNPEVITLDEPMNAIDPKGKRFLKELLIDLNKSGKTIICATHDFEYIEGVFNRAVVFSENHKIIRDDRYENIISDREFLMECNII

SEQ ID NO: 51680 - protein, 483 aa, Clostridium acetobutylicum
MKLKQLLQNIDYDLIKGDININIEGISYNSKKVKQNYVFVSIKGARFDGHDFIKEAAQNGAAAVIIDEDFHDSIENTTLVKVKNSKVALACLCNLFYEEPSRELNLVGVTGTNGKTTVIHYIRDMLEAFGNSTGTIGTLGYELKDKEINVEKINPTTPEALELNQILRDFIDKGAKNAVMEVTSSALMKHRVDYCSFKVGVFTNLSQDHLDEHGTIENYKNEKIKLFKMCPVGVINLDDNIAGEIIEKGTCEFFTYGVLTNADLTASDMVYKPNSVSFNVHYKGISSKVKVNVPGEFTVYNVLAAIGSLLCLGIDFESILKLVSSIKPVLGRLETINNPLNKNIIIDYAHTPDSLEKLLIMAREMTNGRIITVFGCGGDRDKSKRGLMGMAVGILSDYCIITSDNPRHEKPEDIIRDIERGMQTINSSYEKITDRRCAIKRGIEILKEEDILIIAGKGHEDYQIIGDNKVHFDDREVVNELLG

SEQ ID NO: 51681 - protein, 139 aa, Clostridium acetobutylicum
MKLSTKGRYGVKAMVDLAIHYGAEPVSIKSISERQKISEAYLEQLFVPLRKSGLIKSIRGSQGGYVLSKDPKDIHISNIFDVLEGPIEISDCVESDSCDNSDYCVTRLLWVKIKESIDNVTKTITLKDMVDDYNSIKNQ

SEQ ID NO: 51682 - protein, 458 aa, Clostridium acetobutylicum
MSFDLKNDISKKIHFIGIGGVSMSGLAEILLERGFKVSGSDMNGSPMIDKLKEHGAEIYLGHNEKNINNVDIVVYTAAIPEDNPELIYARKNNISLMTRAEFLGSLMKGHKYNIAISGTHGKTTTTSMVSHIALTEDVDPTILVGGNLDIINGNVLAGKSDYFITEACEYKASFLEFYPYIGVILNIDADHLDYYKNIDDIENTFAKFVNLIPKEGYLIANADDKRVARVASNATCNVVSFGIDNGDIRAKNISFNESGFSSFDVYKSSELLFNIELNVPGKHNILNALSAIASALTLKISHKSIIDGLKSFKGTHRRFEIKGVKNGITVIDDYAHHPTEIKATLDAAKNYPHNKIYCVFQPHTYSRTLSLFDDFSNSFSGVDELVLADIYAAREKDTGVVSSLKLSEAINKNGVKSSNLHSFEDIVNYFKSKLNDGDILLTVGAGDVFKIGEMFLSK

SEQ ID NO: 51683 - protein, 339 aa, Clostridium acetobutylicum
MKSKKKFGFLSKFFITILILIVVIGVTAGGYFYSKTSKMKKTTISKKPSDLGITQKNQNELQKYDDTINIAFFGLDRRQKTDISRSDSIMILTMDPTHKKLKLSSIMRDTYVNVDGHGMTKITHAYAYGGPQLAIKTINENFNLNIKDYVTVDFYGLEKIIDKLNGVEVDVQPDEVNYLNSYIDEVSKYEKVTPNHVSSAGKQLLDGRQAVAYSRIRYTAGGDFQRTERQRTVLMAVFNKMKAQGKSNMLSMMDELLPYAETDLGSLDIAKYGAKFLSSNIDSIDQERFPVDGYCSGITVDNVWYLKTDLGVTSDQMKKYIFEDVKPTPKASLVNIPAK

SEQ ID NO: 51684 - protein, 195 aa, Clostridium acetobutylicum
MNECKSKGKNQAKRILDAALNCISMKGYANVSMRDIADEAGVVLSQLSYYYRNKEGIFKEITKRITEKYLYEIDNILKRGKCEEEKISSLIKYFQETLKNNPNRFKILFDLTSMSIFSKPIKNLLNSFYDKASEIVQNNVMNDLIAKERFKNYSPKVLSKMLLGTLYGVSAQFVMSDKDENVPDNIFEELRMMFR

SEQ ID NO: 51685 - protein, 792 aa, Clostridium acetobutylicum
MKVPVKWLKDYVDFDINAKELGDRLTLSGSKVEEIITSGDEITNVVTGKILKIDPHPDAEKLVICSVDVGKNEPIQIVTGAQNMKENDIVPVALHGSTLPGGVKIKKGKLRGVVSNGMMCAKEELGIADEEHVHGLMILDENTPIGKDIKEVLGLDNPVIDFEITSNRPDCLSVIGIARETAATINTKYRNVKIDFSETKGRNIKEELEVEVKDKLCRRYMARVIKNVKIEDSPAWMQERLMLAGVRPINNIVDITNFVMLEVGQPMHAFDKKMITSNKIVIERAKDGEKFTTLDSEERSLDSNVLMIKDGDKNCAIAGIMGGLDSEVAENTHEIIFESANFDGTNIRVSSQKLALRTEASGRYEKDLDPNLAEIALNRACTLIQELNAGEIVEGVIDIYPVKSEPNIVEVDYNWINNFLGIKISKEEMKEYLDRLELTTEIKGDKLEVFSPTFRCDINIKEDVAEEVARIYGYNKVPSTTVKSQSIRTGKSKIQQIKDVVTDILISSGLNESINYSFVSPKIFDKILVPEDSELRNVVKIRNPLGEDFSVMRTTTLHSMMESLARNYSHNNELAKLFEIGKVYIPSENEGEIPKERNVITIGMYGNVDYFDLKGVVENLVEILGVNKISYARESENPTFHPGKTAVIKIKNTVLGTLGEVHPDVCENYEVEERCYVAEIDLDLLLENVSLSRKYKALPKFPTVTRDISVLVDEDILVQEIENVIKRQGGTILESLNLFDVYKGKQVPQGKKSVSYALTYRDENKTLTDKDVEKIQNKVIKTLEHVLGAELR

SEQ ID NO: 51686 - protein, 470 aa, Clostridium acetobutylicum
MNGIVEFANAVFKPLINLGAAPMMFIVLSVLAILMRVKVSKAIEGGLKLAIALTAIGQIISLLTTNFSGALQAFVKSTGINLSITDLGWAPVATITWGSMYTLFFLFILVIVNVIMLALNKTNTLDVDIFDVWHPAFCGILIMFYSKNLLVATIFVVFLGILKIINSDLMKPTFNDLLNMPDTNPTTTTHLNYMMNPIVMVFDKLIDKFLPFLDKYDFDAAQLNNKIGFWGSKFAIGAYLGVFVGVLGHQSIIKIFTLAFIGATCLELFSAIGSWFIAAVEPLSQGITNFLSKRLKGRTFNIGIDWPFIAGRAEMWAVANILAPILLIFSLILPGNKLLPLGGIIAMGITPALLVVTRGKMIRMIIIGILEIPIFLWAGTVIAPCVTNLAKQVGAFPKGLSTSTLISHSTCEGPIEKFLSVLIGKFFQGGNITTGLYVILALAAYLALFVWYAKQMKKRNTEYAKVKTED

SEQ ID NO: 51687 - protein, 452 aa, Clostridium acetobutylicum
MTFNEIAKAVNGKVILRGSKDVFNDVSIDTRKLSKGAIFIAINGENFNGNKFIHNAVQKGAALCIVDEIHFEKDSFKEDISILLVEDTKKALLDLAEFYRSTLNIKVVAITGSTGKTSTKDITASVLRSKFRVFKTSGNFNNEIGLPLMIFKLDKSYEVAVLEMGMNHFNEIHNMAKAARPDIALITNIGISHIENLKSRENILKAKLEITDFFTKDNLLIVNGDNDLLKKHEFKSINVLKTSLNKEGNLNAENLCLHEGNSEFEVQGEKLVLNMPGKHNIENAMLSIAAALKLGLTFEEIRKGLKDLELTAMRLDIVNGENIVIVDDSYNASPDSMIAAIDVTKNLKGNRRIAVLGTMRELGEKSYESHKEVGAYAKENNIDELLVVGEFSKAYLDGYKDKENFSEFETNEELLKFVKTDIRKGDIFLIKASRLMKFENIVTKLKELDKEI

SEQ ID NO: 51688 - protein, 392 aa, Clostridium acetobutylicum
MKEVVIASAVRTAIGSYGKSLKDVPAVDLGATAIKEAVKKAGIKPEDVNEVILGNVLQAGLGQNPARQASFKAGLPVEIPAMTINKVCGSGLRTVSLAAQIIKAGDADVIIAGGMENMSRAPYLANNARWGYRMGNAKFVDEMITDGLWDAFNDYHMGITAENIAERWNISREEQDEFALASQKKAEEAIKSGQFKDEIVPVVIKGRKGETVVDTDEHPRFGSTIEGLAKLKPAFKKDGTVTAGNASGLNDCAAVLVIMSAEKAKELGVKPLAKIVSYGSAGVDPAIMGYGPFYATKAAIEKAGWTVDELDLIESNEAFAAQSLAVAKDLKFDMNKVNVNGGAIALGHPIGASGARILVTLVHAMQKRDAKKGLATLCIGGGQGTAILLEKC

SEQ ID NO: 51689 - protein, 299 aa, Clostridium acetobutylicum
MNIDILGVPIYYGSDRKGVDLGPSKLREKNLASLIAKYNHNVKDMGDVNVPFISEKDKFKFNDKMKFLKPIVEANTELANKVYESLSSGNFPFVVGGDHSLGLGSITGASKALDNLAVIWIDAHTDINTDKTTETGNVHGMPLSAAMGIGASELTNICYNGQKVKPENVFIIGARSIDKGELALIYEKNLTFYSTKTVKRLGVEYILKEITEKLSKNNINSVHLSFDIDCLDETIVPGTGTPVSDGLNVDDTKLMVESLVKSGLVKSMDLVEFNPALDKDHQTEDLVMEFIDCIFKNLK

SEQ ID NO: 51690 - protein, 464 aa, Clostridium acetobutylicum
MKIYNTMTRKKEEFVPVKPNEVQMYVCGPTVYNFFHIGNARTFIVFDTVRKYFEYRGYKVNFIQNFTDIDDKMIAKANNEGVSVKELGDRYIKEYYEDADGLNLERATCNPRATEYIGKIIDFVKGLQDEGYAYEIDGDVYFNTNAFKEYGKLSGQNLEDRMAGATIAVDDRKKSPADFALWKSEKPGEPSWESPWGKGRPGWHIECSCMARDLLGDTIDIHAGAIDLIFPHHENEIAQSEARTGKPFSKYWMHAAYLNINNEKMSKSLNNFLTARDILKEYDAEVIRLFLLSAHYRTPLNFTEESIEAAKTSLERLYNTINNLGSLLNNTAESNDDSEYLKALDSYREKFIEKMDDDFNTADGISVIFDLAKDINININGKSSKAAVEKAISLMRELGKPLGILQKVEKHNLEDEIQNLIEQRQNARKNKDWALADKIRDDLKERGIVLEDTPEGIRWKFIDK

SEQ ID NO: 51691 - protein, 243 aa, Clostridium acetobutylicum
MKINEVAKLTGITIRTLHYYDEIGLLKPSEITGAGYRLYDENSLSKLQQILFFRELEFPLNEIKEIMRSSQYDTAEALKRQKELLIKKRERIDKLITLVENTIKGEGKMSFEEFDMTEIEESKKKYAKEVKERFGGSDAYIESEKKTSNYGREEWQKINDECKNILKAFADNRDKAPESKEVQELVKEWQLFITESFYNCTNDILRGLGYMYVEDERFKKNIDSNGEGTAEFISKAIKIYCEK

SEQ ID NO: 51692 - protein, 168 aa, Clostridium acetobutylicum
MSEFEGNIINEEDTQNGKFLIFITDGEQYGIEIKHVIEIIGISPISEIPELPQYIMGVINLRGKVIPVIDIRLRFNKIFKEYNDRTCIVIIDVQDMLIGIIVDKVLEVLKISENEIMDPPEISKDKNGYIKAIGKTHDGMNFILDCGKLISSEEINKLGPKNKIREDK

SEQ ID NO: 51693 - protein, 402 aa, Clostridium acetobutylicum
MKNKSYYFLTIIRYAVYLLIGMCAVFYGELKNTEMYYFIVFFLMYIIVTQFRIYYLRNRKYVSVSMVVDLVLVCFMYSYVRNFSFLFLFISVLDSSIMLSKTQAYASGIICSVVIIIQNVKIPFSLKAGTNLINILFSILLIFTLVFIGDSFREEQKRKIEAQGLYDRLRESEEKLRGAYEKLERYSETVEELSILRERNRISREIHDSVGHTLSAVLMQLQALLYLIKSDKEESLKTVEEMTGFVRGGIENVRRTVRELKPTDFDRFEGVFAIEEMIRKYKKLTSADIRFILSKEKRSLSSDESFISYRVVQEALNNAIRHGKASLVEVSMQFNQDRLYIRIKDNGVGTDGIKKGFGMTGMEERVKKLGGNIEFYSERDKGFEVTVNLPKSSEEKNSIINY

SEQ ID NO: 51694 - protein, 505 aa, Clostridium acetobutylicum
MNIKPEEITSIIKSQIEGYESKLETVDSGTIIEIGDGIARIYGLQNCMAGELLEFPNDVYGMALNLEQDNVGCVLLGSEEGIKEGDIVKSTGKVVEVPVGEEMLGRVVNALGQPIDGKGPIKAEDSKPVDIKATGVIDRQSVNQPLQTGIKAIDSMIPIGKGQRELIIGDRQTGKTAIAIDTILNQKGKDVICIYVAIGQKQSTVAHIVNTFEEMGAMDYSIVVAATASDSAPLQYLAPYSGVTIAENFMFKGKDVLIVYDDLSKHAVAYRTMSLLLRRPPGREAYPGDVFYLHSRLLERAAKLSQKLGGGSITALPIIETLAGDVAGYIPTNVISITDGQIFLESELFYAGQRPAVNSGISVSRVGGSAQIKAMKKLSGTLRLELAQYRELAAFAQFGSDLDKESKKRLEKGKRLTEMMKQPQYKPMPVEKQIMILYAVVNEYVMDIDVSKLSAFESGLFEYVDAHYRDLGKQILEKKELTDDISSQLTKAINEYKKIFLAEEQ

SEQ ID NO: 51695 - protein, 264 aa, Clostridium acetobutylicum
MSKNEYVPFLSEIKEVIKHTNIEYTFRMSYDGVVKPGQFFEVSIPKYGEAPISVSGVGENTVDLTIRRVGKVTNEVFERYVGDKLFLRGPYGNGFDVENYKDKEIVIVAGGTGVSPVRGVVEYFAKNSKEAKSVTLIAGFKTPKDILFSEDFKEWKNNINIILTVDSAEGDSNFKEGLVTKYIPELKLQNVKEASAIVVGPPAMMRFSTQGLLDVGFKEENMWISQERKMCCGIGKCGHCKIDDVYVCLDGPVFNFTKGKNLID

SEQ ID NO: 51696 - protein, 325 aa, Clostridium acetobutylicum
MNSVEIIGTGSYVPEKIVTNEDMSKIVDTSDEWISSRTGIKERRISINENTSDLGAKAALRAIEDSNIKPEEIDLIIVATTSPDSYTPSVACIVQEKIGAKNAACFDLNAACTGFIFALNTASQFIKTGEYKTALVVGTEVLSKILDWQDRGTCVLFGDGAGAVIIRGGDENGIIKACLGSDGTGKDFLHCPATNVINPFSDEKGLASSKISMNGREVFKFAVKVMVSSVKKVIEDSGLNIEDIDYIVPHQANIRIIEFAAKKLGLSMDKFFINLQNYGNTSGATIPLAIDEMNKKGLLKRGAKIVVVGFGGGLTWGSMVLKWTK

SEQ ID NO: 51697 - protein, 73 aa, Clostridium acetobutylicum
MLVMGRKKGESILIGDDIEITIVSLDENSVKIAINAPREVTILRKELYNKIKEENKEAVIKSSEVLKELTLKK

SEQ ID NO: 51698 - protein, 58 aa, Clostridium acetobutylicum
MSEIKVGENESLESALRRFKRKCARAGVLSEVRKREHYEKPSVKRKKKSEAARKRKFK

SEQ ID NO: 51699 - protein, 101 aa, Clostridium acetobutylicum
MSLKTSFDENIKQKHKIEKPKMYKVILHNDDYTTMEFVIEILINVFNKVPANAVKITFDVHKNGIGIAGVYPYDIAATKINEVKKLAYKNGYPLKLTMGEV

SEQ ID NO: 51700 - protein, 392 aa, Clostridium acetobutylicum
MDNKKLFVFIKYFTLVFMIVGIIFGGKEFNAQNITLMLILIINHQLRTFSLNKYIHKIISFILEIVLVVICNFWISGYLFTYLILLAIDANVMFKKFLASTFNVVIILIGVYFSFNYSLNYKIMNLGVSIIIIAVFYFNKYENEKKIEAQDLYDRLRISEEKLKKANRDLEMYASSVEELTLLRERNRISREIHDSVGHSLSTMVIQLGAIEKIIRKAPEKAELLTKNLRKFTQKSLDEVRAAVRAIKPKEFEEYEGILSIEELISNFKKMANIDVRLAFTKEKWSLNSDQSFVLYRIVQEFLSNSARHGRASRVDVIMAFSEKNLLVTLKDNGQGCQSIIEGVGMKSMRERVKELGGYFEYKTAPYEGFTVKIELAKREKLKVYSGGENNG

SEQ ID NO: 51701 - protein, 75 aa, Clostridium acetobutylicum
MKQLLETIAKSLVDCPDEVQVSEVTGEQSIILELKVAPEDMGKVIGKQGRIAKAIRTVIKAAAVKENKRVVVEII

SEQ ID NO: 51702 - protein, 142 aa, Clostridium acetobutylicum
MPNVKSILNHIEKLPLQQKEQILSTLEEILVLGSQVSQVEQEVKEFRFSKGKVCPICGSETISRNSKYNGKQGYICKSCKKSFTDFTNSATYKSKKTLDKWLKYAKCMVNGYSIRKSAKVVEINIATSFFWRHKILDCVSTF

SEQ ID NO: 51703 - protein, 156 aa, Clostridium acetobutylicum
MPRKGHIAKRDVLPDPLYNSKVVTKLINNIMEDGKKGVAQKICYNAFEYLKEKTGKEPMEVFEAAMNNVMPLLEVKARRIGGATYQVPIEVRPERRQTLGIRWMLAAADKRGEKYMHLKLAGELLDASNNTGAAVKKREDTHKMAEANKAFAHYRY

SEQ ID NO: 51704 - protein, 241 aa, Clostridium acetobutylicum
MKIVTVNDYDEMSKFAAKIIASQIILKENSVLGLATGGTPLGMYKELINLYNKENLNFSKVQTFNLDEYYGVSDDNPQSYHYYMKNNFFKFTNIKNENINILDGTTSDIENECKSYDNKILSSGGIDIQVLGIGENGHIGFNEPDINFEAKTHLVKLDEKTIEANSRFFNSKNEVPTSALSMGIKTIMQSKKILLLANGEKKAEAIFKMVNGKISPEVPASILQLHNDTTIIIDKAAAKML

SEQ ID NO: 51705 - protein, 160 aa, Clostridium acetobutylicum
MILGQENLNIVLFQPEIPQNTGNIARTCVLTNSKLHLIKPLGFSLDEKHLRRAGLDYWKDLDLSLYDSYDELREKYKDSTFYFSTTHGNGFYDDVKFNQGDFIIFGRESCGLPDEIRESDPDRCIRVPMVKTSTRSLNLSNTVAIVAYEAIRQFGFPNMK

SEQ ID NO: 51706 - protein, 356 aa, Clostridium acetobutylicum
MHKKLFIPGPVEVAEDVLQKMAEPMIGHRSKEASSLQRGISDKLRIVFQTKEEILLSTSSGSGLMEGAIRCCTAKRAAVFSIGAFGKRWYEMAIDNRVPADLYEVEWGEAIKPEFVDEVLGTGKYDLIALTHNETSTGIMNPVGEIAKVIKKYPEVVWCLDTVSSMGGTNIPVDELGVDVCITSSQKALGLPPGLAACSFSKKAIERARNVEHRGYYLDLLKLYEFIQKKDYQYPSTPSLSHMFALDYALNKMLEEGMDNRYKRHIEMAEYVRAWARKNFEIFGDEDNLSNTVTTIKNTRGISVADLNKELGKRGFAISNGYGKLKEKTFRIAHMAEFTLDDIKELIENINDILKL

SEQ ID NO: 51707 - protein, 144 aa, Clostridium acetobutylicum
MNKVVLIGRLTKDPELKFTPGTGTAVASFTLAVDRRFKKEGQQEADFIPIVVWGKQAESTANYMSKGKLMGVSGRIQTRSYDAKDGTRRYVTEIVAEEVQFLEWGSSNNNSMANDQFNNGNENGSMQLPDNNDITPIDDGDIPF

SEQ ID NO: 51708 - protein, 84 aa, Clostridium acetobutylicum
MERGNRKTRIGRVVSDKMDKTIVVAVETKVRHPLYGKTVNKTTKFKAHDEKNEAKLNDRVQIMETRPLSKDKRWRLVEIVEKAK

SEQ ID NO: 51709 - protein, 280 aa, Clostridium acetobutylicum
MKYKLVCIDMDGTLLNSKHCVSGETKEVIRKAYAKGVDIVITTGRIYANAAFYSKLIGVKSPVIASNGAIIRGRDNNIIYKNVLSSDTLSRIFNVCSRLKGNITLHTHDSIICSSKFAYIVMWVIFIGSIIKNNENTLKIKYVKNYSAYINGLKESNDIIKCEIIDKDVKKISAIREELKRMNDIEVVSSSRHNIEVTSKNVSKGNAIKSLAEFYGIKREEIITIGDSENDLSMIEYGGLGVVMENGCESAKKLADYITDTNDNNGVAKVIKKFIMEDGN

SEQ ID NO: 51710 - protein, 339 aa, Clostridium acetobutylicum
MKEKLEAIKEKALNELKSAVDKKNIEEIRVKYLGKKGELTQILRGMGALSSEERPIIGKLANEVRSKLESLIVEASEKIKDAEKKTRLESEIIDISMPGKRQTIGHRHPTYLTLNKVENIFRDMGFVIEEGPEVEYDKYNFEMLNIPKNHPARGEQDTFYINDNVVLRTQTSPVQVRTMLNQKPPIKMISPGKVYRSDAADATHSPIFYQVEGLVVDKGITFADLKGTLETFAKKMFGENVKMKFRPHHFPFTEPSAESDVTCFACGGEGCRVCKGEGWIELWGCGMVHPNVLRNCGIDPEVYSGFAFGMGLDRIVMLNYGIDDIRQLYESDMRFLKQF

SEQ ID NO: 51711 - protein, 87 aa, Clostridium acetobutylicum
MDKAKKQELIATYSRKEGDTGSPEVQIALLSERINHLTSHLKEHKKDHHSRRGLFMMIGKRRSLLNYLESVDIERYRDIIKKLGLRK

SEQ ID NO: 51712 - protein, 242 aa, Clostridium acetobutylicum
MARKLKIDILTLFPEMFDLFNLSMIGRAKKNGIIEINTYNIRDYTIDKHKKTDDYPYGGGAGMVMTPQPIVDSIRSVKESNKGKVIFLGPRGKKFDQEDAKKLADREELIILCGHYEGIDERVYKYIDEEYSLGDFVLTGGEMACIPIVDSICRMIPGVLSKSESYIEESFYSGLLEYPQYTRPEEFEGARVPDVLISGHHENIRKWRRKQALKITKDRRKDLFDKLVMTKEDKKLLNDNEL

SEQ ID NO: 51713 - protein, 343 aa, Clostridium acetobutylicum
MHNSKELTVFLQNLLQINSPSGYTHDVVSYIEKEFCKLGVHYKITNKGNIMATLPGKNSSFERTISAHLDTLGAMVKEIKSNGTLSLTPIGGYMMNSIEGENCNIMTLDDKKYTGTIQSTKPSVHIHNDAKELKRIPENMEVVIDEKVFSKEDVEALGINVGDFICFDPRIKFTDSGFIKSRHLDDKASAAIMLYAIKHFIDNNIELKYTTNFYFSTYEEVGHGASNLPQNTKELLCIDMGAPGKGQNSSEFATCICAKDSSGPYDYAFRKRLVDICKNKNIPYRIDTYPYYGSDASAALKSGYDIKTALIGTGVYASHGYERTHLDGMLATLDLLINYCTSE

SEQ ID NO: 51714 - protein, 256 aa, Clostridium acetobutylicum
MSVKNNPIGVIDSGVGGISVLKEAVKQLPYENFIYYGDSKNAPYGIKSVDEVRNLTFNVVEKLLKLNIKALVVACNTATSAAIDELREKYKNIPVIGIEPALKPAVELKRRGKIIIMATPMTLSEVKFKNLMEKYEKDSEIVKLPCPGLVELIEDGIVEGEKMQEYLRNKFKDYEKDDIAAFVLGCTHYPFVKKEIASIARDVPIIDGSQGTVMQLKRKLDKYDILNIGSEKGKIKIMNSLKDDKILDLSHRLLDL

SEQ ID NO: 51715 - protein, 267 aa, Clostridium acetobutylicum
MNILKDFSLEGKIALVTGASYGIGFAIARSYANAGATIVFNDINQDLVDKGLKAYEAEGIKAHGYVCDVTDEDKVNGFVKKVEKEVGLIDILVNNAGIIKRIPMLEMKAEDFRKVIDVDLNAPFIVSKAVIPGMIKKGHGKIINICSMMSELGRETVSAYAAAKGGLKMLTRNIASEYGEHNIQCNGIGPGYIATPQTAPLRELQADGSKHPFDQFIIAKTPAARWGTPEDLMGPAVFLASDASNFVNGHVLYVDGGILAYIGKQPQ

SEQ ID NO: 51716 - protein, 140 aa, Clostridium acetobutylicum
MFEIKRGSLTPEVFNSLAESVGWGHPSIDQVEEALKNSLYTACVVDGSNFIAMGRIVGDLSMSYFIKDVAVMPEYQNRGIGKLLMMDMLSFIESKTPTGWKTCIELLSAHGKEGFYEKFGFQKRIKEKNGCGMTLIIRFK

SEQ ID NO: 51717 - protein, 384 aa, Clostridium acetobutylicum
MIKINNRLKSIDEYHFKKIEDKKRELIKKGKQIIDLGIGDPDLEVSNRVQNEIIKSLGIKDFNKYPPYSGIEKLKSRVIKYYRDIFQVNLDLDEIIITIGSKEGISSIIPSICDIGDYVIVPNPGYQVYTAASYLWGAVPYKIPLTDKNDYLPNLNVIPQNIALKSKLFFINYPNNPTGAEANKDFFKDIVEFCKKRNIVLVNDSAYNEIIKKESTPISLLQSDEDKKMIEIGSFSKTYNMTGFRVGYVVGNKGVIKALLKVKSNIDSGQFMPVQYAAAEAINLDRNEIKKSREIYDKRRSTAKKILSKKGIKYFDASAAFYIWCSVPKGYSTDEFCDKLLSEYGVVVTPGYCFGNLGYGFFRIALTTKIENIETALSKFEDFQ

SEQ ID NO: 51718 - protein, 128 aa, Clostridium acetobutylicum
MMEEKSFLPLGSIVILKGAIKKLMIVSRANVVNNNYFDYGAILYPEGMIDENVAYFNGKDILKVVSEAYTDDDDALMVEQLCQAKEEYLASSVEIKENVSAPETAAAEAGNFDDDPFAAVRDMEDDDE

SEQ ID NO: 51719 - protein, 172 aa, Clostridium acetobutylicum
MKTILVDGYNVINSWGKLNSIKDDVSLESARDKLIEVLVEYGEFTNCKIIVVFDAHHIPGNTGEKIKMYDKFTIVYTKAGETADSFIERYVNKVGRKSEVCVVTSDNLEQQVVFQRGSTRMSSIEFYNDVQKIHGRISKKAEKIRNEKKYNRLEDRIDKNIMEKLDKIRKNL

SEQ ID NO: 51720 - protein, 214 aa, Clostridium acetobutylicum
MEENTITKIEAQKKKKDRVNVYIDNEYSFSCNTELIYIHGLKKGKVVDLDYLQDIIEEDNYLYAKSRALSFIEKTFKTEKEIRVKLREKEFNEKIIERVIEFLRKYDFVDDSRYAELYIKERINKQGKVKIKYGLIKKGINDSIIDEKLSKYSANNENYIEAMREVALKKFNNIAKRETDKLKIKRKLSSYLLGRGYSWSEIGEVLKEIFSENN

SEQ ID NO: 51721 - protein, 411 aa, Clostridium acetobutylicum
MDFENIKVSDSEVYSIIEEENARQENNIELIASENFTSKAVMEAMGSYLTNKYAEGYPGKRYYGGCYVVDKVEELARERAKKLFKAEHANVQPHSGSQANMAVYFAVLKPGDTIMGMNLTDGGHLTHGSPVNFSGKLFNIIAYGVSDETEQIDYEAFRKKALECKPKMIVSGASAYSRIIDFKKIREICDEVGAYMMVDMAHIAGLVAAGLHPSPIPYADFVTTTTHKTLRGPRGGAIFCKEKYAKDIDKSVFPGMQGGPLMHIIAGKAVCFGEALKDDFKDYAQQIVNNAKVFADELTKYGFRIVSGGTDNHLLLVDLTNKNITGKDAEHLLDSVGITANKNTIPFEKKSPFITSGIRMGTPSVTTRGFKEEEMKKVAYFINYVIEHRDEDLSEIRKQVSELCSGFPIYK

SEQ ID NO: 51722 - protein, 474 aa, Clostridium acetobutylicum
MNNFGEDFIFGGATAAYQAEGATKEDGKGPCIWDEYLKKEGRFTGDTASDFYHKYKEDLKFSRKFGVNGIRISIAWSRVIPDGKGEVNPKGLKFYSDLIDECIKNNVEPFVTLHHFDTPLTLFKDGDWLNRNNIDYFVRFAKVCFEALGDRVKKWITFNEAWAVAQNGYIIGNFPPSIKYDIPKAAQSMHNMMVAHAKVVELYKSMNLDGEIGIVHTLEGKYPITDSKEDKEAAYLDYMISNKFMLDACFKGEYPKETEKTINEIMSKNGGELKIYDGDLEVLKKASSKIDFLGMNYYSSHFLKAYEGESRIHHNGTGEKGTSIFALKGIGERVNNPEVPTTDWDWPIYPKGLHDMLVRIKNEYPNYKKIYVTENGMGYKDDFKDGKIDDTPRIDYINKHLEAILKAKNEGVVVKGYFVWSLMDVLSWSNGYNKRYGLFYVDFKTQNRYAKKSAYWFKRISYEKKLIDFSDIEY

SEQ ID NO: 51723 - protein, 665 aa, Clostridium acetobutylicum
MNKNLKRNLAVLVSSTFLVSTTINLTSSKPIKAENARKPVYLNPNANTEARVSDLLKRMTLDEKVGQMLQGELGTSSDNAKPEDCINYTLGSVLSGGNADPTTGNDAQSWYDTVTSFVEASTQNRLHIPILYGVDAVHGNSNIIGATIFPHNIALGAIATGNLNEGKKIVRKIGSATAKEMRVTDIPWTFAPCLANPQNPTWGRTYEGFGEDINLASELGSSYIKGLQGNDINDLKKPNKAVATIKHYLGEGYTENGTNQGNVTSMTKEQVAKNLIKPYEDAVRAGARTVMPSYNSIQGVKMTASKYLLTDILKNKLKFDGFVISDYNAAQQITADENGNSVSGLKNQVKVSINAGVDMLMEPNDWKSCIGYIKELVADEKAHPGTGIPMSRINDAVSRILRVKFQSGLFEHPISNNPENNPKVMAQLGSNKHRKLAREAVSKSLVLLKNDAVGGKPILSQLKKMKKIFVAGKSANDIGNQCGGWTIDWQGKSGNTTKGTTILQGIKDSISPKQNVTFSEDGAGASGNDVAIAIIGETPYAETNGDNLNGLNLDSTDKKTLANLKASGVPTIVVLVSGRPMIVTDYIKDWAGLVEAWLPGTEGNGVSDVLFGNKDFTGRLPEKWAFYTEAYPITNSNKQYMLFDSGYGLTKNQVTPRLPITPAHP

SEQ ID NO: 51724 - protein, 403 aa, Clostridium acetobutylicum
MEKKTKQEIVIRIMCFIAAFCLWLYISNYENPIKTYKIKNIPVTINNTDVLKDNNLALAPNQKFQITVTIKGNATDVYRVKPSEFKIAADISAYAVKKGENKIPVEIVKSPGNVSIVQEENMWVNVKIDKIIKKNVSVVIKKQAKSNYLTGIYDAFPTPSKVSVSGASEIVLNVDHVEGIVDIKNEDEDSFVSKVKLEAVDAKGNVIGNVAIDNKEIDATLTKRKKSKTVGINVKTTGQSPSGVKIKSITPSTNTIQIVGVGDNVNNLSSIDTEPIDLSKISVGETVQVKLIVPEGVRLTNSNDSINVRLDTDNTVQKTFKVNITTSNLGQDLKAQLSNTTLDVVASGYGTDINNVKDGDIKANLDLSNLAEGNYSQSVNVTLPSGLTKVSQDVDKVNVTITK

SEQ ID NO: 51725 - protein, 227 aa, Clostridium acetobutylicum
MEQENDIDFTGIFEVLNKEKAMIAAVTIFFVLFSAILSFFIIKPTYQGHVTVIIGKNDSKSSTNEQYNDVMMSQNLTKTYAQIAQSKQVADKTVSKLADGTTADQVLGLVSVTPQTGTQIIDITANGKSPDKAADLANDFSDSFVEVSKAVYTAGDARIIDRATAPKSPIKPKKMINIAIAFILGLFISVGIAFIKEYMDKTIKTQEDIKKHLDLPVLGVIPNYEEE

SEQ ID NO: 51726 - protein, 281 aa, Clostridium acetobutylicum
MIKYRGGKAREIKKFIHHLKSQKYDSYYEPFIGGGAVYFDLEPQNAIINDINTKLIDFYVDVKNNFSRIKNELEFLENVYNKNQQQYDALKMINSEERVLSMNEKLYYELREEFNYPTGKYLRGTVYYFINKTSYSGMIRYNKKGEYNVPFGRYKGFNAKGIDIKHYELLKNAQILNLDYEEVFKKASSKDIMFLDPPYDCVFNDYGNIQLGGGFDEDQHRRLAENFKNLNTRSLMIIGKTKLTEELYRNYIVDEYSKKYCVNIKNRFRNSAIHIVVSNYL

SEQ ID NO: 51727 - protein, 363 aa, Clostridium acetobutylicum
MRKLSKKVFLIFAVTTIFILGNSAWDRTIASEEDNSMIDGKPKEYYISEKNYKREIKQVENYLSARRESGHFIGKENIDIYYEKYVIPNSKNSIVISHGFRESMVKYNETIYYFLKNGYSVYGLEHRGHARSGRLGKDSTQTSVDNFDYYVDDFKKYVDTIVEPDNRGKNLFLYAHSMGGAIGGLFLERYPKYFKAAVLSSPMFEVDTGRYPEFLSRAVASVFNFVNLGDTYAPGHHEYSCESDFENSCTTSNIRYDYYLDKTNKSRKIENGGASFKWVKESLKATDEVTDGKNASKVTIPVLLFQAENDDIVRPGGQDKFAKEAKKCKLIVIKNSKHEIYREKDSIMVPYFNKVFTFLNNNK

SEQ ID NO: 51728 - protein, 787 aa, Clostridium acetobutylicum
MNKVELLAPAGSIESIYAAVQNGADAVYVGGSRFSARAYAENFNDEIMEKAVDYCHDYGVRLYVTVNTLIKQDEIKEVIRYIEFLYKIGVDALIVQDTAILQLIKRYVPDFEIHASTQMTIHNALGAVYYKERGFKRIVLSRELSLREIEYISKELNIETEVFVHGALCVCYSGQCLMSSIIGGRSGNRGRCAQPCRQSYTLIDKSSLESKKGYFLSTKDMCTVDILDRLIDTGTSSLKIEGRMKKPEYAGGVVSSYRKAIDNKLNGDYKEEKAKLLKLFNREGFSRAYLLGNTGKDMMAYKFPKNTGVFIGKVISDGSIVLKESLNLKDGVRNDVKGTVVSKILLDGVEVKEAKPGEKVKIFPRFYKSGDYIYKTLDLKLTREIEESYKKDFKRKVYLDLEIEFKIGEPFKITASFSRVNDLGANEKNRAISIQVLGDMVCKAEKSPVKREKVEEHLRKTGGTPFEVRNIEFTCFDEGYIPISALNSIRREVLEKFQNSIQKSYKREANLKFEGIKISKRSEVKIPEIMVLVSNKEQYLAVKEEGFKNIIVDLFKRKCDLKLKELKDVYIKVPNVIKEEFNDICNKIDENIENIKGIVTVNAGIINKYKGLVNIIGDYKGNIFNSEALEFYKEDLDGFCISTELSKNEIKALNKCKCMDTQMLIYGKIEAMVSEYCPIGSVFGGKSSKSNCQGTCMKSDFVLKDKMGVSFDVVTDKYCRSHIYNPLPLNLIGNLDEIKNLGVNSYRIDFIDENRESVKRVLSWMKNGKIDGEFSGFTRGSYKRGVE

SEQ ID NO: 51729 - protein, 743 aa, Clostridium acetobutylicum
MVDVENLCKEALKGINDDENIYTKTKLINVLKHITREGMKEEEIIKSVIQVCLELTKADEPKWLQGASRLYVINLYNEVRKNRNISENEDPYKGFYDFIVKLTDEGLYGKYILENYSKEDIYELESFIKKDRDFLFTYSGIKLLSERYLIQNFERKVLELPQQMFMGIAMHLAVPEKQENRVYWAKRFYDVLSSLKATMATPTMSNARKPFYQLSSCFIDTVDDSLKGIYKSLDNFANVSKYGGGMGVYFGKVRSMGASIRGFKGASGGVVPWVKLFNDTAIAVDQLGVRNGSVAVWLDAWHKDLPEFMQLRTNNGDDRKKAHDVFPGVCYPDLFWRLAEEDIDANWYMMCPHEIKLVKGYSLEDYYGEEWEKRYFDCVNDPRIDKRMMSVKDIVRLIIKSAAETGTPFAFYRDAANRMNPNKHKGMIYSSNLCTEIMQNMSAMDILEDEIIDENGDKIIVQKAKSGDFVVCNLSSIVLGNVDVNDDEELQYVIETQIRAMDNVIDLNYYSVPFAEVTNKRYRGIGLGTSGYHHMLTNNRVVWTSDDHFEFTDRVYEKINYYAIQASMNIAKDKGRYEYFEGSDWENGSYFKLRGYNSPKWKALIAKIKKYGMRNGYIMAVAPNGSTATIAGTSEGVDPVMARFWMEEKKGSITPKIAPNLSRENFWFYNSAYNIDQKLCVKINGIRQRHIDQSQSFNLYITTDYTMRQIMNLYIEAYKSGVKSIYYVRSKSLTVGDCDSCSA

SEQ ID NO: 51730 - protein, 392 aa, Clostridium acetobutylicum
MLNKESLECEGIHYRLQVIFLFIASICVGTGIYEWIPLTNVLQQSFHVGQEQIIFIGSVFSLFYAIGFLIFGWLANYVEIKKLLIVGTLLLMISTFLIGFATNYKLMIVFRAIQGIFAASFAPLGFSIIVKMFPESKRIAGISAITTGFVMAGILGQLYGSIIANSYSWSVVFWLQALIYLMIIISMIFLVPKTDKVSERPTSFIGELVKLLISKSLFPCYVITLTLLFCFVGMYTVMGMFFQKDFGLNNEKILWIRGIGIIGMIGSMVFAKLSKKIGVGNILSLGLVCASIGVLIIGISNNVGLSVAMSVVFVFGITISLPMVVSSIGTLAGKKSGNAMTLYTFVLFIGATVGPIVCNRIIESGSYPLAFIFLAVVLGISFIASLIVRKTI

SEQ ID NO: 51731 - protein, 570 aa, Clostridium acetobutylicum
MALDGIYIHSILHELKDKLLGGRISKVNQPEKDEINLTIRTTSNSNIKLLISANPTYPKIHITDLIKTNPIKAPMFCMVLRKHLLNSRILKIDQIESDRIVIIDFETTDELGFNSIYKLYIEIMGRHSNISLVREHDNTIMDCIKHITPEVNRYRTLLPGCEFVLPPKSDKLNPFNFEYNDLKDYISEKDITKNPNMFSKTFTGVSSTLSKELYFNVEKLNSLEAAFDYLKTIFDKVKNNDFYFASYLTNGYVKDFYCLRLNYLEGFSEKTYATPSLLIQEFYFEKDKAERLKNRSSDLQKIVNTNLERCRKKNEIYEDELNECANKDTYKIYGELLTSNIYTIKKGDKTATVLNYYSEGNESITIKLDENKTPSENIQRYFKKYNKLKKTEENAQIQIKNNNEEIEYLQSVLTNIENSDTYSDIEDIRQELIDTEYIRFSKKNKQKKKDKISKPMHIKSKDGIDMYIGKNNKQNDYLTLKFADKRDIWFHTKNIPGSHIIVKNFGDIPETTLIEAASIAAYYSKARESSNVAVDYTEVKNVRKPSGAKPGMVIYYTNKTIYTNPKEPIT

SEQ ID NO: 51732 - protein, 37 aa, Clostridium acetobutylicum
MKVRPSVKPICEKCKVIKRKGKVMVICENPKHKQKQG

SEQ ID NO: 51733 - protein, 761 aa, Clostridium acetobutylicum
MVKKLTPEDVIYNISPRDKRADKNNIYDKMYVDIKNGIDIKDRGYNIYVVDDFSTDMLKDIKSYVNYLLSRKSSPKDICYVTGKDRDIPQSIIINNGFGKKLYDCIEEIKKIYRDIIYKFYNALDIEERDFIIEDARNEKKAIINKILSEAEEKGFELKPSEAGFNFIPLKEGKPITEEEYDELHESQKEDILSKMKELKSSTKIVFTKLKDIEEKEIKSLKECFKDYIENETEEKKYSYMNEFEGVPEAVVYIYKVFDDIKEEIVKNYTSSYEKDSEKIIAILFKYCVNVIVDNSTNNKPLTIYEDDPKLSNLLGSIEYKNHGGNYVTDVSLIKAGSLLKANEGCVIIRIKDLIEKPMAYYYLKKVLLNETVRLDYTKDHLELISLRGLNPEPIKVDLKIILIGDYETYNILYNLDEDFRELFKIKAEYNPIVSINDNSIRYVEKIVKSFLNCEKGKEISSAAFKEICRQLSRKADNRNKLYISPKDIKQILILTCNNANKTDDKYINDENVREVVCKREIIEEEIIKNYKEKKILMDFSKSKVGQINALSVVSLGNKDVGKPIRLTCTCHKGSGNIVDIQKENSMSGNIHSKSISILKGLMGEIFGGYDRIPVDFYLCFEQVYGKLEGDSASVAETLCMISALTKIPIKQNIGVTGSINQFGEIQPVGGIKDKIEGFYRVCNSYNSRDGYSVAIPDNNKDDIVLNYDVEKAVIEGNLFVYTIENIKDAVKVLMDEQWDDVIKKAWIEMKKYDIKRERRH

SEQ ID NO: 51734 - protein, 569 aa, Clostridium acetobutylicum
MKRKVLAIFVITAMFSTILFTGCGSETANVKDTAEPKIENVIKVTRAVDKTKLPDEAKNRKDTLIIGTGVPGGNFISYYAQTLTDAYISDVVTDGLVDWDDSGEPIPGIAKKWDISDDGLTYTFHLRDDVKFSDGKPLTADDVKFSLELVFDPSFSGAVDHSAIPIKGGDAFNKGTVKDIEGINVKDPHTISVTLNKPNSSILYLIGTTIISKDYFGKDYVPGNTKGVEAKLQTPVGCGQYKVTKYVPGQEVDLTANEYYWKGTPKIKNLIFKATTEENKMQNLSSGETDIDTFDGTPENIEQLKSMGFLDLTSFPSSSIFYIGVNCKDSKFSDRKVRQALEYGLNRQEMAKTVFKGNAYIINEPQSKAHASYLKDVNEYKYNVSKANKMLDEAGWKKGTDGIREKNGQKFVIHLMSSSTNSAHKLEIPIIKENYKKLGIDVEPELMDLNTLLSKTDKKDFEAYLMGTSLGADALSSNLAANFKTGAPSNNMSYSNSNVDDLIDKAYKESDKDKRTALEQKVYKDINEDLPFIFTYQPETIWVNNSRVTGIKFLPYNSFCHNIYKAEIK

SEQ ID NO: 51735 - protein, 310 aa, Clostridium acetobutylicum
MILEIKNLKKTYKEFTAVDSLNLKIEDGEIYGLLGPNGAGKSTTINTITGLTKVDSGEIKIFGKRFNGSDTNIKRNIGVVPQDIAVFSELSAYENVAFFGKLNGLRGAVLKERVKEALDFTGLWDRRKSKPGQYSGGMQRRLNIACAIVHRPKLIIMDEPTVGIDPQSRNHILDSVKKLNEMGSTIIYTSHYMEEIETLCSKITIIDHGKEIATGTKEQLKEMISNEEKVELELSEVTDDLVEAVEGIKNVKKCRRNENMLVIVSDKNSENISTITAKIAEFKSKIISINVEKPSLEGVFLTLTGRKLRD

SEQ ID NO: 51736 - protein, 254 aa, Clostridium acetobutylicum
MVDIHSHIIPGIDDGSNSLETTLNMMSIAKEAGVTKMVATSHYYRGKFENSISVIEKKANELNYTLKEKGVDIDVIPGQEVFIDNYTLKDYKEGIIGTINNTDYMLVEFDMMSLGENAIDTLYELQIKGIKPIIAHPERYTYIQKDIYKINELMDENIYFQVNAGSIEGLFGKTVQKTALKLVEEGVISFIASDAHSAGKRCPGYEKALHDLTKIDKTLAEKFIKNSNLLLENEKIENKVRKLKKKKTFFSFLK

SEQ ID NO: 51737 - protein, 277 aa, Clostridium acetobutylicum
MAVRGFKPTSPARRQMTVSTFEEITTDVPEKSLLVSLNNKAGRNNNGKITVRHRGGGNRNKYRLIDFKRNKDGVPAKVTTIEYDPNRSAYIALVVYADGEKRYIIAPTKLSVGDTVVSGPDADIKIGNALPIKNIPVGTVIHNVELAAGKGAQLVRAAGSSAQLMAKEGNYAQLRLPSGEMRYVRIECRATIGTVSNLTHDIVNIGKAGRKRHMGIRPTVRGSVMNPNDHPHGGGEGKSPVGRPGPVTPWGKPALGYKTRKNKKYSDKLIVKRRNDK

SEQ ID NO: 51738 - protein, 393 aa, Clostridium acetobutylicum
MMAAITAAKKHEVILIERNEKLGKKLFITGKGRCNITNSISIDEFFENIPGNPYFLYSSLYSFTNNDLMDFIEGLGVKLKVERGGRVFPKSDKSSDIILALERELKKRNVKVILNSRVVSIKLENGVIKSVTTSNNECFKGDFFILCTGGKSYPQTGSTGDGYNFARDMGHNIVEPRPSLVPIEIRESFISDLQGLSLKNVSLYIKKGKKVLYDNFGEMLFTHYGISGPIVLSASRVVNYNNDLKAVIDLKPALDEKELDKRIQKDFMKYINKDFKNALDDLLPQKLIPVIIKLSKIEEDKKVNLITKEERKKIVNLIKEFTITIKGLRPITEAIITAGGVDVKEIDPSTLKSKKVSNLYFCGEIVDVDAYTGGFNLQIAMSTAHEAGRNIGD

SEQ ID NO: 51739 - protein, 116 aa, Clostridium acetobutylicum
MEERIYLSMLLSTYGSLLTEKQVNVMRLYYDDDLSMPEIAELNNTTRQAIHDLIKRCHKMLLNYENKLKLVEKYKRNEDIKKDIKDKLYILKDKIQDKDNVQLIDEIEKDINSFSI

SEQ ID NO: 51740 - protein, 218 aa, Clostridium acetobutylicum
MSTTDILKQILLPSLWETIYMVFVSTLFAIIIGFIPAIILVVTDENGLKPNKIVYKILDFIINMLRSFPFLILMIAIFPFTKLITGKQIGTTAAIVPLTIGAFPFAARVIESSLKEVDTGIIEAAKSFGASNFQIIFKVMIKEAMPSIVLGITLTVINIIGYSAMAGAIGGGGLGAAAMQYGYNMFNTTVMVYTVIILMIIVQILQSLGNFVYKLMVK

SEQ ID NO: 51741 - protein, 310 aa, Clostridium acetobutylicum
MLKTQFCDIIGIKYPIIQGGMAWVADSSLAAGVSNAGGLGIIAAANAPVEYVRDEIRKAKKLTDKPFGVNIMLLSDNAEEVAKMVCEEGVKVVTTGAGNPGKYIDMWKEHDIKVIPVVASVALARRMERCGVDAVVAEGCESGGHVGELTTMALVPQVVDAINIPVIAAGGIGDGRGVAAAFALGASGVQVGTRFLIAKECTVHQNYKNKVLKAKDIDTEVTGRSTGHPVRVLRNKLARKYKLMEKEGASPEEMEELGRGALPRAVREGDVDNGSVMAGQIAGLINKEETCDEIVESMFKEAVEVIDRIK

SEQ ID NO: 51742 - protein, 450 aa, Clostridium acetobutylicum
MSKVKSFFVCQECGYQSVKWLGKCPSCNSWNSFVEEERVENKKASKITLNSEPKCINNIKSGQYERYDTNNTELNRVLGGGLVKGSITLISGAPGIGKSTLLLQICQDIALKYGKVLYVSGEESEHQIKMRGDRLGVTSANIYILAETNMESIERHVENIKPAFVIIDSIQTLYKDQITSAPGSVSQVRECANDIMRIAKTDNIPFFIVAHVTKQGELAGPRVLEHIVDTVLTFEGQRTEEFRILRTVKNRFGTTSEIGVFEMKEEGLEQIHNPSSLFLEETNFNQEGSVVIGIMEGTRPILVEIQALVSKTNAVMPRRTSVGIDSSRLNLILAVLEKKLKVPFYNCDVYVNVVGGLNIEGTYGDLGLALALVSSVKGVSIKLDKMIVVGEIGLTGEVRPVSFSDRIVNEADKLGFKNILMPQKNIKNDKNIAINIIGVSYLKEAVNKVF

SEQ ID NO: 51743 - protein, 295 aa, Clostridium acetobutylicum
MNKVKFIYNPFSGENLIINNIDKVIKTHQKYGYTIVPHRIELNCSIESAFDDIDDTYKYVLIAGGDGTVDNVVNVMKKCNLDIPIAILPVGTANDFAKFIGMPADIEMACEQILNSEIRKIDIGKINDKYFINVASAGLFTNVSQKTDINMKNTMGKLAYYVKGIEQLPNFKRIPLKVESKQNNFDGEMLLMLVFNGQTAGNFKFAYKAIVDDGMLDVIIIEGGMVKDIVNILIKMFKGEHLEDVNGIIYFKTDKLNISCNNDIVTDIDGERGPDFPVEITCIKGGLKIFGVKNI

SEQ ID NO: 51744 - protein, 610 aa, Clostridium acetobutylicum
MNIAYFTSLFMVFLRVFAFFIALQVMFPKSLPNTVKVMLSLCISFFVMPYINLSQVSALNNGFLYTWQCICEILTGLILGFFANLMFLGVKIGGQFLDFQIGYSMMTAYDPSSESNASLIERFLNMFSVVLFFSIGGHEVVIKELVSSFNSVKLGTFVINDQSVMVAFNVFVQFFVIGFKIALPVVLVLLITDIVMGLMSRTVPQLNVMILGMPIKILLGLTCLMIILPLIAKVLITSFSSLPDIYKGFYKLVPIGLIFADSDKTEEATPKRKSEARKKGQVARSKEVPLAATLVAITFIISLGGQTFFNGLGVMMQTFFQSYIHSNLTELDLRRIIIFVILNAGKFIFMFGVPVMVVGIVANIAQTGWITTTEPIKPDLKKLNPISGFKRIFSMTTIVNLLKDLVVVAVLSVVGYKFLMSNYGDIANLNNLMVQYIPQAYLSYVISIFRIVALIMIVIAGFDFVYNRYKYKKDMKMTKHEVKEEFKQAEGDPEIKGKRRQRMREIVTRTMLSKVPDATVVITNPTHISVAIKYERGVDKAPTVVAKGADRTALRIKEIAKENNVPIMENKPLARLIFKKVEVDEQIPAEMYQTVAEILALVYKLNKKQG

SEQ ID NO: 51745 - protein, 276 aa, Clostridium acetobutylicum
MKYKLICVDMDGTVLDDEKKISNENIEAMKRAHDAGVKIAICTGRLFASALAYSDILGVKAPLIASNGGYIREKDNDNVIYESYLKNEEAKDIYHIIEKYNVSMFFNTYNTVISNKEFEENYTYNKFNDNLPKEKRVKLVYPKNMDKFLEENVGEILKCICIDKDVEKLKLLRKEIESLNRFDVVSSGEFNFEIMPKGVSKGKAVKMLAAFYNIKQDEVICIGDNENDLSMIKCAGIGIAMGNAEDSIKQIADYVTDTNNNSGVAKAIDKFIFNEE

SEQ ID NO: 51746 - protein, 432 aa, Clostridium acetobutylicum
MAKYDNKKQLRCSFCGKSQDQVKRLIAGPGVYICDECIELCSEIIADEFEETPQINVGSLPKPSEIKDYLDQYVVGQEDAKKSLSVAVYNHYKRINSNLSNNDDIELQKSNILLLGPTGCGKTFLAQTLAKFLNVPFAIADATTLTEAGYVGEDVENILLKLIQNADYDVERAEKGIIYIDEIDKIARKSENPSITRDVSGEGVQQALLKILEGTVASVPPQGGRKHPHQEFIQINTTNILFICGGAFDGVDKIIENRTRVSTIGFGASIQSKQQKDIGAILKKIMPGDLLKFGLIPEFIGRLPIIVTLNSLDQGALVKVLSEPKNALVKQYEKLLQMDNVELEFKDGALKAIASEAISRSTGARGLRAIVEDIMKDIMFDIPSREDVKKVIVTENTINTKQPELVLEEGAKAIEAPKKKEKSKTKKDIESA

SEQ ID NO: 51747 - protein, 322 aa, Clostridium acetobutylicum
MRNIKWAILGPGTIARDFAKAISEVDNNIYAVASRNIERAKKFANEYKAEKFYGDYDEMLRDENIDVVYISTPHCNHYEYIIKSLENNKHVFCEKAITVNGNQLKEIVDLANKKNLIVREAMTIYHMPLYKKLRELVDEGKIGKVKMIQVSFGSLKEYDVNNRFFSKDLAGGALLDIGTYALSFTRYFLSSQPEEILTTVKKFETGVDEQSGIILKNAEDEMAVISLTMRAKQPKRGVVAGEKAYITVENFPRADKATITYPDGSVEVVEAGETDRALVYEVQDMKACILNKDTDYTLQLSLGVMNIMDEVRSQWGIRYPFE

SEQ ID NO: 51748 - protein, 284 aa, Clostridium acetobutylicum
MKNIGVNINSCKDPDGTIRKYVEKVIKEEKKDVQVKFYDELNYFDEVCKTKPDFFIAFGGDGTILNAARNLVSCGIPIFSVNIGHLGFLSSIEFKDFKDAIHKIFKGEYFFQERTMLKCSFIKGNSKKVFYSLNEVVLYKGNMAKILKYNIDVDDKFYMGFKSDGIIISTPTGSTAYNLSAGGPIIYPNLDLISLTPICPQGPYAGTIVLDGKSNITISGIDANENVFITVDGRQPVDVKGVSFIEISKLNYKCKLLKLKDYNYFEVLRKKIILRTEECEGDKY

SEQ ID NO: 51749 - protein, 341 aa, Clostridium acetobutylicum
MKTKDKKKFGFWKKFFIVFFILIFGIGASGTAYFYSKTSKMKKTEISKKPSELGISNKTQDDLSKYSDTVNIALFGVDRRLKTDVSRSDSIMILTMDPAHKKLKLSSIMRDTYVNVDGHGMTKITHAYAYGGPQLAIKTINENFKLNIKDYVTVDFYALEKIIDKLNGVEINVQSDEVGYLNGYIDEVSKYEKVTPNHVTSSGKQLLDGRQAVAYSRIRYTAGGDFVRTERQRTVLMAVFNKLQAQGKSNMVSMFDEILPYTETNMGSIDIAKYGTKFISSDISNIDQERFPLDGYCSGVTVDNVWYLKTDLNVTSDQMRKYIFEDVKPSPKASLVNIPEK

SEQ ID NO: 51750 - protein, 976 aa, Clostridium acetobutylicum
MKFEIGNIYSGFKFESETVIDEINSKGRVFKHIKSGAVLVNLKNKDDNKVFSITFKTLPHDSTGVAHILEHSVLCGSRKFKVKEPFIEILKGSLNTYLNAATYADKTMYPVASRNKKDFMNLMDVYLDAVFYPDIYNTPEIIMQEGWHYDIKDEEDEIEYNGVVYNEMKGAYSSPISLLSRSMDEELFKGSVYGVDSGGKVENIVDLSYEEALSFHEKYYHPSNSIIYVYGDIDIEEVLEFINDNYLKDFNKKNIDADIKVNGAFSKVHEKELEYSISEGESENDKTYFGMSFVTGDALDTELSMGLELLESILLEASSSPLRRAIVEENIGKDVFGVFDSSILKNTFSIILKDSNLEDKDKFKEVVKNTLKELVKNGIDKKLINGIINAKEFALRESDFDSYPAGLVYNEKILESMLYGGDPFINLRFNDVIKNIRKYAESNYFENLIEKYILNNNYGVFITVKPKKNLEEEREEKLREKLRKFKNGLSKDDLKKLIASNRSLELRQDTPDSEENLESIPLIAIGDVKRDIETIEHKIIDENNAKIIWCPLNTRGIQYVSIYFEGKSVPQNMIPYASLLSSVIGKVNTEKYNFKELSNEAMENLGGMDFGLDVYSRPQNYEDYAPKFAVRAKSLREKLPKMFEIMEEIINHSIYDDYKRLKEIIDEIKSRMEMAIRGSGSRMASVRVGSYVSSAYKYLDTITGIDFYKFIVDISSNFEEKKEEVAANLKAASDYIFKRDNLIAAYCAEEEDYETFSKLFNDFTLKLKNNNFKLNDYKFELKKLNEAFMMSTKVQYVAKGFNFRKFNFKHNGALIVLRTIANYDYLWNSVRVKGGAYGASMSLSRNGHLAFASYRDPNLLETLKAYEEMVSFVKDFNVNSREMDKYILGTISGIDMPLSNYSKCEKVTAQYLTGIDDEYMRKERLEILDCSVEDIKDSYDILKKLNEENCICVFGSEEKIKENKELFDNVVDIFGE

SEQ ID NO: 51751 - protein, 229 aa, Clostridium acetobutylicum
MNCAIIMAAGRGSRMKVNKNKQFILIQGKPILAYTIDKFQRSPLIDEIIIVAAESEINFCMQEIVYKYKFNKVKNIVSGGSERQQSVMNGLKAVKSANIVLIHDGARPFVDNKIIENGIKYAEKYGGAACGVQPKDTIKIKSEDGFSEKTIDRSKLFCVQTPQCFKYDSILKAHINAEKEGILATDDTMIFEMSGNKVYLYDGSYENLKITTPDDLYAAETLLKKNSIQ

SEQ ID NO: 51752 - protein, 65 aa, Clostridium acetobutylicum
MPKMKTKKAAAKRFKATGTGKLKRGKAFRSHILTKKSTKTKRNLRKGGYVSETQEKTMKTLLPYL

SEQ ID NO: 51753 - protein, 1452 aa, Clostridium acetobutylicum
MKKINEIFSDYGVNGNINSAVVESVVLKKKSKRLEMKISSDKYIEIKEFERLNEFIRKRFALNDSVIEVNYVDGTDKKPIEDEIKDIIFSMSDKHPVLKSVINNSECKVENNTINFNFKIAAAEFFKSMKYDKHLQDAIKTLYGTSYNINFVDDITSEELMLQQEARDQEMLAISKQIKEAIGSGGISNSSAPKAPKETTYKREDTKEETKGKKDPRLILGRNAKFKENVIKITDITPDEGRVAIEGEISNIEAKELKSGKTLVSFDLYDGSSSMTCKSFLKPGEDGEVISRLKKAKGVRLSGIAGYSKFSGEVEMIANVILETEGIRRAKRQDNAKEKRVELHMHTKMSQMDAMTSATDLIKRAMSWGMKSIAITDHGVVQAFPEAHKLLGRDNPDMKIIYGVEAYLAPDKKPSVTNAKDQSIDTTYCVLDLETTGFSPKTEKITEIGIMKYENGKVIDKFSLFVNPEKPIPARVVEVTNITDDMVKNAETIDKVFPKMLEFIKGSVLVAHNASFDIGFLKHNAKVLGYEFDFTYLDTLSLAQAVFPQYKSYKLGRIAKNLGIKVEVAHRALDDVDTTVKVFKVMLEILKERGAKTLEDVDIYSVDEESKKEEYKKLRTYHAIILAKNYVGLKNLYKLVSYSHLNYFYKRPRILKSLYKKYSEGLILGSACSEGELFQAILLGKPDEEVEDIARDYDYLEIQPLGNDDYLIRNGQVPNKEAIKDINRKIIELGEKLNKPVVATGDVHFIDPEDEIYRRILEAGQGFKDADNQAPLYLRTTEEMLQEFSYLGREKAYEVVVTNTNKISDMCEQISPISPEKCPPHIDGCEQTIKDIAYEKAHELYGDPLPEIVQQRLDKELESIIKNGFSVMYIIAQKLVWKSNEDGYLVGSRGSVGSSFVANMTGITEVNSLPPHYRCPKCKYSDFSDYGVKNGFDLPDKTCPVCGEPLTKDGIDIPFETFLGFNGDKEPDIDLNFSGEYQAKAHRYTEVIFGKGTTFKAGTIGTIAEKTAFGYVKKYYEEKSIPVNKAEIIRISRGCTGIKRTTGQHPGGIIVVPKGREIFEFCPVQHPADDPNSDIITTHFDYHSIDQNLLKLDILGHDDPTVIRMLQDITGINPHEIPMDDKETMSLFSSTKALGVTPEQINSKVGTFGIPEFGTKFVRGMLLDTMPKTFSDLICISGLSHGTDVWLGNAKDLIDQGIVTLSEAVCTRDDIMIYLIKKGLPPNTAFKIMELVRKGKALKDPKKWAEYEALMREHEVPEWYIDSCRKIKYMFPKAHAAAYVMMAFRIAWFKVHIPKAYYAAYFSIRAKAFDAEFMIFGKEKVKQKMKEIQMMGNEAGPKDKDMYDDLEIVLEMYERGFNFLPIDIYKSHATKFLVEEDGLRPPINSISGMGNVAAEGIYNAMQEEKPISSIQDLKKRAKIGNSAIDSLRKFGCLKGLPESDQLSFFDAI

SEQ ID NO: 51754 - protein, 249 aa, Clostridium acetobutylicum
MIKTTLNIAHRGFSGKYPENTMVAFKKAIEEKCDGIETDLNMTKDGILVVCHDEKIDRTTNGCGYIKDYTYKELKQFDAGIGYGEEFKGEKILCIDELLDYIKDKNLLLNLELKNNLIEYVDIEKKVVDKIHEYKLEDNIIVSSFNHYSMVKLKEYDSTMKIGLLYSANLYNVHEYGRKLGAFSLHPYYPAVMNKEVVENIKKVKININTYTVNEEEDMRKLIGLGIEGIITNYPDRLNKVLKEAIKNS

SEQ ID NO: 51755 - protein, 485 aa, Clostridium acetobutylicum
MAANEIRTRFAPSPTGYMHIGNLRTALYTYLIAKHEDGKFILRIEDTDQERYVEDALAVIYKTLEMTGLKHDEGPDVGGPVGPYVQSERKGLYLDYAKKLVEKGEAYYCFCSKERLDILKTNSEALKRPFKYDKHCANLSKEEVQEKLDAGVPYVIRQNNPTTGSTTFDDVIYGRISVDNSELDDMILIKSDGYPTYNFANVVDDHLMGITHVVRGNEYLSSAPKYNRLYEAFGWNVPIYVHCPPIMKDAHSKLSKRNGDASFQDLIEKGYLKEAVLNYIALLGWNPEGTNEILSLEDMVKLFDYTHINKSPAVFDPVKLKWMNGEYVRKLSLDEFHKAALSYYDGVITKENIDLKKISELIQTRVEIFSDIPEMVDFFNELPDYDIEMYTHKKMKTNPEISLDSLKNCLPVIENIEDWNLDNIQNTIMNYIKDLGVKNGVVLWPLRTALSGKKFTPGGAFEIADIIGKDESIRRIKIGIEKLEK

SEQ ID NO: 51756 - protein, 200 aa, Clostridium acetobutylicum
MDKKKLDYFKNKLMFERKSLMELIEQMRKNDTIDSKMEIASELSYYDNHPSDLASEFNDIQRGMAFRKNEEALLNKIGNAIDKVEHGGYGICEVCGKPISEERLEFVPYAENCVECQNKLNDSMPREKNDRPPEEDVLGYPFYDGNIRNAFDLEDSYEKVQEFDKIEKYEEFDDDDSEDYGYVESIEKVSNSQYRDQLPD

SEQ ID NO: 51757 - protein, 344 aa, Clostridium acetobutylicum
MLDLKSYREKELASYDLDVELFNEFNFSVYNVMPLRKAFLISTDKGEKILKKIDYTIEEFKFVLAAVNYIKNENEFNRIIDFNKTQSGEYYCIKNGDLYCVMDMIEGKECEFSNPVDLSISSFGLGQLHSASEGFRYSKIASKNICGKMIKGFKRKKEEVNFLKKMVNLYESLNEFDEIFIKNVDYYLEQIDKSIDIMNKSQYYKLCSEEDKIVLCHHDLAHHNIIIKDEEAYFIDFDYAIIDLKVHDLSNIISKAAKVFNYSIDNSKIIISNYCKSNTLSKNEMEVLFGMLSFPEDFYEIVKSYYTKRKDWSNEEFINKMKRKMANEENRVEFLKNFKEDLKI

SEQ ID NO: 51758 - protein, 262 aa, Clostridium acetobutylicum
MIIDGHTHVILPVEKHIKIMDEAGVDKTILFSTSIHPETAVNLRDVKKEMKKLNDVVNGKTNSMIDVRRNSIKELTNVIQAYPSRYVGFGNVPVGLSENDTNSYIEENIVNNKLVGIGELTPASGQIKSLKPIFKYSMDSGSLPIWIHAFNPLVLQDIKEIAELCKAFPKVPVILGHMGGSNWMTAVELAKEIQNLYLDTSAYFSTFVLKIVINELPLKCIFGTDMPFGDLQLSIEAIKKMSNDSYVANAVLGDNISRLLNI

SEQ ID NO: 51759 - protein, 440 aa, Clostridium acetobutylicum
MKELSKKNTFFVGLLLFSMFFGAGNLIFPPFLGQLSGKYVWIAFSGFIITAVGLPILAVIIVSKSKGLFNLAAHVNPTFALIFTALIYLSIGPFLGIPRTGSLAFTMGVSPFLPKSLASSPIPLLIYTLIYFSIAFWLSLTPSKLVNRLGKVLTPILLVLIFIVFIKSLITPIGAFGTPKGDYSSFPFFKGFSDGYLTMDVIAALNFGIVISSTLKSMGVKSEKSIISYSIKAGLIVGAMLIIIYAMLSYVGASSRTISLNAQNGGEILTSAASHLFGHYGIIILGVIFSLACLNTATGLITSCSEYFTTLTKNKLSYKTWVFIFAFLSMLFANIGLTKILSISVPVLNAIYPMAIILMIMFLLSNLFKGSKYVYILGMSFTGIFSILDSLNQTLIKSSTINSTFNLLPLYTKGLGWIVPALIGLILGYLIHIFKKSHTA

SEQ ID NO: 51760 - protein, 359 aa, Clostridium acetobutylicum
MLERLEFIESKYDELSVKISDPSVMANQSEWQKLCKEHSEVENIVLKYREYKKAKEDLEADKEMLRDKIDAELKEMVEEEIKELEKSVVDYEEELRVMLLPKDPNDSKNVFVEIRGGTGGEEAALFAADLFRMYTRYAERQGWHTEVMSANETDIGGFKEIVFMVKGNGAYSRMKYESGTHRVQRVPNTESSGRIHTSAATVAVLPEVDDVDIEINPNDIRIDVFRASGHGGQCVNTTDSAVRITHLPTGIVVSCQDEKRQLKNKEKAMKVLRARLYEKAEAERNAGIAENRRNQVGSGDRSERIRTYNFPQGRITDHRIGLTIYKLEQFLDGDIDEVINGLITAEQAEKMKEMGNTKD

SEQ ID NO: 51761 - protein, 338 aa, Clostridium acetobutylicum
MAGKEQKLTGVQKAAILFITLGPEASASIIKKLPEREIQRITYEIANISGVKNQYKQEVLQEFIEMNKAKDYIVEGGIDYARELLAKALGNQRAKEILEKVAEETEQYRPFAIARKADAHQLLNVIMNEHPQTISLILCYLQADKAAQIMSSLPEEVQNDVAYRIANMSNTSPMVIKEIEKVLNSKLSSVVRSDLTVIGGVKTLVDILNQVDRTTEKNITEGLEKENPELAEKVKESMFVFEDVITLDDAAIQRVLREVDNKDLGMALKGCSEEVAEAIYRNQSKRASAALKEDIEFLGPVRLVDVEKAQQKIVSVIRRLDDAGEIVISRGGEDAIIL

SEQ ID NO: 51762 - protein, 447 aa, Clostridium acetobutylicum
MKQQLIIQLLFWGIWLVIPLIVDIIGGVIGAIFITVSYFRKKKLDIGYLPDITILIPIYNSENTLENCLNSVINQTYPIEKISVMLINNGKRDKAYNVFCSFQERNPRLKVWWLDSSSGKAKALNKGIYMANGKYIINIDSDGVLDKEAILKVVEKFETNPDICAMTGVVLTDPELIEETKLKNLRLIQRCELFEYIEAFLIGRGFQSQVNMMFTLAGAFSCYRREIIMKTQLYNNETLGEDTHMTSQIRELLDGKIALCEEAFFYVDPIDDLDKLYIQRQRWQRGQMEVSALFNEIANKNTKRFINVLKVTIIKDHSLVFPRFIWIFAMMYLVFLDYPLTLVVGANLILYIVYVITSTIYFFIAKLFLKEKKQIKDYVNKHWYIILLLPIYRFVVFFIRVAGIINAVEKNASWNTKTFSQEREIVDVRLKKNLSLYYRIKGWINNG

SEQ ID NO: 51763 - protein, 813 aa, Clostridium acetobutylicum
MMFGRFSDRAQKMIYYAQEEAQNFKHGYVGTEHILLGILRDENGKAQSLLANMGVTIEKVRRLIEEYEGFGDSDLYKEEPPLTPRTKRLLEISLLEARNLNHNYINPEHVLLALIRESEGVAFTILGNLGVDFERLRKEILDSLSGREENTGIKTSFSSNTSVTPTLNQYGTDLTQMALEGKLDPVIGRDNETQRILEILCRRTKNNPCLIGDPGVGKTAIAEGLAQKIVEGNIPEILKDKRVITLDVSSLVAGSKYRGEFEERLKKVMTEIKAAKNVILFIDEIHTIVGAGGAEGAIDASNILKPSLARGEIQCIGATTTEEYRRYIEKDAALERRFQPVDVGEPSKEEAVQILEGLRDKYEAHHGVKITDDAIEAAVNLSTRYIQDRFLPDKAIDLIDEAAAKVRIQNLTAPPDLKNQEEELEKTTREKSDAIRLQDFEKAAKLRDKEKKLRIAIEEFKKNWKNTSDNENYIVTQKQVAAVVAKWTSIPVEKLTEKESERLLKLESILHKRVIGQEEAVEYVSRAVRRARVGLKDPKRPIGSFIFLGPTGVGKTELSKALAEAMFGDENNIIRIDMSEYMEKHTVSRLVGSPPGYVGYDEGGQLTEKVRRKPYSVVLFDEIEKAHPDVFNILLQILDDGRLTDSKGKTVSFTNTIIIMTSNVGASTIRKQKTLGFETAKDAVRQEYDKMKENIMEELKNSFRPEFLNRIDEIVVFHKLEEKDLRQIVKLMLESVKGRLKEQNIKINFTEKAEEVLAEKGFDPTYGARPLRRTIIKAVEDKLSEEILKGTISKNDNISVDVDKDKELLFTKA

SEQ ID NO: 51764 - protein, 312 aa, Clostridium acetobutylicum
MEFNHVPVLLEETIENLNIKEDGIYVDCTLGGAGHSSEILKRLSSKGRLIGIDQDKDALKAASERLKEYKNLTFVHDNFSNIKNILEELKIDKVDGILADLGVSSYQLDEPERGFSYMNDAPLDMRMNRDSEFSAYDVINGYDEEKLYSIIKNYGEEKFAKRIAKFIVEKRSEEAINTTFELVDIIKAAIPAKFRRQGPHPAKRTFQAIRIEVNQELEILNKTIEDSVDKLKSEGRICIITFHSLEDRIVKNKYRELQDPCMCPKDIPMCVCGKKPKIKIITRKPIEASSYELEYNPRSRSAKLRVAEKINL

SEQ ID NO: 51765 - protein, 486 aa, Clostridium acetobutylicum
MNTAQNELYKKRWIILITVLSATLMATLDGSIVNVALPNMTLKLHVSGASIQWVVTSFLITVAATILIFGRLGDIIGKTKVFKFGVILFTLGSLLCGFTSSLVVLVVARVIQAIGAAATMATNQGIITQTFPPNERGRALGLLGTFVALGAMIGPPLGGLIISLASWEYIFLINIPIGIVVFILCIKVFPKTNDKLDEKLDTTGAVLFTVFTVLLFGALVQGETVGYSNIYIILAFIVSFLALAAFLIIEIKKKQPLLDLSIFSNSLFSVSVICAFTSFTAISASNIILPFYFQDTLKFSAAMTGIFMVVSPVVLSIVAPFSGYLSDKIGSEILTLIGLFLTSVGLFLISTLTAASPVALLMTYIVIMTIGNGMFQAPNNSLVMSTVPRNKLGIAGSVNALIRNLGFVVGTSFATLLLYNRMSSKMGHRVVDYIKGRDDVFMYGMKWVYIAAGVFCLMGVIITAFRFYNSKKKSKSDLDKLKDKAV

SEQ ID NO: 51766 - protein, 122 aa, Clostridium acetobutylicum
MIQAQTMLKVADNSGAKEIMCVRVLGGSKRKWGNIGDIIVASVKSATPGGVVKKGEVVKAVVVRSAKGLRRADGSYIKFDENAAVLIKDDKQPRGTRIFGPVARELRDKDFNKILSLAPEVL

SEQ ID NO: 51767 - protein, 328 aa, Clostridium acetobutylicum
MKNQWNNILSIGEKVLNGEKITADEALTLSKSNGSDIFLLCSFANKLREKFNGNHVDLCSVINAKSGNCSEDCAFCAQSAHHKANVSCYPLLNEDKILEMAKQREAYGARHCDIATSGLGYTGDEKDFQTILKAFKKMKENTNLKLCACLGTLTEKAMNSLAAVGVERYNHNLETAKSFYKNIVSTHGYDERIKTINYAKNAKMEVCSGMIVGLGETMEQRIEHALLLRDLNVDAVPVNILNPVKGTKLENAKPLSPMEIIKTFAIIRFILPDKIIRYAGGREKNLRSLQPLGFLSGLNGMLIGNYLTTNGQSVNDDFNMLKDLELEY

SEQ ID NO: 51768 - protein, 62 aa, Clostridium acetobutylicum
MKAFVDKETCIGCGTCPAICPEIFEMEDDGKAVASDAEIANDLKESAQDAAESCPVDAIMVR

SEQ ID NO: 51769 - protein, 552 aa, Clostridium acetobutylicum
MNSDKAMKGVERAPHRSLFKALGFIDEEMDRPLIGIANSYSELIPGHMNLDKIVKAVKDGIRMAGGVPVEFGTIGVCDGISMNHKGMSYSLPSRQIIADSVEIVAKAHALDGLVLVPNCDKVVPGMLMAAGRVNIPSIVISGGPMLSGRTNGRVTDLNSVFEAVGAVSAGKMSLEELAELENTACPTCGSCSGMFTANSMNCLSEVLGLALPYNGTIPAVFSERLRLAKKAGMKIVELVQKDIRPSDILTEAAFMNAVAMDMALGGSTNSLLHLPAIAYECDVDINFDKINEISEKIPHVCKLSPAGFHHIEDLHMAGGIPAVVNGIIKKGLLNGECMTVTGKTLYENVKDAKIKNIDVIRIDNPYSETGGLSVLRGNLAPDGAIVKKAAVAPEMMQHTGPARVFNSEEEVSKAILGGKINPGDVVVIRYEGPKGGPGMKEMLSPTASLAGMGLDKSVALITDGRFSGATRGASIGHVSPEAAEGGPIGLVEEGDTIEIDIEKKTINLLVPEEKLKNRKPEKVEKPVKGYLNTYRQGVSSACTGAVFHSTKE

SEQ ID NO: 51770 - protein, 253 aa, Clostridium acetobutylicum
MKVISVFNQKGGVGKTTTNINLCTYLAMKGLKVLTIDIDPQGNTTSGLGIDKSTLELSTYDALTTDVALEDIIQESQLIKNLYIAPSTVELAGAEVELINIDNRERILKNKIKAMNKKFDYIFIDCPPSLGFITINSLTASNSVLIPIQTEFYALEGVGQLVNTVQLVKKSLNKQLEVEGVILTMCDNRTKLSNEVAQEVKKYFSGKLYNTTIPRNIRLAEAPSYGLPIVLYDDKCRGAECYRNLANEFLSNQ

SEQ ID NO: 51771 - protein, 515 aa, Clostridium acetobutylicum
MSNDEKQLTKEEMKAIKLQAKEEAKMNDLLKERRQKLSDAQERGKDPFDVYKVERTHTSKQIVDNYDELEDKIVTVAGRLMSKRVHGKAGFSDIYDRYGKIQLYLKIDDVGEEKLKEFKTFDIGDFVVITGKVFKTKTGEITLHVTKLELIAKSLKPLPEKFHGLKDPDLKYRQRYVDLIINQDVRETFMKRTAIIKAVREFLDNKDYLEVETPVLSTIASGASARPFSTHHNALDLDMHLRIATELYLKRLIVGGFEKVYEIGKDFRNEGIDVRHNPEFTMIELYEAYADYNDMMEITENMVAYACQKVNGTTKITYEGTEIDLTPPWRRVTMVDIVKEHSGIDFSTVKTDEEAREIAKEKKLELKKELKDCTKGDILNALFEEYGEKKLIQPTFVCDYPVEISPLTKKKRGNPEYTERFEGFIYGREICNAYSELNDPIVQKDRFMQQLKERELGDDEAYQMDDDFINALEIGMPPTGGMGMGMDRLVMFLTDSPSIRDVILFPTMKPTPNRD

SEQ ID NO: 51772 - protein, 139 aa, Clostridium acetobutylicum
MVMSRDGLIPKALSKVHPKHNTPYVATVITGVTAAIIAGFLPLDIITNFLSIGTLLSFSVVSLAVVVLRYKMPNMERKFKCPGVPFTPIITIICCIILLTTLKPITWIAFLGWLLVGILVYIFYGSKHSSLEKEEQQIK

SEQ ID NO: 51773 - protein, 204 aa, Clostridium acetobutylicum
MNQKERMLAGLPYKAWLDGLLEERMDNKKKIYEYNHCKPDESEKIDELIKDIFGKVGVGAHIEAPFHCDYGKNIEIGDNFFANYNCIILDVGKVTIGDNVQFAPNVSLYTAGHPIHPASRNSGYEYGISITIGNNVWLGGNVVVNPGVHIGDNVVVGSGSVVTKDIPDNVIAVGNPCKVIREITEEDRKYYYKNYEFDVDDYTV

SEQ ID NO: 51774 - protein, 326 aa, Clostridium acetobutylicum
MELFSEIYSCYYNAVTQIVNSCIETPISKEAIKKFIDDNAFSESSFHILPKLLTGDWNLLRKDNDKYISKLNSSIKNPVTKLQKSWLKSILHDKRIKLFLDKAELETLYKSLSDVEPLFDINDFYYFDIFSDGDNYNDPIYIDNFRFILNALKNKKAITVSFKSGRGIHTNGNFFPIKIEYSSKDDKFRLHCFSINARKSLTPQVINIGRISSVKLYKSTLNFYLDTSIYEKITRCTEPVVIEISNERNALERCMLNFSDFEKYTEYNKTSNKYITHIYYNKNDETELLIRILSFGPVIKVLGPEKFLNSLTKRLKKQLELINIAD

SEQ ID NO: 51775 - protein, 458 aa, Clostridium acetobutylicum
MKKLVAITSCPTGIAHTYMAAEALQMAAEEMGHKIKVETQGSVGAENVITTSDVNDADAVIIAADTNVDKSRFAGKVLIEVPVKDAIKDPKGLINTALSSNKIYGNSNEKSKVEEKREDKGRASGVYKHLMTGVSFMIPFVVAGGILIALGFAIGGIYVFKTPGTIGETIFSTGKQAFALMLPVLAGYISFSIADRPGLVPGFVGGALASTIGAGFIGALLAGFIAGYFVVLLKKYIKLPKALDSLMPVLIIPVLSTLFIALVMMFILGDPVKAINNGLTGFLKGLSGANAAVLGIVLGCMMAFDMGGPFNKAAYVFATGTITTTGTTIMAATMAAGMVPPLAIALATVIGKKKFNEQEREAGKAAWALGLSFITEGAIPFAAADPLRVIPSMMAGSAVTGALSMIFGSRLAVPHGGVWVLFIPHVVTNLGGYIISILVGMVVSALLLVALKKDIVRK

SEQ ID NO: 51776 - protein, 492 aa, Clostridium acetobutylicum
MKNVIKINEKDNVVVALNDLNKGDVIEIDGKVITAEEPVKKGHKIAITDIQKNSNIYKYGFPIGHALEEIKKGQWVHTHNIKTNLDGIKDYEYNKQTFENPFKNENLTFKGYRREDGTVGIRNELWIVPTVGCVNGTADLIAERFKSETEFKDVHVFKHNFGCSQLGDDHNNTRTILGNIVKHPNAGGVLVLGLGCENNTMESFKESLHSYNKERVRFLIAQDVEDEISSGCELLKELYEKIQKDEREEVSISELKIGLKCGASDGFSGITANPLLGKLSDFLIAQGGTTILTEVPEMFGAETILMNRAKDEKVFAKTVNLINDFKKYFMSYNQPVYENPSPGNKAGGITTLEDKSLGCTQKSGSSEVVGVLKYGETLENKGLNLLSAPGNDLVASTALASAGCHMVLFTTGRGTPFGTFVPTVKISTNSDIYNKKKNWIDFNAGALLENQSMDQVLKEFINYLLGVANGNMANNEKNNIREISIFKNGVTL

SEQ ID NO: 51777 - protein, 661 aa, Clostridium acetobutylicum
MKKKYRGFYDQNLSYIFISLILIILMFVYGHYRDAILALIVTLFFIGYDVEKLRLKKDEWKNFIEDFSSSSDIAARNILINLPFPVIIVSEKGNVLWYNQSISNVFNDDILGNNLSSVIQDKDLSNLLSKDNKPCKNFKIKEKYYDIYSSRMKIFEKNKEIFLIYFYDVTDRHEFEEEISNCKTSVLLVEVDNLDEVVKSTPEDKKPLLKAQIETVIISYAKHINAMFKKYSTGKYVLVIQDKQLKKEVEKRFEILDQIREIDMQNSLAVTLSIGIGKSGNTPIENYNYAVLAKELALGRGGDQVVIKDGEQLLFYGGNTKEVEKRTKVRARVIGQSLVELVKESTNVFIMGHVNPDIDCIGGAIGLYSVLSSKVDGDVHIVLDDTSSSVEGIVNRLVENYDEYKNVFMRSSDCIELIDQGSILILDDVNSRNYVLSEKILEEISKVVVIDHHRRAANYIKDTILSYIESYASSTSELVTEMIQYMDENHKLKPIEAEALLAGIVVDTKNFSFKTGVRTFEAAAFLRKNGADTIEIKKLFSNDLENYIKKSEIIKSARVFHGNIAIAICPKEIDSNIMAAQAADELLNITGMKASFVLVKIKNNILISGRSFGDINVQVVLEALGGGGHITMAGAKVKASSTEDVLNSLVKAIDKYLEEGE

SEQ ID NO: 51778 - protein, 340 aa, Clostridium acetobutylicum
MEKLLEIKNLNTSFFTHLGEVKSVRGISFELNKGEALGIVGESGSGKSVTMMSVMGLLQENGKIVEGEIIFNGMNITHAPEKEMEKIRGNKIGMIFQDPMTSLNPVLTIGNQIAEGIKKHLNMNTSEAIKRAIEMLKLVGIPSPEKRMKQYPHEFSGGMRQRVMIAMAIACKPELLIADEPTTALDVTIQAQILELMKKLKEKMNTSIILITHDLGVVANLCSKINVMYGGLIVEKGDAREIFYNPKHPYTLGLLKSIPDPTKDSKEKLVPIDGYPPDLLNPPKGCPFAARCPYTMEICMEMPVPSFKIGENHEAACWLNHPDAPKVNPINERREDNATR

SEQ ID NO: 51779 - protein, 330 aa, Clostridium acetobutylicum
MLNSAVLITIIIVILAISFDFLNGFHDSANAIATSVSTRVLSMKSAVIMSAILNFLGAFMSDKVAKTVGDGIIDPSKIVPSVIIVALIAAIIWNLITWYLGIPSSSSHALIGGLIGAAVMYKTSFGVVNWIGFFNKIVLWLFLSPVIGFVVGYIFMILIEWLFHRSKPAFVSRVFSKAQIVSAMLMALNHGGNDAQKSMGVITMALMSSGLLSSFTVPAWVKAACAIAMAFGTSFGGYRIIKTMGMNMAKLAPVNGFAAETGAAAVIFSATMFHAPVSTTQIISTSIMGVAASKRISSVRWMVAKDILIAWIITMPVCAGIAALLALFIR

SEQ ID NO: 51780 - protein, 318 aa, Clostridium acetobutylicum
MIDKHGRNIDYLRISVTDRCNLRCIYCMPKMKGYIQENNKISCSDIFKLLRAAVSVGINKVRYTGGEPLLNEEISKIIYETSKLPQINDIAITTNGILLPQMAKDLKKAGLKRVNISLDTLKSDTFTKITNFNQITKVIDGIDTCLKLNLKPVKINTVLIKGINDLEVNDFVNLSREMPVEIRFIELMPIGEGAKIYEKGRVNIKELLMSRSDLIPIESLQNSTANMYKIKGGKGRIGYITPISCKFCSTCNKIRLTSMGTIKPCLHSNQEIDLKPYLNNEDVLVEKLKTIIFNKTFQHHINEENISRSKKMMYQIGG

SEQ ID NO: 51781 - protein, 233 aa, Clostridium acetobutylicum
MSVISMKQLLEAGVHFGHQTRRWNPKMAPYIFTERNGIYIIDLQKTVKKIDEAYNFIREVSEQGKDILFVGTKKQAQEAIAEESVRAGMHFVNNRWLGGMLTNFNTIKTRIAKLNGLKKMEEDGTFDVLPKKEVIILRNEEEKLVKNLGGIVNMTQSNIGALFVVDPRKEKNAISEAKILGIPVVAIVDTNCDPDEVDYVIPGNDDAIRAVRLITSKIADAIIEGRQGEQLAE

SEQ ID NO: 51782 - protein, 102 aa, Clostridium acetobutylicum
MAKQKIRIRLKAFDHTILDQSAEKIVETAKTTGAKVAGPVPLPTEKDVVTILRSPHKYKDSREQFEIRTHKRLIDIISPSPKTVDALMRLDLPAGVDIEIKL

SEQ ID NO: 51783 - protein, 178 aa, Clostridium acetobutylicum
MNNVVLMVVDAQNGLIKKKPYNHKNVIENIKKLIIMARANNKEVVYVRHDDGEGTELEKGTEGWQIYSELEPKSGEFIIEKKYNSAFHRTDLKEYLESKNTDTIILVGLQTEYCIDATLKSAFDNEYKVIIPKDTNTTFDNEYLSGEKLYKFYNYKIWNKRFARVISMEDTLNRFIID

SEQ ID NO: 51784 - protein, 442 aa, Clostridium acetobutylicum
MEAPLRAMPQNLEAEQSVLGSMISDKNCIAQAAESLRGEDFYRQNHQIIFNAMLELFQKDIPVDLITLLEHLKSTDKLEASGGITYVTQIRDSIASTANIQSYIKIVKDKAVLRKLIKSSTDIIEESYSKQDDVEKVLDSAEKRIFDIAENKVTSDFEAMNVVLERGFEQIEKLYNNKGEITGIPSGFPELDDKTSGFQKGDMVLIAARPSMGKTTFALNIAEYAALRAGKSVVIFSLEMSKEQLAYKLLCSEANVDMLKLRTGNLEDEDWDNIARASGPLADAKIFIDDTAGVSVMEMRSKCRRLKIEHGIDLIVIDYLQLMSGNGESRQQEVSEISRSIKALAKEIGCPVIALSQLSRAPEQRNDHRPMLSDLRESGSIEQDADLVMFLYRDEYYNKETEQKNVAECIIAKQRNGPTGTVNLAWLGQYSKFGRLDVIHQE

SEQ ID NO: 51785 - protein, 305 aa, Clostridium acetobutylicum
MDYFQDFIAALSNFIKKDNLKIDVPMKNHTSFKVGGPVDVLVMPEKYEEINRIIELCEKYDVNYYIIGNGSNLLVRDGGLRGVAIKLLKLNKLQIGNNKIIAGCGVPLGYLSRKARDKSLTGLEFACGIPGSVGGAVAMNAGAYNGEISNVVESVLVIDNKGKMKRLYRDELQFGYRSSAILKHKYIALEVTFTLQKGDREKIANRIDDLMRRRIEKQPLEYPSAGSTFKRPVGHFAAKLIEDSGLKGKGIGGAQVSDKHSGFIINKNDATAKDILDLIKFVQNTVKSKFNVELDTEVRIIGEDK

SEQ ID NO: 51786 - protein, 380 aa, Clostridium acetobutylicum
MKQEMLSFLSTIDSALYDLTRYLYDNPEESFHEYKSYSYITKLLESYNFTNIKNYLDINTAFLSQFGEGHPKICFICEYDADVNYGHIYGYNAKTTISVAAALMLSHVIPKVGGSVILLGCPGEFKRGSKTTMFKQGTFEDMDAVLTVQPHTVTAESGTSIASLPLSLILSKTNNLTNTNDSSSSFNTALIIFNTLNHLINISQYKSCIDNLSLSSLVNSESKSSEITFTLKSSSSENILGKQDKIKEFIMGLCNLVSIESELHIKDTPCKELISNATLSRLFSHNLKESEIININGVKNLSSCLSLGIVSHEIPCIHPYVSLTKDSSIKYGTKAFSDETITPYAHNIIMKSSKALALTALDLIENNSLLFEAKSELNHK

SEQ ID NO: 51787 - protein, 765 aa, Clostridium acetobutylicum
MVTIKINNNVHIILEVIYLPRNKQYKKNKQDKISETTLNSDIAGISIFAFGAFAAVSMFFTSFTGIIGNGMKKLLFTLVGIGAYIFPILLMFIGVCYLIKKGKITFSKRFYGVNIIIINTLMLIQMQKLSLYYNGNILDGIKKIYESSDTFHGGVISYILDVPIYKLFGKGYFVLFITLYIISFLLVSEKSAGEIIRENLKKKPLKKTKPSVDETKTMDYENDNKDKDETLAKKISSKIKIVDFMKNEGNVDSNKGQALEEIAVYDSAEKNENESKVIGAELEDAIGQTSSNNSDITYEFPPISLLNVNETSKLKKSDKKELLSSAEKLTETLNSFGVDAKVIQVSKGPSVTRYELQPSAGVKVSKIINLSDDIALNLAASGVRIEAPIPGKSAIGIEVPNKDLTAVFLSEVIQSETFSNSKSNLAFALGKDIGGNCVVTDLTKMPHLLIAGATGSGKSVCINTLIISLLYKCAPTDVKLLMIDPKVVELSVYNGIPHLLIPVVTNPKKAAGALNWAVNEMTKRYKLFAENNVRNIEGYNDLYTKNKVESKLPWIVIIIDELADLMMVCPNDVEDYIGRLAQMARAAGMHLVIATQRPSVDVITGVIKANIPSRISFAVSSQIDSRTILDTSGAEKLLGKGDMLFNPVGESKPIRIQGAFINEEEVERVVGFIRNESTETQYKEEIIEQINSNVSKSEGDEDELLEEALKIIIETKQASTSLIQRKLRIGYNRAARIMDQLEEKGYISAKDGTKPRNILVDKDDL

SEQ ID NO: 51788 - protein, 192 aa, Clostridium acetobutylicum
MIRFQKRMAIFFLTISILIICGDIEKIISFGIEFDDILCNLFFIGLGIIGFRIYRWYKRQIKKYTELLKEDRLDKIEYIIYDIERVRGVVYNTAFYIDGVKCKLRFPQYKCKDNDNYEYYLEPIYKKNGEFKDFIAYADKKNDYKKSIESTNEITECEEKAEKKRKRKRLNEYVNSRMELAKKYEEEAKNKM

SEQ ID NO: 51789 - protein, 563 aa, Clostridium acetobutylicum
MDYKKVIAERINKIVDMDVEALYKIIEIPPKKDMGDFALPCFQFAKVLRKAPNAIAEEVCKKIDQSGFEKVENLGPYINFFVDKADFAKETIESVLSERDNYGRSKVGEGKKVLIEYSSPNIAKPFHVGHLFGTVLGSSLYKIFSMEGYDCVRINHLGDWGTQFGKLISAYKRWCDEDALYKDPIKELLRIYVKFHKEAEKDPLLEDEGRMYFKRLEDGEKEEVELWTKFKDLSLREFKKVYNQIGVEFDSYTGESFYSDKIDAIEEELNEKGLLTESNGAKVVMLDEYNMPPCIIKKADGASIYATRDLAAAEYRKKTYNFDKSIYVVGLEQSLHFKQFLKTLELAGHEWSKDCIHVGYGLVRFAEGKLSTRNGDVIFLEDLLKESVQKTSEIIEEKNPELDNKEEVSRKVGIGAVIFTYLKNGRERDIIFDWKEMLSFEGETGPYVQYSYARAKSILRKLGEVKGNVSYDKLVSAEEFDLIKQLKGFNGAILNAIDRLEPSVITRYVIEVAKAFNKFYNAYNISNTSDEELKNARLALVEAASIVIKNALSLIGIDVVEEM

SEQ ID NO: 51790 - protein, 632 aa, Clostridium acetobutylicum
MNLITLENISKSYGEKTLLNKISLSISEGEKIGLIGINGTGKSTLLKILCGIQEYDSGNIITSNSLSMSYLSQNENFYDNATVLEQIFQGNSKEMNLLREYETALENSAMHPDDEKVQKTLLNLTEQMDALDLWNIESNAKTILTKLGIKNFNAKIKTLSGGQKKRICLAQTLITPSNLLVLDEPTNHLDNETIEWLEQYLTSTKSSVFMITHDRYFLDRISNKIFELYNGNLYSYVGNYSVYLEKKLEREQLEISSKQKKDNLLRRELAWIRRGAKARSTKQKARIQRFDELNSQDDTIIQDKIEISTSGSRLGKKVIEIKNLNKSFNGTEFIKNFSFIFSKGDRIGIVGHNGIGKSTLLNIICGKTSPDSGTIDLGATVKIGYFSQDSSNMNENLRVIDYIKEGAEFIRDSNNELISASKMLEKFLFSSEMQWTPILKLSGGERRRLYLLRILMEAPNVLILDEPTNDLDIQTLTILEDYLQYFEGTILTVSHDRYFLDKLANKLLIFKGNGVIDYNTGNYSDYLEKSKSEEKLEMANTPTKNKVKSEKPKSTKLKFSFKEQMEYEKIDSVIEAAENELTSIEAKINSAGSDYMLLEDLMPQKKELEEKLQTLYDRWEYLNELAERIKNS

SEQ ID NO: 51791 - protein, 281 aa, Clostridium acetobutylicum
MGISLIQAAIFGLFACLSSMPGMGGTTFGNYTLGRPLVAGLLVGIVLGDVQTGIIVGAAIQVVYIALVTPGGTVSADVRAVSYIGIPLAVVAIKGMGLNPSSAQATQMATALGAAVGTLGTVLFYGTATINLIWQHIGWKSIEKGDFKKLYLVNMGLPWVSHIICSFIPAFIITRMGSSMVKIMKVALPMNGIPMKTLFTVGSLLPAVGIAILLKQVVLKPSDFITFFLGFTLAAVMKVNLIGAAIIGIFFAIINYRIRMLQLEKPSAAKATGNDDDEEDI

SEQ ID NO: 51792 - protein, 526 aa, Clostridium acetobutylicum
MSELVSEIEKRRTFAIISHPDAGKTTLTEKLLLYGGAIRLAGSVKARKASKHAVSDWMEIEKQRGISVTSSVMQFNYEGYCINILDTPGHQDFSEDTYRTLMAADSAVMVIDAAKGIEAQTKKLFHVCSLRGIPIFTFVNKMDRESRDPFELLQEIETELGIKSYPINWPIGAGKDFKGVYDRRKKAVHVFNGGNHGQTEVEDVEGDVNDPSLGELLGEALQEKLAEDIELLDIAGDEFDIEKVRQGEITPVFFGSALTNFGVKPFLEEFLKLTTPPTPRNSDKGEINVFENDFSAFIFKIQANMNKAHRDRIAFMRICSGKFEKGMEVNHVQKGNTVKLTQPQQFLAQDREIINEAYAGDIIGVFDPGIFNIGDTLCKSSDKFRFEGIPIFAPEHFARVRTVDTMKRKQFIKGITQIAQEGAIQVFKEVNIGIEELIVGVVGVLQFEVLQYRLENEYNVDIKMDRLPFKYIRWIEKGDAENLTLTSDTKIVKDVNERSLLLFQSEWSISWAIEHNEGLVLSDISK

SEQ ID NO: 51793 - protein, 233 aa, Clostridium acetobutylicum
MLEALKQEVLEANLMLPKYGLVVFTWGNVSGIDREKGLIVIKPSGVEYDQMKASDMVVVDLNGKVVEGDLNPSSDTPTHIVLYKEFSDIKGIVHTHSPWATSFAQAGVSIPAAGTTHGDYFYGNIPVTSRMTKEEIATDYEKQTGDVIVRTFRKENINPNDVPAVLVNDHAPFTWGTDPKNAVHNSVVLEEVAKMTYHSLQLNPHNIEMSQDLLDKHFKRKHGANAYYGQKTK

SEQ ID NO: 51794 - protein, 479 aa, Clostridium acetobutylicum
MGKVTGFKEYDREESPSRPIDERIKDYKDVHMGLDKEKLKIQGARCMECGTPFCSWGCPLGNLMPDFNDMVYKGEWKKAYERISLTSCFPEFTGRICPALCEGSCTLSYNSDAVSIKEIELGIIEEAFKNGWVKPKIPKVRTGKRIAVIGSGPAGLSAAEELNSVGHSVVVFERADKVGGLLRYGIPDFKLEKHVIDRRIDVMEKSGIEFKTSTNVGFDVSAEELLNDFDVVLLTGGSTIPRDLKVEGRENIKGVHFAVDYLKQQNMRNAGMEIKEEEITAKDKVVVVIGGGDTGSDCIGTAIRQGAKKVYQYEIMDKPPAQRDETMPWPLFPRVFKTTTSHEEGCERLFGVSTKKLEGKDGKLELLKGVQVKWEKDENGKMSMKEIEGSEFEKKVDLILIAMGFVHPQHKGIVEDLQLKLDSRGNVFTDENFMTSRENVFAAGDMRRGQSLVVWAMHEGRQSAKEIDKYLMGETSLRG

SEQ ID NO: 51795 - protein, 322 aa, Clostridium acetobutylicum
MLRYIVKRLLQMIPILIGVSIVIFIIFSLAPGDIVDNMGVNSHMTTAKASQLRHLYHLDKSKPLQYLYWIKDAASGNFGYSLEYRQPVSTVIKSYIWNSFILSFMSFIAAIVLAIPIGIVSATKQYSAFDSIFTVIALIGISIPAFFMGLLLIKWFCIDFKIFPVSGMTTSGSNAAGIKKFGDILYHMFLPFLVLTFESVASLMRYMRTSMLEVIRQDYIRTARAKGLKEKVVIYKHALRNSLIPVITILGMWLPGLFCGAIITEQIFSWPGIGRVTLQAVSHRDYPLLMGFTMLIAVLTLLGNLVADVAYAVVDPRIRLEH

SEQ ID NO: 51796 - protein, 146 aa, Clostridium acetobutylicum
MKLHELKPAAGSRKAPKRVGRGTGSGLGRNAGKGEKGQNARSGGGVRPGFEGGQMPLYRRLPKRGFTNIFAKTITAVNVDRLNIFEDGTEVTIDALIEKGIIKKVNDGVKILGNGELKKKLVVKVNKYSKSAAEKIEAAGGKAEVI

SEQ ID NO: 51797 - protein, 299 aa, Clostridium acetobutylicum
MKNHKKLITLSILLLILISLIAVYNIKKYTKPKSEGIFYKVESNGNSLYLGGTIHIGKNEPIKFSKAVENAYEKSTTLVVETDITNTSTIRKYGKDVTYSSGDNLYKHITPAAKKHIEPIMKKLNLNLDTYKNDTLGYLYSTILNSELLSDDANSYGFDYYFLKRAKNDNKKIVALEDAKTQAAAINAGGDAYQNYQLENMLYPDDAKKAFNTQYNAVLNGDVNYFEKYDFGKNSNNKAVRDYYNSLILQRNINMYNKIKSYISSGKKYFIVVGTGHVLGPDGLVKMLKKDGFTVTRLK

SEQ ID NO: 51798 - protein, 456 aa, Clostridium acetobutylicum
MYKCALILAAGKGKRMKSDLPKVLHKVCDKEMVNHVIDTMRKSELQDVNVVIGKGAELVREATSKKNISYSLQSEQLGTGHAVKCAEDFLRGKDGVVAIFTGDAPLITEDTVKNLIDFHEKGGYKATIITALIDNPEGYGRIIRNVDGSVKKIVEHKDCTEDELKVKEINSAMYCFDIKSLLESLDKLNNNNVQGEYYLTDVIGILEEEGAKIGAISVPFEEILGVNSRLQLCQVGKVMQKRINEKHMENGSTLIDPDNTYIGADVEIESDTIIYPGNVLQGKTVIKTGCVLYPNSRIEDSVIGKNVTVQSSVILESKVGEDTTVGPFAYIRPESNIGNKVRIGDFVEIKKSTIGNNTKVSHLTYIGDAEVGEGCNFGCGTVVVNYDGKDKHKTVIGNKSFIGCNTNLVSPVTVEDNTYIAAGSTITNKVPEGSLAIARAKQVVKEGWVDKKGLLK

SEQ ID NO: 51799 - protein, 276 aa, Clostridium acetobutylicum
MKEFNTRQIVEKYNFRFSKRLGQNFLTDNTVLDDIVENAEIQKDDFIIEIGPGVGTLTRRLLEKAKKVCAIELDESLIPIITNEMKEYDNFTLIHNDALKVDFNNIIGEEQSVKLVANLPYYVTTPIISKLLNEGYNFKSLTIMIQKEVGDRIAAKPSTKDYGALTLLVQYYCDVKVVRVVKPSCFIPQPKVDSLVIRLDKLEKPRVQVKDEKLFFNVIRSAFNMRRKTLWNAMKGLKLSSEDLEKAFEAAGIDSKRRGETLSIEEFGKLSDEIYR

SEQ ID NO: 51800 - protein, 306 aa, Clostridium acetobutylicum
MISASAVKELRERTGAGMMACKKALSEANGDSEKAVEILREKGLAAAAKKAGRVASEGLVVAYVNEDGKSGAIAEVNCETDFVSANEDFKALAENIVKLAAKSNSNTVEELLEENYVDGSSKLKDVITALIAKLGENINLRRFTKFSNENGTIQSYIHGDGRIGVLVNLNADKISDEVHTLAKDICMQIAAANPLYLDETSVDQTALDKEREIYKVQALNEGKPEKIVEKMVEGRIKKYLKEVCLLDQVWVRDSDLTISKLVAKKSKELSAAISIADFVRFERGEGIEKKEENFAEEVQKQMQQSK

SEQ ID NO: 51801 - protein, 198 aa, Clostridium acetobutylicum
MIIVIITVMVSFLCGSIPTGYLITKKLSGIDVRTKGSGNIGSTNVKRVAGTKISMITQVMDILKGIIPVLLCMLIASKIKLPISTSMYLSIIVIAVILGHDYTPFLGFNGGKGVNTTVGAFFLLAPAAVLAGAVVYFVLRLFTKIVSIKSIAVGITMPIACIALRLPIEITVCAIIACGLLILRHKDNLIRLVNNEEK

SEQ ID NO: 51802 - protein, 669 aa, Clostridium acetobutylicum
MNEKESNILRMQELIEELNKYSYSYYVLDNPIVADKEYDKRYDELVELEEKTGITYPYSPTNRVGDVILKQFQKYTHKSRLWSLDKAQSFEEIIDWHNRNKKAVAEYNSNHEDKLPELKYVLTKKFDGLTINCTYDESGVMIKAATRGTGVIGEDITSQAKTIKSIPLKIKNGSVVEVHGEAIMTKTAFNEYNKKAEVPLKNLRNGAAGALRNLNVRETARRNLSAFFYDVGYNEGKAFKSYMEMMNFIKEMGFPVDEYLKECNTIEEINKEIQYVGDIRSSLDYDIDGVVIVIDDYRTREYLGYTVKFPKWAIAYKFEAEEATTKLLDVEWNVGRSGRVSPTAILEPVELAGVIVKRATLNNMDDIGRKKVKIGSRVFVRRSNDVIPEIMGVTEETEGETNEIEAPTICPYCGSEIVKEGVHLFCENTLSCKPQMVKSIVHFASREAMNIEGFSEKTAEQLFEKLNIKSISDLYRITKEELMSLDKFKDKKASNLINAIEKSKKCDLASFVYSLGIPNVGKKTATDLCKQFKSFENIKKASYDELILVQDIGSIVAESIVEFFKQEKIEKSLNELFELGVTPFYEESEVVENAFTGKTVVATGTLQNYSRTAIKEKLESLGANVAGSVSKKTDYVIAGENAGSKYDKAVQLGVKILTEEEFEQLINNM

SEQ ID NO: 51803 - protein, 941 aa, Clostridium acetobutylicum
MRNKTKMTNSKSFSEKFDKKMKKSRLIESGVILFLLVCVAGLTFLLNRNLHKQVQTVQTTKPIIALVNEDQPQTFNGTNYNFGETFVNLVSNDNKYNWQVLSRSVANKAYADGSVDAVIYLPQNFTHNILTLQALNPQKAELDYKVLASKSQLNNKLLQDKIVNVLYDFNTSIVKMYYASVAGNVANAQTNMGNVVKSQGTLLSSLNDNVYGPFQTTNESYSSVVSIANGLKSENDSWIQEQNSFTNSVVNLLNESSSSFNGMLPNLTNYFDTQRKITDINLTNANQGITNQANSDKSYYYDQYTAAYNKAVQAVQQFHNTDASGNETGVYAKLKNQISSYNTLISGVHDNIGTQIDSLTGKQTTLLNLEKDMYLRFYGQDISPTPDKTDFTSLETADNARSAMAKMIATSFGKRDNISGTAYPKTINNLLSNLSVNVGDYDTLLATLVKNGSLTPQQKDTYEAKLGVLKNYATAFGIKTATADFSAAPTVNNSNENFTKQITITVPKATEYTLKLQASNGLSNSGISIVGKPTGTGAIVNPDNSVTLDNRTTSITDSKGNVTTAPTTSPMTYVVTYKVDLGQAASGTVTASVDNGSGGTDSSVENFGLIPANAISEYAGGSQFGYISTLLNNIDTASSLITFLYGAPGATYSDIKSCTKVSDFQEASQQSIFKMYGNMDVTQIMSRLSDDDVKQFMNYGKANIKNVTDTLTTLNSNIASIQKEKATLSDNLPSNYFSQVSSDLQAWYNQTMDTLNAEYKAWTTNNTILLQEKPWKEYNQNDLVLCYDKEGGDSLYSTISDMVNSTAKQAEDTAASAQIIKSNAAEFDQMVDTVTKTQNDAKKVIDNTNNLLSTGNDDFKNSQNYYKNFAATLSNTRTDGVKADNIFNFFAKPLSTKDITPKLANITKDFDWRWVVIFVIGLLVGALGKTWIRHKPKFEEK

SEQ ID NO: 51804 - protein, 123 aa, Clostridium acetobutylicum
MARIAGIDLPKEKRVEIGLTYIYGIGLTSSRKIIKATSVNPETRVKDLTEEEVNALRDYINKNFKIEGDLRREVALNIKRLVEIGCYRGIRHRRGLPVRGQKTKTNARTRKGPKKAVASKKKK

SEQ ID NO: 51805 - protein, 1171 aa, Clostridium acetobutylicum
MRLDGLMHPLKGSNKFQDAIYKIKSNEFPMELSGISESGKSYLISGLYEELDNPFLVITDSDSEAKKIYEDLLFYTQSVYYLPTKEVVFYNIYAVSGDLRWERLKVIRKMMSRGKKIIVTSVENLAAVYLPVELYKEYTFKLTLGDTVEAKELQKKLVQCGYEHVESVDAKGQFSIRGGIVDIYSPIDDVPYRIEFFGDEIESIRSFNTESQRSIEKVNKIEVFPAKEIILTDEALNKGYEAIKDELNQSLDRLKGNNEESYNKLKETMEYNLEALKERAGFETIDTFIPYFYDNTSSFFDYLKNSIIFVDNYERCKGKIDSVYCEFEQNYENFLERGDILPKQGNIIVSKENIYEILKTEKRINLESIGRAANNNFRTGIAFEEITLSSYQGQMDLLINDIKELKEEKYRTVILCGTKSKGQRLVETLGDRGIESVYKDSILNVDYGEVVISPGSQLRGFRYPEIRLCVISDKEIFGTAKKKKEKRKNKKGVGKIKSFTELKPGDYIVHVNHGIGVFKGIKQLEVQGHKKDYLELSYAVDDKLYVPVEQLDLVQKYIGSEGKVPKVNKLGSSEWTKAKNKVRKSINEIAEELVKLYAVRTTVNGFKYSKDTVWQKQFEEEFPYNETQDQLLAIDEIKNDMESGKVMDRLICGDVGYGKTEVAIRAAFKTVMDGKQVAFLVPTTILAEQHYNNFKKRFKDFPVEVDMVSRFRSQAQQKATFKALKEGNIDIIIGTHRILNKEITFKDLGLLIIDEEQRFGVSHKEKLKKFKKNIDVLTLSATPIPRTLHMSLTGVRDISVIETPPEERYPVQTYVVEYNDQLIRDAIMREIGRDGQVFFVYNKVESIKEMAANLGKLIPEARIAIAHGQMSERELEKVMIDFMEGNYDILLCTTIIETGIDIQNVNTLIIYNADKMGLSQLYQLRGRVGRTNRMAYAYFTYKKDKILTEVAEKRLKAIKEFTQLGSGFKIAMRDLEIRGAGNIMGSAQHGHMATIGYDLYCRMLEDTIKEIKGEIQNEPVETTVDLKVDAYIPSLYIEDETLKISIYKKIAAIDSYEEMMDVKEELEDRFSSIPQSVNNLMTIAYLRSIGRQLGILEIKDKMTQLEIKFESNDRVNKKLINGLLKNYSKSILFKMGDNPVILYNLKDVKREDMLENLQKFLKYMKSLVETN

SEQ ID NO: 51806 - protein, 279 aa, Clostridium acetobutylicum
MKKFKEYLYITLGFLIVAASVKFFFEPNNIAGGGVTGFAIIINEFFKTLSVGLITFVLNAVLFAVAMIFIDGNFGIKTLYSSFGLSVSLWIMDKYIVCPPLTKNLLLATLFGTLISGIGMGICFNQNASTGGTDILAKMMNKFFHMDIGKALLLVDFVITLFAGFTLGADLGMYSLLSVIIGGFVIDNVIEGLNICKKIMVISDKNDAISEFIIKELERGCTIIDGKGGYTGKDTYILYTVLNRKEFIRLRIFIKETDPNAFITISDAKEVLGEGFKEI

SEQ ID NO: 51807 - protein, 1507 aa, Clostridium acetobutylicum
MTRNIGYPEKQGLYDPAFEKDNCGIGFITSIKGEKSHDIVKKGIEILVNLTHRGAVGADTKTGDGAGIMLQIPDEFFRINCDNLGIELPESGKYAVGMIFLPKETALSYQCEGILERAVEEQGQKVLGWRVVPRDNRSIGETAKGSEPVIKQIFIGSNCENQTDFERNLYIIRKRAESEVKRLVERGSEYFYICSLSSRTIVYKGLLLADQIKSFYMDLNDINFKSAIALVHQRYSTNTFPTWDLAQPFRFLAHNGEINTIRGNRNWMNAREGVLKSDVFGKKISDLFPIVNPKGSDSTSLDNTFELLVADGRPLAQALMMLIPEAWENNESMETWKRAFYEYQGTLIEPWDGPAAVAFTDGQQVGAVLDRNGLRPARYLITKNNIAVLASEAGVLKFEPEEIAYKGRLKPGKMFLIDTKEGRIIDDEEIKKSICLDKEYEKIVEKNKFTLDDFEATVGEEVVNDEVLKEKQQAFGYTLEDLRVILGPMAATGKEPLGSMGNDAPLAVLSNKSQLLFAYFKQLFAQVTNPPIDPIREEMVTSLVNYIGSQGNILNKDTEAVPFIEINSPILTDLEMEKIKNLRNKDFKTTTIPITFKYDTGIDGFKEALEKICERASKRIEEGFNVIVLSDKHIDSYEAAIPSLLALSAVQHHLIKEKTRTKVSIVVETGEARETMHFALLVGYGATAVNPYIAFESIRQIVREKDIEVESQEKAIENYIYAINHGILKILSKMGISTLRSYHGAEIFEAVGLSSKLVSEYFEGTPSRIEGIGIDEVAKEVLNRYKNAFNKIRKPVSVLSVGGQYSWRKNGEYHLFNPDTIYRLQVSARTGNYKMFKEYSHIINDQDKNLCTIRGLFEFKDLKPIPLEEVEPVNEILKRFSSGAMSFGSISKEAHETIAIAMNRIGGKSNSGEGGEDNERYKADANGDLRRSAIKQIASARFGVTAEYLVNADELQIKMAQGAKPGEGGQLPGRKVDVNIAKVRHSTPGIDLISPPPHHDIYSIEDLAQLIFDLKCVNPSSRISVKLVSEVGVGTVAAGVAKAHADSILISGHDGGTGASPISSIKHAGIPWELGLSEAQQVLLLNNLRSRVVLQTDGQLKTGRDVVIAALLGAEEFVFASTILVSLGCVMLRNCHLNTCEMGIATQDPELRKRFKGKPEYVINFLTFIAQEVREYMAQLGFRTINEMVGRVDKIQAKNAVSHWKAKGIDLSKILYKPDMPKRIKPYCTVAQEHGLDRIMDYKLIQIAKDALNSKKSVVGNFEIKNVDRSVGAMLSGKIAKIYGENGLPDDTIRFNFFGSAGQSFGAFGMKGMTIVLEGEANDYVGKGLSGAKIVIKTPERASYKQEENVIAGNTILYGATSGKLFINGMVGERFAVRNSGAYAVAEGTGDHCCEYMTGGIAVVLGETGRNFGAGMSGGMAFILDENDTFNDKCKAETLEITSDYDEEDEKVLRGLIEEHYNYTNSDKAKVILENWGEYKTKIKKVIPTAYKLILEKSKQKAAAVNM

SEQ ID NO: 51808 - protein, 809 aa, Clostridium acetobutylicum
MSDNTKTNSRNKSVKRTKKVKKKKKFGFFKKLFTILFCLFILLSVAASGVIFAIVKTSPNLDINGTILNLDQPSQLYDDNNNPMDTVVTNQRRYVVSIKDMPKNLSNAFVSIEDERFYKHSGIDTKRILGAFYNDIKSKIHKQNSIQGASTITQQLIKNRMFLNDSLENRISFKRKIQEAYLSIKLEQSLSKSQILEAYMNTIFLGVQANGVEAASRQYFNKSAKDLNLIECAFIAGLAQSPSAYYPFSQNVAKNPNIYLDRTKLVLYKMRQNNYIDFSTYQNAINDLNNNKLAFSQQKISNKYTYEWFSIPVVNQVKQDLKSQYHYTDEEIDSLLRDGGLKIYTTMNTSMESNVQNILDNNSTLKSYSYADKNGIIQPEAAATLFDYHTGEIKAIVGGRGQQPPSSYNRADSSNYLRSVGSSIKPLTVYAPAIDTKLATEDTIVNDSPLSSDVAEKYGSNGVPYNPHNDDGGYSGPVNLKTALTKSINLVAIKLEDKLGLSTGAAYAQKFGLTLNNDDKSSIAALSLGEIRGSNTTTMAAAYGVFGNNGLYSEPRLYRKVVDKTGKVLLENNYSTRKVISPQSAYIMYDLLKGPVSAGGTGSYARFGDMPVAGKTGTASDSKNLWFCGLTPYYSAAVWVGNDQPTKLSLGSNDVAEIWGEIMKMANVNLTVKDIDAPGGVTKIGDSYYIDGTSPSNLSGDDSSSSTASKPQTPTTNTQNNTNNNVANPNSNNTTNSNTSNSTETPAQNTQQPTPTPTPSTNNTPGNTNTNTNTNNNTNTNTNTNNNNTNNSSSGNNNPPNNNTTNTNK

SEQ ID NO: 51809 - protein, 340 aa, Clostridium acetobutylicum
MNNKDLWIKEEIIWSEHKCIRFAAGGYEALIIPDVGGNVVELKDTNKGVTILRTPKKDLKFEDFKNRPQVYGLPVLFPPNRIDDGTFKLGDKTYKFPINEAKNNNYIHGFIKNSKWTVHKKKIDQDKALVEVVFDFTKENEAYKYFSHEFQFKLSYELSSKGLKQTTSVVNLSSEEMPLSVGYHSAFNVPFIEGSEDSNCRVKISIDKFWKQDSRNLPTGESFAPTGEQKEYLENGVAVASHPIESLFSLKDIDVNGKTFRGACIEDASKNTRVVYEMSSEYKYLVIWNDMGDKKYACIEPQTSIINSPNVKLDRSVSGFKTLKPNESWSGVCKLYIENM

SEQ ID NO: 51810 - protein, 336 aa, Clostridium acetobutylicum
MIIEKKREMKHRLVLLIIILLTVLTIVISLGIGDYALSYNNLIPTLLGQGSFKDEFVLFDLRFPRMAITILSGMALALSGAVLQNITRNDLADPGIIGINSGAGVAVTVFFMYMPIDSKTFSYLVPIIAFIGALITAVIIYLLAYKKNEGVQPLRLVLLGVGLSMALSGLMIVIMSLADRSKVDFISKWLAGNVWGLDWAFVLAIFPCIVILVPYILYKSNTLNIIKLSRDVSIGVGMSIEKERFKLLMASVALSSFAVSVTGNISFIGLMAPHIAKALVGHRNQMFIPIAILMGGWLLLLADTIGQHLLQSGNIPAGIVVSVIGAPYFIYLLLKK

SEQ ID NO: 51811 - protein, 426 aa, Clostridium acetobutylicum
MLEFTKRSLMNKYNINERVLELYERALNDVEKEFKYYDEIREYNQLKVLKAFQEERISESHFTNSSGYGYNDIGRDSLDRVYANIFNTESAFVRPHFVNGTHAIGAALFGNLRPNDTMMSICGMPYDTLHDIIGMDDSKKVGSLREYGVKYKMVDLKDGKVDINTVKEELKKDDSIKLIHIQRSTGYGWRKSLRIAEIAEIIKSIREVNENVIVFVDNCYGEFVEEKEPTDVGADIIAGSLIKNIGGGIATTGGYIAGKEEYVTQATFRVTVPGIGGECGSTFGVMRSLYEGLFMAPHVTIEAVKGAVFCARIMELAGFDVLPKYNDKRTDIIQAIKFNDEKKLIDFIKGIQTASPVDSFVQCEAWDMPGYEDKVIMAAGTFVQGASIELSADAPIREPYIGYLQGGLTFDHAKLGVLIALSKLIM

SEQ ID NO: 51812 - protein, 348 aa, Clostridium acetobutylicum
MKTHKLLSIVLASVLLTSSFTGCTFASNKKKITPDTANAQNASTSVESPITKASKKVLPSVVGVTTTYIERDNTKKEGVGSGMIIDSSGYILTNNHVAGMTSKDLKVSLYDGSSIGAKPLWANESLDLSIIKIDKNNLQAVTLGDSSKVDIGETAIAIGNPLGLNFQRTVTSGIVSAVNRTVEAGEGVFMEDLIQTDASINPGNSGGPLIDANGNVIGVNSAKITSAEGIGFAVPINIVKPVLKSLKTTGQFKTPVIGIIGLDKSMNGYLNLNFEKGIYVYNISPNSGAAAAGINKGDIILSVNGKNINTMNELRESIYTIGANNTVSLKLKTASGEKTVNVKIQSST

SEQ ID NO: 51813 - protein, 346 aa, Clostridium acetobutylicum
MKNNVQKGCDIMAATIRDVAKLANVSPSTVSRVLNDSNKISCETKERVIKAIKKLDYHANAIARSLANNSTKILGLIVPNEAKNLFRNPFFIKAMRGISLCAHENEYYIMYDFGSSEKEEVSLIKKYVQSKLVDGIILLTVRKNDKCIDFLKRLKYPFVVIGRPEESKGVMWVDNDNFKAMYDLVDGLIKRGAESIAFIGAAKEMNMSRDRLDGYKRALLAHGREVDEEIIVEQKSFTEEEGYTAMKKILEVKTPSLVVTTDDLLAFGVLKLLREIGEESISVVGFNNIPLGEYQNPPLASVDINAEKLGYHAAKLLIDSVNKEIEKNHFIIDTFLKERESIKLSK

SEQ ID NO: 51814 - protein, 210 aa, Clostridium acetobutylicum
MTIPNLNKIYPRSNDYQTVYLKNVITRKNIEVGDYTIYNDFYNDARDFEKNNVLYQYPINGDKLIIGKFCSIACKAKFLMNSSNHSMKSLSTYTFPIFYEEWDLDVKRITEAWDNKGDIVIGNDVWIGYDAVIMSGVKIGDGAIIGARAVVTKDVPPYTVAAGVPARVIKKRFDDDVISKLLKIKWWNLPYEKIRENIQYFKSGNIDKLI

SEQ ID NO: 51815 - protein, 213 aa, Clostridium acetobutylicum
MFTGIIEEIGEIKTIKKYDNSIRIAIKASKVMENIKLGDSIAVNGVCLTIVSCENGEFDVMPETYRVTNLKKLISGSKVNLERALALGDRFGGHIVTGHIDGLGTIESIKKDAIAIEYKIKTNREITSNLVYKGSVAIDGVSLTLGEVQEDYFKFYLIPHTQEKTTLTQRSKGYSVNIECDVLSKNIRNFVNIQNSTKGSCITEGLLKENGFM

SEQ ID NO: 51816 - protein, 185 aa, Clostridium acetobutylicum
MIKEVIVVEGRDDITAVKRAVDAEMIAVGGFGINSKIISKIKEAQKRRGVIVLTDPDFAGEKIRSIISKRVKGIKHARISQSEGTKNGDIGVENASPESIIRALNNAKCETQKKTYEFTIEDMLFFKLVGNSEAKKRRDLVGNELGIGYSNGAQFLSRLNNFGISKEELINAVNTVNRRYYDEGI

SEQ ID NO: 51817 - protein, 324 aa, Clostridium acetobutylicum
MFDNDISMSLVRVTEAAALQSSKYMGRGDKIGADQAAVDGMEKAFSFMPVRGQVVIGEGELDEAPMLYIGQKLGMGKDYMPEMDIAVDPLDGTILISKGLPNAIAVIAMGPKGSLLHAPDMYMKKIVVGPGAKGAIDINKSPEENILNVAKALNKDISELTVIVQERERHDYIVKAAIEVGARVKLFGEGDVAAALACGFEDTGIDILMGIGGAPEGVIAAAAIKCMGGEMQAQLIPHTQEEIDRCHKMGIDDVNKIFMIDDLVKSDNVFFAATAITECDLLKGIVFSKNERAKTHSILMRSKTGTIRFVEAIHDLNKSKLVVE

SEQ ID NO: 51818 - protein, 869 aa, Clostridium acetobutylicum
MSISPMMQQYLSIKENHKDCILFFRVGDFYEMFFEDAEVASRELELVLTGKDCGLEKRAPMCGVPHHAYAIYASKLVSKGYKVAVAEQLEDPSLAKGIVKRDVIKVLTPGTYTDSSFLEDTKNNYIMSLFIHDKVSAMCFADISTGEFNLTETELDFEIILNEISKFSPKELVLQENLDDKLVDKIRERFDVVYNRFSNEYFKEHRNENLKAQFSNYAEVNMTEGLKSCANGLIKYIIDTQKTALTHIDELQKYEIVDFLSIDINSRRNLELTETLKDKSKKGSLLWVLDKTSTAMGGRQIRKWIERPLIDDEKINLRLDAVEEMLTNVSYNEDLKELLKQVYDIERLAGKISSKSVNAKEMISLRGSIEKLPAIKKLIKNFNSELLVNMENALDDLGDIYKLLYESINDNPSLSIKEGNIIKEGYNKDIDELRLAKSHGKQWIASLENTEREVTGIKSLKVSYNKVFGYYIEITKSNLNLVPEGRYIRKQTLTNSERYITPELKEMEEKILGAEEKLVLLEYNVFCEIRERIEKEIDRIKGSAKILSELDCICSFADVARENNYCKPVIKRDGTLVIKEGRHPVVEKVIASGNFVANDTVINNSDNVMMLITGPNMAGKSTYMRQVGLIVLMAQIGCFVPASAAEISICDKIFTRIGASDDLNAGKSTFMVEMWEVSHILKNATKNSLILLDEVGRGTSTYDGLSIAWSVIEYICKSENLKCKTLFATHYHELTKLEGEIEGLKNYSIAVKKVNDDIIFLRKIISKGADESYGIEVAKIAGLPEEVLVRAREILKDLEEAKPKTAENTEDKKTNIVKEEPKKDSYQIDFNYLERESILKELKDTEIMDMNPIECMNKLYEFIKRAKKL

SEQ ID NO: 51819 - protein, 261 aa, Clostridium acetobutylicum
MDTVIKSKENSIIKEVKKLNEKKHRDLKKSFIVEGLRFVREALESDFKIQYLFVSEKNYDKFILKELKELIKKEFQVIKVTESILKDICNTQTPQGIVAVVQYKEVAWKLTKGFYMLVDKVQDPGNMGTIIRTANAAGALGVIITKGTVDIYNNKTLRATMGSIFKIPIIFEDDNFSKIKELKKNGFKIIASSLDTEHNFYDVSLNEKLIIAVGNEGNGISDKIVDISDTKVKIPMPGNVESLNVGVAAAIMMFEYVRKMM

SEQ ID NO: 51820 - protein, 340 aa, Clostridium acetobutylicum
MEKLLEIKNLNTSFFTHLGEVKSVRGISFELNKGEALGIVGESGSGKSVTMMSVMGLLQENGKIIDGEIIFNGVDLVKASEKEMEKIRGNKMGMIFQDPMTSLNPVLTVGEQLTEGIKKHLKMSSAEANKHAVEMLKLVGIPSPEKRMKQYPHEFSGGMRQRVMIAMAIACRPELLIADEPTTALDVTIQAQILELMKNLKDKMNTSIILITHDLGVVANLCTKINVMYGGTIIEKGNAREIFYNPKHPYTWGLLKSIPDPTKDSKEKLVPIDGYPPDLLNPPKGCPFAARCPYTMEICMEKSAPAFKIGEDHEAACWLNHPDAPKVKEEEGRSKDDATR

SEQ ID NO: 51821 - protein, 626 aa, Clostridium acetobutylicum
MIKYFSGDYDVIVIGGGHAGCEAALAASRMGCRTLMCTMNLDSIAMMPCNPNIGGTAKGHLVKEIDALGGEMGVNIDKTFIQSRMLNISKGPAVHSLRAQADKVRYSEVMRNVLENQEDLYLRQIEVISLDIEDGKVKGIVTKNGACFTANTIVLATGTYLRSRIIIGEVNYSGGPSGLFPANELSQSLIDVGIKLRRFKTGTPARINKRSVDFSKMVEQPGDERIIPFSFLNDKLEKEQISCYLTYTNEKTHEVIKENIDRSPLYNGTIKSVGPRYCPSIEDKVMRFPDKQQHQIFIEPEGENTNDLYVGGMSSSLPEEVQIKMLKTVPGLEDVEILKTAYAIEYDCIDPTQLKLSLEFKDVKGLFGAGQFNGSSGYEEAASQGIIAGINAALMVKNKEPLILGRSDGYIGVLIDDLVTKGTNEPYRMMTSRAEYRLLLRQDNADLRLTELGHKIGLVDENRYEKFIGRKNAIEEELNRLKKVQITNKKEVNDFLEGLGSVSLKKPISLYELIRRPELDYDKLQTLDIDRKDLAQDIIDEVNIMIKYEGYIEKQLEQVDQFKKFEKRVIPEDIDYNSIKNLRTEAIQKLSKLRPVNLGQASRISGVSPSDISVLMIYLDYYFKNK

SEQ ID NO: 51822 - protein, 221 aa, Clostridium acetobutylicum
MELGAKTVFSMKLGSYNFAITETVVLQWIIMAVIILLAIFLTKNLKKVPNRKQSVIEMIVNLINGLVKENMGEKFMNFVPIIGTMAVFILFLNLTGLVGIEPATKDISVTAGFALVSAFLINATAIKRIGVGGYIKSIFSQGPIMVPMNLLEKVTIPVSLCLRLFINMLVGAIVMSLIYSTPAKILLPVPLHGFFDMFDGVLQVYVFVLLTMIFTKLGIEH

SEQ ID NO: 51823 - protein, 615 aa, Clostridium acetobutylicum
MSKVIGIDLGTTNSCVAVMEGGDPAVIANSEGARTTPSVVSFQKNGERLVGQVAKRQSITNPDKTIISIKRKMGTAEKVAIDDKNYTPQEISAMILQKLKADAEAYLGETVTQAVITVPAYFNDSQRQATKDAGKIAGLEVLRIINEPTAASLAYGLDKMDTNQKILVYDLGGGTFDVSVLELGDGVFEVKSTNGNTHLGGDDFDEKIMDYIAEEFKKDNGIDLRNDKMALQRLKEAAEKAKIELSSSTQTNINLPFITADATGPKHIDMNLTRAKFNELTEGLVQDTIEPMKKALSDAGLSINDIDKIVLVGGSTRIPAVQEAVKNYTGKDPSKGVNPDECVAIGAAIQAGVLTGDVKDVLLLDVSPLTLGIETLGGVATPLIERNTTIPTRKSQVFSTAADNQPSVEINIVQGERKMAADNKSLGRFTLDGIAPAPRGVPQIEVTFDIDANGIVNVSAKDKGTGKESHITITASTNLSDEEIDKAVKDAEKFAEEDKKKKENIEVKNNADQIVFQTDKALKDLGDKVSAEDKSNIEAKKEALSKVKDGDDIEAIKKATEDLTQALYAITTKMYEQSGAQGAPGADPNAGASQKTNGGADDNVVDADFKVDNDK

SEQ ID NO: 51824 - protein, 262 aa, Clostridium acetobutylicum
MILDDIVRDKKLQLIEDKKALSLDDIKSKLNSLNLDKRNFKEALEKENISIIAEIKKASPSKGVIREDFNPVKIGQIYENINIDAVSILTEKKYFLGKNEYIKIVKEVNSKPILRKDFIVDEYQLYEAKLIGADAVLLIAAVLKDKLECFYNRTLELGLDSITEVHNEEEAKLASEIGCSIIGINNRDLRDFSTDITTTKRLMKYVPRDRIIVSESSIKTPEDILYLRSIGVNAVLIGETFMRNIDDLKGINEFLKKAKDNG

SEQ ID NO: 51825 - protein, 155 aa, Clostridium acetobutylicum
MAKKNTENNTLADNRKAWHDYFIEETYECGVELVGTEVKSIKNGKANLKDSYAEIRNGEVFACNMHVSPYKEGNIFNVDPLRKRRLLLHKSEIDKLLGFTSQKGYTLVPIALYLKNRRVKVKLAVAVGKKNYDKRDALKEKDARREIDRAMKNNR

SEQ ID NO: 51826 - protein, 317 aa, Clostridium acetobutylicum
MIRYIVKRLFFMIPIIIITSFIIYMIFTLAPGDIATSMNISPKEKAEMRHKYHLDEPKVIQYCKWLYGASHGDLGRSYKLNQPVKSVINKYIWNSFYLQFASFILAILIAIPIGAISAIRKHSIFDSGFTVFSLVGISMPTFFLGLILMKWFAADLNIFPVEGMTATGENFHGIKRLLDILYHMVLPCAVLTIVNAATLIRYVRASMLEVINKDYIITAKAKGLNEKVVIYKHALKNAMIPLVTIFGISIANLFTGAIVTEEIFGWPGIGKLSLDAVLQRDYPLLMGINMIVVILTFVGNLAADVLYAVIDPRIKYK

SEQ ID NO: 51827 - protein, 512 aa, Clostridium acetobutylicum
MKKQTLIKGTLILGITGIFAKILGMCFRWPLIMLIGDEGIGYYQMSYPLYMFFIAIASGVPVAISKMVAERNAVNDREGIILVLKKAVLLMLIMGGGFSLFLIIFSRQLVHFFNWNEKSYYSLIGISLAPIIISLVSSFRGFFQGMQNMVPTAVSQIIEQIGRVLVGVGLAYILLPKGIEYSAGGAAFGAVFGAGIAGVYLFIKYTRAKSEFKGVKTGRNYKILSELLYIAIPISIGSAVSSIMSLIDSILVPQNLIKAGFNYSEATKLYGQLTGKAFVLINVPLTLSIALCTSLMPVISEAFVLNRMDELKGRIESALKMSMLIAIPSFAGLFFMSNQVMTIIFPGHSSGGDILKYLSISIPFIVLSQVTTSVLQGVKKYAIPVINLFLACILKVVINNYLVPIKMFNVYGAVIGTISGYMLSCILNVIAVKIICNFKIKWYDIIMKPAYASILMIIGVMFLYMNIYTKTMNMLLSFGISVFSGIIVYFIFIILFGVFDYKRIKTRFKSFR

SEQ ID NO: 51828 - protein, 287 aa, Clostridium acetobutylicum
MLVSAKEMVDKAREGKYAVGQFNINNLEWTKAILLTAQENKSPVILGVSEGAGKYMGGYHAVVGMVNGLMKDLNITVPVALHLDHGSYEGAFKVIEAGFSSVMFDGSHYDIAENIEKTKEVIKAANAKGLSVEAEVGAIGGEEDGVVGSGEVADPAECKKIADLGVDILAAGIGNIHGVYPANWAGLRFDVLEDIKNAVGTMPLVLHGGTGIPDDMIAKAISLGVAKINVNTECQLVFAEATRKYIEEGKDKQGKGFDPRKLLAPGFEAIKAKVKEKMVLFGSVNRA

SEQ ID NO: 51829 - protein, 357 aa, Clostridium acetobutylicum
MKNKNRIVTLLTAVLVISAVIFMPLNIHAQIYKGVDVYEYDNISNYQQLKSNGVSVVIQKATEGLCHNDSLLNYRYNAIIQNGFKVGYYHFADNTGQPVAEAQHFLSKVQGLHSDTILWLDIENESNWTKWQAIDYTNKFIGYVQSQGYRIGLYSGLSFYYEYLKGNITNVPLWLASYGRQPAQFPNIVSWQYSENERINGVVGDIDLDYFNDSIFTGQAPRMVQSNMQVQTYNRIKTIQAQLNAVLYSSKLVVDGIQGNATTQQIRVFQQVCGLKTDGIWGQQCVNAIQQIYGKDLCGRPYIHRIPTRIIQYNMGIQFDGIYGRDTASHVQAWQSSHSLKSDGLFGSQSWLTLLSK

SEQ ID NO: 51830 - protein, 119 aa, Clostridium acetobutylicum
MARVKRAVNARKNHRKVLKLAKGYYGGKSKLFKTANESVIRALRNAYVGRRLRKRDFRKLWIARINAATRINGLSYSKFINGIKLAGIDMNRKMLSEIAINDPKAFSELVEVAKKQINA

SEQ ID NO: 51831 - protein, 445 aa, Clostridium acetobutylicum
MDKLKFGLVSLGCDKNRVDSEIILGSMNRDYEIVNDPREADVILVNTCGFIESAKQESINTILEMNKYKEKYNCKMLIATGCLTQRYGKELKELVPEIDAILGVNDYKSLDDAIEDFFNLGKKDIYCNYSDQSINEGKRIITTGEYSSYVRISEGCNNSCSYCIIPKIRGKYRSRQFENIIDEVRELSENGTKEVILIAQDTTRYGVDLYGRKRLHELLKEMSLIQGIEWIRIMYCYPEEITEELIEEIASNEKVCNYIDMPIQHISDNILKNMFRKTRKSEILDKVEKIRKKVPNIAIRTSLIVGFPGETEGDFNELCDFVKDANINNLGVFRYSREEGTKAALMPMQIADTVKEKREEDIMLIQQQVSKNLNAKKIGKVYKVIVEGFNGDYWYGRNFEMAPEIDGKVFFKSQSEIKVGSFINIKITENLEYDLIGVVYNEFSK

SEQ ID NO: 51832 - protein, 331 aa, Clostridium acetobutylicum
MLKDAIKKIVRFETLSENEAYGAMNEIMDGKVSEIDMAAFLTGLRMKGEEVEEILGCARAMKEHAVKVEVNNLYAIDTCGTGGDGGKTFNVSTCSSIIAAAGGVKIAKHGNRAGSSKSGSADVLTELGVSINLKPEEVKREIEEKGMAFIFAQSYHKAMKNVAPVRKSLGFKTIFNLLGPLTNPCNIGGQVLGVFDQKLTHPLAEVLLKCGLEKAMVLNGCDGLDEITITGSTFVSEIKDGRIKDYVIKPEDFGIKRSKIEDVRGGTPKENAEIIIDILKGKGGPKRDIAVLNAAAALYIGKITENLKDGVRLACNIIDSGKAFQKYEELV

SEQ ID NO: 51833 - protein, 44 aa, Clostridium acetobutylicum
MFMTYQPKKKQRKKEHGFRKRMSTLSGRKVLKRRRLKGRKRLTA

SEQ ID NO: 51834 - protein, 175 aa, Clostridium acetobutylicum
MICEVCHKNEANVHITQIINGDKRELNVCENCAQNIQGVNIASDIDFISPFSFQNILSGIMDYIGGSSQSTKCEELVCKNCGTTYSEFKDKGLFGCSECYKYFNSMLLPIINRVQGNVEHNGKIPKKAGRKIINKNNILKLKAELQKAVLEEEYEKAAELRDKIKSLQEKDGGEK

SEQ ID NO: 51835 - protein, 336 aa, Clostridium acetobutylicum
MKVYPKVSIVMPVYNSERYLAEAIESILDQTYNDFEFIIVDDGSTDESYNIISSYANKDNRIIVISREHRGLVDSLNEGINIARGKYIARMDADDISINNRIEKQFEFLELNKDVDILGTRIEAFGDIDEKQKTIYNSAFSIKFDSQNIEQVFLTSCAIPHPSVMFKKDSIVKLRGYRKEYDTAEDYDLWLRAIRNGYKIVRMDECLIKYRVHNKSKTAVEMFNPKMVEYTMKAKIDYINDTNKKDKVDYLIWGASTGGKLVKKVVESTTDKFNLIGFIDKYKEGEVDECRIYKPEDLMKLHSDYVFIATLPGKEEADEFLKNCGLKKFKEYISLV

SEQ ID NO: 51836 - protein, 303 aa, Clostridium acetobutylicum
MRVKKAIIPAAGLGTRFLPATKAQPKEMLPIVDKPTIQYIIEEAVQSGIEEILVITGRNKRAIEDHFDKSFELESELESHNKKELLKVVKDISNLANIYYIRQKEPRGLGHAINCARTFVGNEPFAVLLGDDVVNAKVPCLKQLINCYNEYKTSILGVQRVPNSEVSKYGIVNGMHIEDGVYKVKDLVEKPKQEEAPSDLAILGRYIITPSIFDILDNTKPGKGDEIQLTDALKTLMKTEAMYAYVFSGRRYDVGDKLGFLQATVEYALKREELKKPFMNYLFTIKDNPNFKSLYDELNKKSK

SEQ ID NO: 51837 - protein, 279 aa, Clostridium acetobutylicum
MNMKKIITFLSISAFLVSCLSGCTAINSHSSTIKKTSVASTKKSNKRITVLAAASLTESFNEIAKDFKKDTGIDVSFDYAGSQQLETLINQGATADVFASASTKNMDDVRKSKLVSSPSIFVKNKIVVCQNKDSKKKISKLSDLGINNLSLVIADKSVPVGQYFYKSLDNSIANNSISSEDKNKILKNVKSNELNVKDVVSKVLLGESDAGVVYKTDITEQNISKLNTINLKEFESVTANYPIAVVNSSKDKNSAKSFIDYVMSNKGKKILKKYGFSMP

SEQ ID NO: 51838 - protein, 320 aa, Clostridium acetobutylicum
MKKIRWGILGLGNIANKFAQTIKSMDSVELYAVASRNKKKAEAFGKEYEVPSKKCYGSYEQLVEDESIDVVYISVPHVFHKELSILCLKNGKAVLCEKPVTMNENEIEEVIRIAKENRLFFMEAMKTRFLPINQKIKSLISEGRIGEVRLLQADFGFKAEFNPDGRLFNKELGGGALLDVGIYTISYSSFVFGNHPRSIKSNFYIGKTGIDECVSINLVYESGKQSQLYAAINLDTTRTANIIGTKGRICVPKFSNANRAYILVDGKEEKIEMPFDINGFEYQVKEVNKCILEGKLQSEIMSWKDSIEIMKIIDDVKKNF

SEQ ID NO: 51839 - protein, 531 aa, Clostridium acetobutylicum
MMQKIQRFGAAMFVPVLFFAFYGMVVGFSILFTNQDIMGSIAAKGTAWYSFWYVVQQGGWTVFNQLPLLFVVGLPIALAKKAQARACLEALLIYLTFNYFINAILTISGSSFGVNFNLQPGVSHGVSSGLALIAGIKTLDTGMIGAILIAGIAVYLHGKFFEKRLPVYLGIFQGSVFVVMIGFFVMLPTSLLMCLVWPKVQCGIGALQGFLASSGVIGVWIYTFLERILIPTGLHHFIYGPFVYGPAVVPDGIASYWPKHLSDFATSARSLKDMFPAGGFALHGSSKVFGCTGIALAIYSTAKPEKKKIVAGLLIPATITAIVAGITEPLEFTFLFIAPALFAVHAVLAATLAAIEYAFGVVGNFGGGLIDWFAQNWLPLFKYHPVTYITQIIIGLCFTAIYFLVFRFLILKFNFATPGREIDDEETKLYTKADYKAKQGAAEEVKNDEIDGSQAMQFLQALGGSENIADVTNCATRLRVSVKDESKLLPDSVFKKAGAHGVVRNGKAIQVIVGLSVPQVREEFEGLLIKS

SEQ ID NO: 51840 - protein, 135 aa, Clostridium acetobutylicum
MRILGIDVGNKTIGVALSDPLGFTAQGITTIRRKNEEEDIKELKELCEKYEVDTIVCGLPKNMNGTIGFQSEKVLGFCEVIKQNINVPIKMWDERLTTVTANRAMLEADLSRKKRKKLVDKVAATYILQGYLNSI

SEQ ID NO: 51841 - protein, 418 aa, Clostridium acetobutylicum
MDKLVVNGGNPLFGSVEIGGAKNAAVAILPAAIMASEGISVIDNIPDIQDIQRLERIITSLGCKVKRVQNTVEIDSTNLTSVNADTEDGSKMRASYYLIGALLGRFGKAKVELPGGCPIGVRPIDQHIKGFEALGATVKISHGTVEAQADKLIGTNIYFDVVSVGATINLMLASVFAEGTTVLENAAKEPHIVDVANFLNSMGANIKGAGTDVIRIAGVEKLKGCNYSVIPDQIEAATYMIATAACGGCVTIKNVIPKHLESISAKLIEMGADIKEGDDYVTIESHKNLKGVNIKTLPYPGFPTDAQQPMSTLLSISQGRSIVNESIWESRLKHVDELKKMGANIKVEGTVAIIDGVEKLTGANVKATDLRAGAAMVIAALAAEGVSEISCIEHIDRGYPHIEDKFKELGANIRREKI

SEQ ID NO: 51842 - protein, 141 aa, Clostridium acetobutylicum
MSLSIEQIMEIIPHRYPMLLVDRVEEIEPGKRAVGYKNVTFNEQIFQGHYPGKPIMPGVLMIEALAQLGGVAILSLDKYKGKKPILGAVKNAKFRRMVVPGDVLKLEIEIVKVKGPAGIGKGIATVNGEKAVEAEITFMIV

SEQ ID NO: 51843 - protein, 185 aa, Clostridium acetobutylicum
MISDIIKELEEKMTKSISALKKELTSMKAGRANPAMLDRIEVDYYGTMTPLNQLANISVPESRVLMIQPWDKSAMKSIEKAILISDLGLNPSNDGTTMRLVIPELTEETRKNIVKNVKKAGEDGKVALRAIRRDANDKVKSLKKDNSITEDEMKSAENDIQKKTDSYVKEIDKMVEAKEKEIMSI

SEQ ID NO: 51844 - protein, 422 aa, Clostridium acetobutylicum
MKKPMTMTQKILANHAGLDYVEAGQLITANLDLVLGNDVTTPVAVKAFKTMGTNKVFDKKKVAIVPDHFTPNKDIKSAEHCKMIRQFAKSKEIENYFEIGEMGIEHALIPEKGLAVPGDVIIGADSHTCTYGALGVFSTGVGSTDMAVGMATGKAWFKVPEAIKFVLKGKPAKWVSGKDIILHIIGMIGVDGALYKSMEYTGDGLEYLSMDDRFTIANMAIEAGAKNGIFPVDEKTIEYMKGRSDRELKKFDADEDAEYSRVIEIDLSTLKPTVAFPHLPENTKTIDQVGEVNVDQVVIGSCTNGRMEDLRIAASILKGKKIKKGIRLIVFPGTQNIYLEAMEEGLVRTFIEAGGIVSTPTCGPCLGGHMGILAEGERAISTTNRNFVGRMGHPKSEVYLASPAVAAASAIAGKIVSPEEVL

SEQ ID NO: 51845 - protein, 386 aa, Clostridium acetobutylicum
MFRHIRPVWAEIDLDNIAYNMQQIRRCSKSDEIIGVVKADAYGHGAVDVAPVLLENGANRLAVAVISEAVELRKSGIQCPIMILGYTPLSLVDSIIKYSIEQTVFSYDYAEKLSEAARQKNITLRIHIALDTGMGRIGFLPTEESVWEVYKISKLSNIIIEGIFSHFSTSDETNKEYTYAQLKKFEWFYNELRKKNIKINIRHIGNSAAIMELPETHFEATRPGIILYGYYPSNEVDKNKLNLKPIMTLKTNVVHIKKMMPGEYVSYGRKFKCERESIIATLPVGYADGYTRMLSGKAKVIINGNYAPVIGRICMDQCMIDITDLPSVQVGDEVVIMGESDDKKFTADDMAEIIGTINYEVICMISKRVPRVYIKNGEVVKIRNYV

SEQ ID NO: 51846 - protein, 177 aa, Clostridium acetobutylicum
MDNKKTSMENKISEASDTIYYGEYEKLIVNILTVKKPSPPILAIDTTNNVVTVTNAIVDSPVKKTSSNWKGTLLLDGYIDNTVTYRTASNTSSNTISGNINFLSTRIYFQIRPTVLSPTQFSKKSNVEVISAYVESEKKDLIEQNALPENYPAWAITYNKLSQKILVKVQIKITSTK

SEQ ID NO: 51847 - protein, 216 aa, Clostridium acetobutylicum
MSKLPEIGTKISLTDKAYEIIKDAIMTNIFKPGELLIEEKLAEQLAISRTPLRAALRKLAYDHLVEINSSRNVIVANIGQKDVEEITVVREVLEPLAVKELENNIGEDELKKLEEILCRQKKAVLEDNYEELIKMEYEFHVAIGELTHNKWLHGMLKDINTIVQRYLILSGSLNKYKEVAIKEHEVIISEIRQGNYDKAVESMKCHISNVSSRMLK

SEQ ID NO: 51848 - protein, 216 aa, Clostridium acetobutylicum
MQRKKKLKIVNPDIYEELEEVLEGEIIVEDDSYIELKSFENVSLENKQAKKVSISQSIFKNVSFNNTSFKGIDLTDVIFEKCDLSNADFTESVIYRTQFKNCKLMGINLSEGTLNNVTFDNCMARYSICTLLRCKNVLFKECTFTSTDFYKSQFTNVEFLNSELIEAQMHETSLKGIDLTSCSIDGIGLNIEDLKGCIVGPEQLMCFANLLGVILK

SEQ ID NO: 51849 - protein, 418 aa, Clostridium acetobutylicum [sequence omitted]

SEQ ID NO: 51850 - protein, 256 aa, Clostridium acetobutylicum
MNITTHNKILYELTSSLLALIASIMLIIELSVKLSNETLYIFDTIDNIILIIFTIDYFLRLYISKDKKKFFKENIIDLLSIIPFNSIFQGFRLLKISKLLKFTKLIKFLKLFMAFSLLLRFKSHFTKFVKTNNFHYVIYTTIFVLITGTIGMHLTEGLSLGNALWWSFVTITTVGYGDISPSTPFGRVIASILMLIGIGFLSMLTGTISTFFISKKNGISYRNEIIENIKSKLDNFDELSTEDINDICSILKTLKN

SEQ ID NO: 51851 - protein, 291 aa, Clostridium acetobutylicum
MGMDRSDMNKNLAQMLKGGVIMDVINKEQAIIAEKAGACAVMALERVPADIRKQGGVARMSDPKMIKEIRESVTIPVMAKVRIGHFVEAEILQSLGIDFIDESEVLTPADDSYHIDKKAFKVPFVCGARNLGEALRRIGEGASMIRTKGEAGTGNVVEAVKHMRTVMDEIRRVKNAAKEEIMTIAKELGAPYDLVQYVWMNGRLPVVNFAAGGVATPADAALMIRLGAEGVFVGSGIFKSENPEKRARAIVMAAAYYDDPKVLEEVSEDLGEPMYGLEISDIKDRYAERGW

SEQ ID NO: 51852 - protein, 218 aa, Clostridium acetobutylicum
MLLRLMPSMYKIIRKTLALIGIELVRTMVLTRNEWLMLDRRKRISIKVFGKLFGVGAVVIGAVAIFATAGLSAGAYGVSNVVEGGQIMVTGADKAFNPLRDTLFQGNQSAYDTFGNVAVFVVGSVIAVGAALKAGQAVSGAVIAGVGKTAVTTAVGVGTNFVVAPIAKSLAKSAGIDSIWANDIGIGTGFATSVFTAGKVYKACGTGADEAKIMENLE

SEQ ID NO: 51853 - protein, 359 aa, Clostridium acetobutylicum
MKKLKIVMTGGGSAGHVTPNLALVPKLKELGYEIEYIGTKDGIERSIIEKENIKYNCISSGKLRRYIDIKNFSDPFKVILGIFQSVSILRKKKPNIVFSKGGFVSVPVVIAAHFCRIPVIAHESDITPGLANRIAVPYCTKVCATFPESLNNIKGNKGILTGTPIRDELFKGSKIKGLEICGFTGEKPVLMIIGGSLGSKIINDTVREALNKLIKKYDIVHICGKGNIDEALSKLKGYKQFDYISTELPHVMNAADLVISRAGANAIFELLALKKPNLLIPLSKKSSRGDQILNAMSFEKNGYSMVVQEDDLTPTLLVEKVIKLESDKEKYKKAMNSSPVKNGVENIIKVIDKYKKCKI

SEQ ID NO: 51854 - protein, 489 aa, Clostridium acetobutylicum
MNKIKKFNVKDDRNLSMLMDFYELTMANGYLLKGFGDKIVYFDVFYRKNPDGAGFAIAAGLQQIIDYIKNLKFSEEDIEYLKEKNMFSEDFLKYMKNFRFSGSINAIPEGTPVFPNEALITVKAKAIEAQLIETMLLITINHECLIATKTNRIVRAAKGRPVLEFGARRAQGYDGAVYGARASYIGGAAGTATTLSEQMFNVPASGTMAHSWIQFFGDEFEAFKAYAEIYPDACTLLVDTYNVLESGIPNAIKVAKEVLEPMGKRLKGIRLDSGDLAYLSKKVRKILNASGLEDCKIVVSNSLDEYIIEDLIAQGAKIDVFGVGERMITAKSDPVFGGVYKLVAVEEDGQIVPRIKLSENAEKITNPGYKTPWRLYDKETGKAIADVITLAHEKIDENKEYTIFDQENIWKKKKITKFVARKLQVPVFIDGECVYESPTLEESREYCEKQLDTLWDEVKRFVNPHKYYVDLSMELWHVKQELIQKYRVK

SEQ ID NO: 51855 - protein, 427 aa, Clostridium acetobutylicum
MLSTLRNAWKVPELRKRMLFTIAMVLIFRMGNYIPVSGVDTSKILNLTNQSGSLFGLYNMMTGGAFSQFSIFAMGVIPYINASIIMQLLTVAIPSLEQLSKEGEEGRKKIQKITRYISVPLAALQSLTFYAVIRSAGAMQTNSKLSVFLIILTLTAASTFLMWLGDQITDKGIGNGASLIIFVNIISRFPSTIYNIVKLQSADTVNIVEIVVVAVIACVLFVGVVIASLAERRIPVQYAGKAVGGKVARKQSSHIPINMNASCIIAIIFAISVMMFPTTISQFWPTAKITKFLTGSEYSPFKQNTIPYMLLYLVLILFFTWFYTQITFKPEEMSENIHKSSGFIPGIRPGEPTTRFIERVLDKVSILGGLFASVIAIAPMIVEANGSFQGIHFASTGLLIVVGVALENLRIMQSQLTMRHYHGFLNE

SEQ ID NO: 51856 - protein, 147 aa, Clostridium acetobutylicum
MKVILLKDIKSVGKKGEVINVSDGYARNFLFPRKLAEEANNSNMRVLNLKKDAERKQKLQETEEAQKLANELKGKVLKLSAKAGENGRLFGAITSKDIAAEIKKQFNVDIDKKKVNSETIRKLGNYEIELKLYPEISTKINVLISEG

SEQ ID NO: 51857 - protein, 317 aa, Clostridium acetobutylicum
MSFSSKVKSEVCRYDDYSKGEAIAVLSAVMKASGTLALEGNRKISFKIITENPAIARLIFKLLKKYFDIHTEIMMKKSNSLKKNNVYVVSITEDMGVRELLKTVGVMKNEDGIVTLSYDIPEFVVKDDESRKMYIRGAFLGGGSVSNPEKMYHLEFVTHNEDYASNLRDLINTYGLNSKVIQRKNSYVVYIKEGEQVVDLLNIIGAHSSLLELENIRIIKEMRNNINRLVNCETANLSKTVNASVRQIESIKLIEKQIGLSRLPENLREVAKLRLNYPDESLKELGKMLEPPVGKSGVNHRLRKIEKIAEELRKEGR

SEQ ID NO: 51858 - protein, 95 aa, Clostridium acetobutylicum
MGETSDKNKKDLIIRLRKIEGQVKGIEKMIESDTCCKNVLVQIAAVKAAVNKIGILMLQDYAKKCMKDELKEMGEKELNDSNIDDIISAITMFVK

SEQ ID NO: 51859 - protein, 361 aa, Clostridium acetobutylicum
MKYVDEFRNGDYAKTLVRLIQKLTKKKINIMEICGSHTMAIFRYGIKDILPSNIRLISGPGCPVCVTSQGYIDTALELSLSREVIIATFGDMIRVPGTKTSLMKRKAEGADIKIVYSPMDALTLAENNPLKKVVFLSVGFETTTPITAITILEAKKRGVKNIFFLTSNKMVPPVMRTLVEDKELNITGFLLPGNVSAIIGKKPYEFLSSEYNVSGVVTGFEPLDILKGLKVLIDIINNNASVIVNEYKRVVRDEGNVTALRYIKEVFEVTDSTWRGIGNIEKSGYKINTEYEQFDAVKQFNINYKECDSSSECRCGDILKGKITPIECSLFKKACTPDHPVGSCMVSYEGVCAAYYKFLNT

SEQ ID NO: 51860 - protein, 407 aa, Clostridium acetobutylicum
MSNVLDELIERGYAKQFTHEEETRKLLSEEKVTFYIGFDPTGDSLHVGHFIALMLMARMQKAGHRPIVLIGGGTAMVGDPTGKTDMRKMLTREEINHNVECLKKQMSRFIDFSDDKAIIVNNAEWLMGQNYIEFLREVGVHFSVNKMLTAECFKQRMEKGLSFLEFNYMLMQGFDFYKLNEKYDCKMELGGDDQWSNMIAGVELIRRKSNKKAYAMTSALLTNSEGKKMGKTEKGALWLDAEKTSPYDFFQYWRNVNDADVEKCLSMLTFLPMDEVRRLASLKDQEINKAKEVLAYEVTKLVHGEEEAKKALNSSKALFGGGTNMDNVPTVSIPEDMLSSSILDVLVHTKIIPSKGEGRRLVQQGGITLNDTKVEDFNYEITKEDFNDDGFALVRRGKKKYYKIVIG

SEQ ID NO: 51861 - protein, 788 aa, Clostridium acetobutylicum
MNEKSLRVLEYFKIKDGIKKYISTSAAKKLIDELEPYGSLYEVKEHIEETKEAFELLMKKGAPPFEGAYDVTEAVSMAEKGFSLAPGQLLKVGSMLRCARKFKEYISHKEEEESYRIIEDICSGIIPLKNIEDNIFNAIIGEEEISDKASTALYSIRRSLKDKNASIKDKVNAMMRSYSKYLQENLYTIRGERYVIPVKAEYKAQVPGLVHDQSSTGATLFIEPMGLVNLNNEIKELMLKEKAEIERILRELSALIYKSIVAVKNNEKIVTELDFIFAKAKYASSINATAPHVNDKGVIDIVMGRHPLIDPAKVVPLNIYMGREFTSLVITGPNTGGKTVTLKTTGLLEVMAMSGLMIPARENSTISFFKEVYADIGDEQSIEQSLSTFSSHMTNIVRIIDDADEDSLVLFDELGAGTDPTEGAALAISILEALRKRGTKIVATTHYSELKAYALKTENVENASVEFDVETLRPTYRLLIGIPGKSNAFEISKRLGLSDYIIEEARKGISKDTLEFEDLIQNLQTRSVKAEENLRKAEFLKEQAEKFKEKYEEKVSSITETREKALHEGRREAKKIIEEAKSEADKILKDMREMERLGYSSEARQRLQESRQKLKEKLNNAEESLNISERDQGEALKSVKEGEEVFIPSLNMKGIVISTQDSKGEVGIQAGIMKINVKLKDLRKTNNNPISKKEKAVKKREARLNLKSVAQSIDLRGLDSEEAIYKTDIYLDEAYMAGLGSVTVIHGKGTGVLRNAINTMLKKNSHVKSYRLGNFGEGGTGVTVVELK

SEQ ID NO: 51862 - protein, 393 aa, Clostridium acetobutylicum
MKILITTDTYYPMTNGVVVSINNLYRQLKTLGHDVRILALSPDGGEKVVGDVFYLSSFAIGIYPDARIMKPIKNKIVGEIIKWRPDIIHSQTEFSTMLVAKYIKRKLNIPEVHTYHTMYEDYLHYLLCGRILGKAGISKVTQKLLNSCEAVIAPTEKVRLKLQSYDVSTNIDVVPTGIDIKKFQKELNKEEKLELLSKYELTEEDTVLVYVGRIAEEKNIEEVIRLYRMALKLFKNIKLLIVGGGPYLSKLKGIIIKNRLSEYVKFTGMISPDKICKYYKLGDVFVTASTSETQGITYVEALSSGLPIICKWDMCVKGLIVNGQNGFAYRKDEEFLRALNYVIYNKKFKIHMMEMLQEKIKEYSTERFASRVLLTYNEALMESDDCYLVSKQA

SEQ ID NO: 51863 - protein, 63 aa, Clostridium acetobutylicum
MSRKCDICGKGLVAGVQYSHSHRQSKRTWLPNIRKIKAVVDGTPKTIHVCTRCLRSGKVQRAV

SEQ ID NO: 51864 - protein, 1163 aa, Clostridium acetobutylicum
MKPIRVRIKGLNSFENEQEINFEKLTKRGLFGIFGPTGSGKTTILDSITLSLYGEVARKSSNFMNTNCNSLNVSFEFQISGKEIKRYLVEREFRRDNKTGSVRSKSAKIVDITGDEVEVLEEGAKSVNEKCQEIIGLSLDDFTRTVVLPQGKFSEFLKLEGKERRNMLERLFNLQEYGDELSFKLARKIRKEREKENVLVGELKGYENINEDVLKERRELLKENNDFFNEASKEYLKAEEEYNEGKEVWGLQIEIEEKNRVRKDLMEKKDEIDLKEKRARLGESSSKVKPYIDNYENTLKQIDILKEQILSRENTMKAISLEKEDMEKKLSIAKDNKEKALPKFMIKHHIILDAIKEKDLLDNIKLEKKRLQGKIEKLSLEASNKEELIKQNIKDIDSLTLKIQNLESKIDNLKVPEEYKNKINEGIFLLRNYDEKLKHKNKLGLDCDKFQVDFEKAKSKKEMLFNKLEEERSKLDTYTKKLQDLNKDFPKDDVLLTFQEKLNDSRQKWAKYSEYNESLKASLRVVENSEQVLRTKKEEMTKLEDKISKVNIKIESLETENMAHVLREKLKSGEACPVCGSVHHIKEGFKEVDLKALETLKSELEGFEKKRKFENEEIVMCEASIKVEEKNIKKLNESINNLGEEFKEVSLESMEKKFNYLKEKVNKFNLEKIQLDDNIKDLSERSNKIEVEYQKEKTVEKQCEKRIVDLKSELEEAIKEFNEVAYTIENLKAELKIQDFKFEMKEILEKERVRVEAEGEIKDLRNLLNIRHTEKEQLMDKCSRLKEELSKNKAELKEKDKIINEKIELIKNKVGVLDNLYELKEKIEGTIKKIEEQYNLCDKKMNEIEDKYRKCSDEIIKYHSNLSSLKDRKVNDIDKLNKILMEEKFENIEKAKENYLNDKEINLLKSDVEKYKNELSKVNGAVEVLSKKLKNRKLTEEKWIEIQNNRVEKASKAKALQERSIKLEEEVKNIEIKLKELGKLLKTKQELEHKLSLLDDLEKLFKGKKFVEFVALNQLKYISIEASKRLKEITGGNYGLEVDDNGKFIIRDYKNGGAKRDASTLSGGETFVTSLALALSLSNQIQLRGSAPLELFFLDEGFGTLDSNLLEVVMDSLEKIHSERLSVGIISHLEVIKERMPVRLIVSPAEAGVGGSKVKLEIS

SEQ ID NO: 51865 - protein, 88 aa, Clostridium acetobutylicum
MANIKSAKKRIKVIETKTLRNKMIKSALKTYIKKFEAAFEAKNVEESKTAFATVSKALDMAASKGIIHKNKAARKKSRLALKLNSLNA

SEQ ID NO: 51866 - protein, 144 aa, Clostridium acetobutylicum
MKSYLAKPQEIERKWYVIDVAGKPLGRAASQIASILRGKNKPIYTPNVDTGDYVIVLNAEKVLLTGKKADQKMFRHHTLYPGGLKEMSYKDAIAKKADFVFYEAVRRMLPSGVLGRKMIKKLKVYKGEEHNNEAQKPEVLELKY

SEQ ID NO: 51867 - protein, 317 aa, Clostridium acetobutylicum
MKIFRKKSLDKMMVSAEKTHLKKTLKTKDIAALGIGAVVGVGIFVATGTGAHKAGPGIIISFLLAGIVACLCGLCYSELATMFPVSGSTYSYAYITFGEIVAMIVGWCLTSEYLVACSAVASGWSGTFIGILKNAGIVLPKVITASPSKGGIVDLPAVLITLILTYILYYGMKESSRVNNIIVIVKIAIIVMFLVLGATHIKMTNYKPFAPFGFKGIFAGASVIFFSYIGFDAISTTAEEAENPGRDVSRGLIICLAVVSILYISVAFVLTGMVHYDKIVTEDAVPAALASVGIRWGSALVGIGAILGMISTMIAVL

SEQ ID NO: 51868 - protein, 121 aa, Clostridium acetobutylicum
MKFDNKAPIYIQIMDKIKIDIINGTLKPGDKLPSVREMAVKFKVNPNTLQRVYQELERENITYTQRGTGSFVREDSDMIINLKKEMASEVIENFIENIKEFGFGNKDILKIVEDKLNEEEK

SEQ ID NO: 51869 - protein, 498 aa, Clostridium acetobutylicum
MNKRIKVFFLVFLIVILGCFTNVFATNNSDAIEIGTSNLNGTAVNSAKVGNQLFHPEVGWARYDDTNPKMLFKGSFNDYPSNVYYNGSTKYGIGTALIKFYGSKFRILMSYNPDRSNSNFVTVDGTKIGQFDQIKGSLIPQALGFQENNLTEGVHVVQIDLGNNSTLDAFDIDDSGYLIQLDKNLTLNKTSETLTVGQTDTLSQVVVPDNAPDKSLTWTSSDPSIANVDTFGKVTAVKAGSAIITATTNDGSNLTSSCAVNVKDSNTTISLNKTTDNLTVGANDTLTATITPTDAVDKNVTWTSSDPSIATVDASGKITAVKPGTVTVTATTDNGKTASCNVTVENNTVNLTIFMQDSTTRQYTITKDEFTKFTNWYNLRANGGTFSDSYTFNLPVDASSSVIRRTVYFTTIESFEIISDDVPVEERNNTLTLLMKNSTIRKYSLTASEVNNFNNWYDLRSNNQTLQSYYIFNVPADDFSPARKDYILFNNITDSQVQ

SEQ ID NO: 51870 - protein, 122 aa, Clostridium acetobutylicum
MTIVVKRGDIFYADLSPVVGSEQGGIRPVIIIQNDMGNKYSPTVIVAAITSQINKAKLPTHVEISSEDYGLNKDSVVLLEQIRTLDKRRLKEKIGHMTDMDMKKVDEALLISIGLQNMFESV

SEQ ID NO: 51871 - protein, 379 aa, Clostridium acetobutylicum
MKSTKILILGAGPAGFSAAKAALGKCDDITMINSEKYLPYYRPRLNEIIAKNKSIDDILIKKNDWYEKNNIKVITSEFATSIDPNNKLVTLKSGEKIKYEKLIIASGSIANKIKVPHADEIFSLYSYDDALKIKDECKNKGKAFIIGGGILGIELAQAIIDSGTPASIGIILEYPLERQLDRDGGLFLKDKLDRLGIKIYTNSNFEEMGDLIRSSCVITAVGVKPNLDFIKDTEIASKRGILVNDHMETSIKDIYACGDVAEFYGKNPGLINIANKQGEVAGLNACGEDASYSEIIPSPILKVSGISIISCGDIENNKPSKVFRSTQEDKYIVCMLKENKIDAAAVIGDVSLGTKLKKAIDSSKSFDNISSLDAILNNL

SEQ ID NO: 51872 - protein, 296 aa, Clostridium acetobutylicum
MEKRSFLKKLKTEYVGRGFATICGVFIVILTLSIIFFIASKGISTFTKRHYSIFDFLMSSTWKPDSKTPKLGAFIFLEGSTMVSIGAVILSTPMAIALAVFMNIISPKLGDRVLKPSLELFVGIPSVVYGWIGVTVLVPFIKNHFGGVGFSLGAGILVLSIMILPTIASLSSDAIKNVHNEYIEGSYGLGATRWQTIYKIIIPSSKNGILTGIVLGLARAFGEALAVQMVIGNTVKSAQGLFSPTTTLTSVLTMDMANTPNGTAWNDALWSLAFLLLVISFIFIVIIRFIGRKGEV

SEQ ID NO: 51873 - protein, 424 aa, Clostridium acetobutylicum
MLDLKRIRTNPEEIKKALTNRGEDFDISVIDELVSLDEERRKNLVEVENLKSKRNKDSGEIAKLKKSGQNADELLAEMKKISDDIKGIDAKVSEIDEKMQYIMLRIPNIPHPSVPEGKSDEENVEIRKWGEPRKFDFEFKAHWDIGTDLGLLDFERGGKVAGSRFTFYKGLGARLERAVINYFLDTHVEKHGYTEILPPYMVNRVSMTGTGQLPKFEEDAFKVDNGFFLIPTAEVPVTNMFRDEILKAEDLPYKFAAYSACFRSEAGSAGRDTRGLVRQHQFNKVELVKFAKPEESYDELEKLTHDAEEILQILNIPYRVVRICKGDLGFTAALKYDIEVWMPSYGRYVEISSCSNFEDFQARRANIKFRRDPKAKPEFVHTLNGSGLAVGRTVAAILENYQNEDGSVNVPEALKKYIGKDVIR

SEQ ID NO: 51874 - protein, 535 aa, Clostridium acetobutylicum
MKTKYIFVTGGVVSSLGKGITAASLGRLLKNRGLKVSIQKFDPYINVDPGTMSPYQHGEVFVTDDGAETDLDLGHYERFIDENLSKNSNVTTGKVYWSVINKERRGDYLGGTVQVIPHITNELKERVYRVAKEKDVDVVITEIGGTVGDIESLPFLEAIRQIKYEVGFGNSCFIHVTLLPYLRKAGEIKTKPTQHSVKELRGIGIQPDIIVCRTEKEISKDVRSKIGLFCNIDGDSVISNLDAENLYEVPLMLHDQGLDSLVCKKLELECQEVDNSEWESMVKNIKSLSGEVTIGLVGKYVELHDAYISVVESLNHGGFANNVSVNVKWINSEEVTKDNVDSVLSDVDGILVPGGFGDRGIEGKIEAIRWARENKIPFFGICLGMQCAVIEYARNVLGLEGAHSSEIDPQTKYPVIDLMPDQKDIDDKGGTMRLGLYACKLSKDTNAYDAYEEEVIYERHRHRYEFNNEFRKRLTEEGLILAGTSPDDRLVEIVEIKDHPWFVGVQFHPEFKSRPNRPHALFRDFIKVACTVKEK

SEQ ID NO: 51875 - protein, 845 aa, Clostridium acetobutylicum
MINENRAASGLSEEEAKRLRKKYGYNTIQKKKNISMIKIFLSQFNDVMIWVLIAATIISGLMGEKADALTIIVIIIMNAIIGFVQEFKTEKSLEALKKLTAPTTKVIRNGSIRIMDAANLVPGDLVVLDTGDRIPADCILIDGTNMMVDESLLTGESIGVSKNNKDSNLYMGTTVLTGRCQARVIKIGMTTEMGKIANMLDNIDQEKTPLKEKLASLGKILVILCIVICVVVTVLGIIRGEDKYEMFLLGVSLAVAAIPEGLPAIVTVALAIGVSRMLKRNALVRKLPAVETLGCTSIICSDKTGTLTQNKMTVKAMYFNNQIYEKELYSEERFELLKRTFIYCNDCDYNFKEKGIDKCLFGDPTETALIRAFFKDTGKLKKFISEEKRIREEPFDSKTKMMTVISKGANGTSLYLKGAPERVIEKCKYIYINNKVELFTSTYKSKVNSVLESMSRKALRCIACAYKKENINKDGDMIFLGIAGMIDPPRLEVKDAVLKCRVAGITPVMITGDHKNTAFAIAKELNICSDVSEVISGEELDKLSEKDLYKKTDKIRVFARVSPEHKLKIVRAFKKKNKVVAMTGDGVNDAPAIKEADIGISMGVSGTDVTKEASSMILLDDNFATIVAAVEEGRVIYNNIRKFIRYLLSCNLGEVLTMFLSSVFNLQTPLLPIQILLINLATDGLPALALGVDPPDKDIMDDKPRDRKEGIFSRGLSEKIIIRGCLIGVCTILSFLVGLYMGFGLKTSRTMALGTLIMSQLVHVFECRSEKHSLFEIKLFTNIYLLGAVSISVIMLVCVVYIPFMEVLFHTSALSITQWIIVLFFSSFIALINSLYLYHNKSKNI

SEQ ID NO: 51876 - protein, 191 aa, Clostridium acetobutylicum
MINYIWFIFIFVGTIVGVLSGNGSTLSSSIINSTESSVKLMISLLGIMCLWCGVMRIAEKSGLTDKLSIVLRPILKIVFKDISKNNNVMGPMIMNITSNMLGLGNAATPFGIKTMEEMQKINKKKSTATNDMAKFLVINAACIQLLPTTIISIRAACGSSNPAIIVIPTIVTSVTVAIMGLIYCKILQRHF

SEQ ID NO: 51877 - protein, 383 aa, Clostridium acetobutylicum
MEIFLFACKFIKFKEVFKLNEAFMKRALEIAEKGSGYVNPNPMVGAVIVKDNKIVGEGYHEKFGGNHAEVNALNMAGKDAEGSELYVTLEPCSHYGKTPPCALAVVKAGIKRVIIAMEDPNPLVSTKGIKILKENGIEVITGVMKKESEKLNEVFIKYITTKRPFITMKMASTLDGKICTVSGESRWISGQTSRKYVHHLRSKYMSIMVGVGTAINDNPLLTTRIEGENVRSPIAIIVDSKLRVPKDLRIFNTLQERKIIIATTEYADKNKENELINMGVSIIKTPNKNGRVNLDYLLDELGKIGIDSVLLEGGSELNFSFIKEENIDKIMCFIAPMIVGGEKAKGAVGGKGIEKLKDSIKIYDMDSEKIGEDILVSGYLNRG

SEQ ID NO: 51878 - protein, 352 aa, Clostridium acetobutylicum
MKNLKDLLKILVEKEGSDLHISVNVQPVIRINGELNVLNDKNKITKDEVKNYAMQLLGDDYDKYLKAGEFDASYTLNGVGMFRVNVYKERGNDAIAVRNIPSKILSPKELGFPDVFNDLINAKMGLVLVTGPTGSGKSTTVASIINEFNLNTKRHIITLEDPIEYVHKSNKSLINQREIGKDSGSYVAALKAALREDPDVIFVGEMRDMETITAAITAAETGHLVLSTLHTIGADKTIDRIIDVFPEHNQTQVRIQLASVLKGVVSQQLLKKKDESGRIPAFEIMTFTPAVQNLIREGKTHQIQSLIQTGSKYGMITMDKCIIDLYKKGIISYETAVQSSVDKEFVTKMLIL

SEQ ID NO: 51879 - protein, 493 aa, Clostridium acetobutylicum
MEFKKNFDIKDDRNLTMLVDFYELTMGNGYLNKNVGNKTAYFDMFFRRVPDNGGYCIMAGVQQLTEYLSNLRFTKEDIDYLRSKHEFSEEFLSYLKDFKFECDVWAVPEGNPVFPNEPLVTVKGPAIQAQFVETMILLTINHQTLIATKANRICRAAGNRPVMEFGSRRAQGYDGAIYGARAAVIGGCSSTACTISEQMFGVNAVGTMAHSWVQLFDNEFEAFKAWADVYPENCVLLVDTYNVLKSGLPNAIKVFDEVLKPKGIRPSGIRIDSGDITYLTKKCRKILDEAGYSDCKIVISNSLDEHIITDVLLQGAEVDSFGVGERLITAKSEPVFGGVFKLCAVENDEGNIVPKIKISENQEKITNPGFKKIYRLFDKETDKALADLITLNDEVIDETKPLEIFDPIYTWKKKKLTHYYVKDLRVQLFKKGELVYENPEVLEIRNIAKKETEKLWAEVLRLENPHTYYVDLSKKLWDLKHNLLEKYSNAFNS

SEQ ID NO: 51880 - protein, 195 aa, Clostridium acetobutylicum
MIYVVTNRKLAKNKDLLGCVEKVLKYGACSVILREKDLGYDELYEIAKKIKFITDKHSAKLIVNGSLRVAEEVKAYAYHSSFVNFINNGGSKIIKNGVSIHSLEEAKRAEENGADYVLAGNIYETACKPGLKGRGLEFVNSISKNITIPEIAIGGISEENVQELINSGANGAAVMSSAMKNPAVIKKIIGKLNKK

SEQ ID NO: 51881 - protein, 391 aa, Clostridium acetobutylicum
MAIFRDYSINPTEHDRTIGDRRRHRELVEKAIKDNLADIVSEESIIGESKSKKIKIPIRGLKEYKFLYGNNSSSVGSGTGNEKKGDIIGKEQMGNGSKGKGKGAGNSEGEDIYETEVTIEEVFSYLLEDLNLPNLDKKKYSEIVTDSSKKKAGYQKYGIRPRLAKKRTVIEKIKREQSRKRAIKELGKDDKVERLPFSEEDLRYHRIKEKPKKECNAAIMCVMDCSGSMDSTKKYLARSFFFILSKFIRMKYVNVEIAFISHSTVGREVTETEFFHKVESGGTYISSGLNTAMDIIKERFNPATWNIYGFYVSDGDNFTEDDERAIKSMRKFCEIANMIGYAEILPYSYSGTMKYKFDNYVKDKNFISSTIRNKEDLWPVLKKMLIKELKE

SEQ ID NO: 51882 - protein, 143 aa, Clostridium acetobutylicum
MDLNSIYTEIITEHNASKHNKHKIEDATLVENGHNPSCGDDITLQLKIENNVIEDAAFIGVGCAISQASTSIMIDLIKGKTVEEAKKLVETFIGMIKREITDEAELEQLEDALAFKNISNMPARVKCAVLAWHTFEECINEKK

SEQ ID NO: 51883 - protein, 334 aa, Clostridium acetobutylicum
MSVTIKDIAKIANVSHTTVSRALNNSPVINEETKRKILEIAKKLNYVPNFNAKSLVLNKSYNIGLFFSSISKGTSPSFFHEVVEGVNSIIEESYNLVIKGIDNCNDFNYISKKRFDGIILVSQSESDNSFIYDVINKEIPIVVLNREIEEQNVINIIAAEKDGAYKAAEYLIKNGHSKIAIIEGKAGFKSSVYRKMGFINALIDNNIEIKNEYFQAGNYDVESGFSAMKKFLKLKDRPTAVFCSNDDMAVGAVKAIELEGLRVPDDISLVGFDGSIFCEYVTPAITTIRKPSREIGIVGANKMLDVIDETEFNKKKIYIGTELIVRDSVKNLSK

SEQ ID NO: 51884 - protein, 245 aa, Clostridium acetobutylicum
MSKDLAIEVKELKKSYGSNEVLKEINLTIDRSEVVCIIGPSGSGKSTLLRCMNRLEEITAGQLMIDGKDISDKNINIDKLRENVGMVFQHFNLFPHLSVLKNITFAPIELNKMSKEEAEKTAFKLLDKVGLNDKANTYPDKLSGGQKQRVAIARALAMNPDIMLFDEPTSALDPEMVGEVLGVMKDLAKEGMTMVVVTHEMGFAREVADRVIFMADGYIVEQGTPDDIFKNPTQDRTKDFLNKVL

SEQ ID NO: 51885 - protein, 206 aa, Clostridium acetobutylicum
MARYTGAVCRLCRREGLKLFLKGDRCYTDKCAFTRRGYAPGVHGQSRKKISNYGLQLREKQKAKRIYGVLEKQFRIYYKRAERIKGISGENLLKLLELRLDNVAYKLGYGSSRKEARQLVTHGHFLVNGKKVDIPSYTLKVNEVVSVSEKSRGTEKFKTFAENPKTLPAWIEANYDNFEAKIVAEPNREDIDTPIKETLIVELYSK

SEQ ID NO: 51886 - protein, 341 aa, Clostridium acetobutylicum
MQLEDFDYYLPEELIAQHPCDKRDECRLMVVDKKSGEVEHRIFKDVIDYLNPGDCLVLNDTRVLPARLIGNKVGTGGKMEFLLLKRIDKDTWETLVKPGKRAKVGAEFEFGGGVLKAVIKSIGEDGNRVVEFKYEGIFEEILDKLGQMPLPPYITEELENKEEYQTVYSKNNGSAAAPTAGLHFTNELLDKIRAKGIKTVFLTLHVGLGTFRPVKVENIESHHMHSEYYMLSKESADTINETRKNGGRIISVGTTSTRTLETIADEKGNVREQSGWTDIYIYPGYKYKIVDGLITNFHLPKSTLVMLVSALSSRDNILNAYKIAVENRYRFFSFGDAMFIK

SEQ ID NO: 51887 - protein, 349 aa, Clostridium acetobutylicum
MQRIETRKVKVGSVYVGGDSRVTVQSMTNTDTRDSKKTIEQIKKLEIAGCDIVRCAVPDFDAASSLSEITKNVKLPVVADIHFDYRLALEAIKNGVSALRINPGNIGSKERVELVAKSAKEKNIPIRIGVNSGSLEKDILNKYKRVCSEALVESALNHVKILEDVNFNDIVISIKSSNVQMMIDSYRLISKEVNYPLHLGVTEAGTIWRGTIKSSIGIGTLLSEGIGDTIRVSLTGDPVEEVKVGREILKTFGYLKSGVEFISCPTCGRTSIDLIKIANEVEKRLEKTNKSIKVAVMGCVVNGPGEAREADIGIAGGKGEGLIFKKGEIIKKVKEENLVDELMREIDNM

SEQ ID NO: 51888 - protein, 1166 aa, Clostridium acetobutylicum
MNRLTKFSLKNMFVIFLIIILITVGGLYSTKTINMESMPNINIPVVTAVTVYPGASPEQVASDISRPVQKAISGIQGIQDVKTTSNENVSVVVAQFDYSADMDKAQKNVEDAVNKIKFPESAKKSTISRISMGSAPIMTYSINSTKSIDELTKIVNDKIEPKLSGISGVSSVEMQGTSNDDIYVKVDNDKLKNNGLTLSDVKTALQGNNISIPAGSVNVGDSTLPIEMTKKLYTTADIEAMPIAVIPNQTKVVGEAFQQVQGGMTQLGQAVGQLGQNMGQLGQAVGQMGQGMGQMGQMVGGNTQSIAILNQMQKAQSQILLEQEVLTNPTSSAQDKTKAQATITAAQGMLQQAQAQLDKLMGAQIESSKALSSSAGSLKTAAPSQGTAKSSSAPSLGSSSSSSSSNASQIKVVYLKDVATVTRGSADKSYFIRSNSKNSIILNIYKTDDGNTVNVAKDVASALEDLQKSNNGIKFNKISDSSKYVKDSVNGMVREGVLGALFAIVVIAFFLKNIKATIIAVVSIPLSILIALILLPRFGITLNIMSLSGMAVAVGRIVDDSIVVIENIHRRILKDDVEKGKIIQVAADEVSSAITSSTVTTVAVFLPLAMISGMVGKVFVPFAVTVVICILASLLVAVTVVPVMSRLMILNEKPKPEKGEGAIVGFYKKVLNGALNHRAAVMGVSVVLFVLSLFLIKGIGIQFLPSSSSNVLNGTITTAPGTSAEKTNEEALKFEKYLLNRSDVKTVVSSIGDNSSSSSSAMSMQGGNSGKITIVLKDGVNNDKSADEIIKKATDMSSKNTKFAVTVQSFTSGSKDNVEIVVNGNNMKDITAAASKATEALKGVKELTNVNNTLSSKKPEISVAIDSAKAANEGLSPMIAAGMVQGIMNYNNVTTIQSGKNNVNVYLGYDNKDINSLDKVKTIQLQGASGSFNLSDIADVQVADGPVSVEELNGNQYASITADVKTKDTQTASKNAMEKIKSIKGIPNGVTFTQNGSAKSISDSFSQMGMAMLVAVFMVYIVMVLAFGEPKAPFAILFSLPFAAIGAIVALFITRQPLGIPGLIGMLMLIGIVVTNAIVLLDRVQSNRKKGMLVREALIEAGAIRMRPIFMTAIATVMALTPLAAGFSEGAVISQGLGIVVIGGLVVSTILTLIIVPVMYSVLERD

SEQ ID NO: 51889 - protein, 65 aa, Clostridium acetobutylicum
MNKEFDLGYIVEMKKQHPCGTNRWEIIRVGADVKIKCVNCGRIIMLPRSQFEKRLKKVLEKKEEN

SEQ ID NO: 51890 - protein, 248 aa, Clostridium acetobutylicum
MGEKLLQINNIHAEADGKEILKGLDLTVGKGEIHIVMGPNGAGKSTLMNVIMGHPKYKITNGNINFEGEDITDLKTDERARKGIFLSFQNPEEVAGITASDLIRSARTQAEGKPIKLMAFRKELKEKMALLEMNESYSERDLNVGFSGGEKKKNEILQMLMLNPKLAILDETDSGLDVDAVKIVSEGISKFKNENNSLLIITHNSKILESLKPDFVHVLLDGKIVKDGDISLMNEINTKGFVDFKKMV

SEQ ID NO: 51891 - protein, 343 aa, Clostridium acetobutylicum
MLLGGNFIMGENKKVIFSGIQPSGELTIGNYFGAIKNWVKLQDEYDCYYCIVDLHAITVKQEAKDLRRRTLQLIATYIASGIDPEKNTIFIQSHVPAHVQAQWILNCMSYVGELSRMTQFKDKSKKYEDTGIGAGLLNYPVLMAADILIYQADLVPVGKDQTQHIELTRDLAQRFNSTYSETFKIPEGYIPTGGAKIMSLQEPLKKMSKSSDNPNSFILIMDPPEVIKRKIARAVTDNVGVVKYTDDQPGVKNLMNIMSCCTGMSVKDIEDKYEGQGYSKFKEDVADALIQELEPIQNKVNELLKDKAYLQDICKKGAQKASYIANKTVSKMMRKVGFILPEK

SEQ ID NO: 51892 - protein, 114 aa, Clostridium acetobutylicum
MLDVIKEIEAEQIRTDLPSFNVGDTVRIEVRIKEGEKERLQAFEGTVIKRQNGGLRETFTVRRVAYGVGVERTFPLNAPVIAGLKVVRRGKVRRAKLYYLRDRVGKAAKVKEIR

SEQ ID NO: 51893 - protein, 189 aa, Clostridium acetobutylicum
MWSYDKITDYLMNNLGEKRYKHSLGVMDTAVRLAGIYNEDTEKARIAGLVHDCAKKLPGEKIIEICTNEGYELGDEDIRNSYLLHGLAGRILAKKVIGIDDEDVLNAIEFHTTGRPNMSLLEKIIYIADYIEPGREFKGVDELRKAADEDLNKALLMSFDNTIKFVIDKGGFLHHNTIEARNYLISRKG

SEQ ID NO: 51894 - protein, 254 aa, Clostridium acetobutylicum
MFKINALNNLFVQFFDSINKFVYNIVPDKNYSYGLAIIILTIIIKTLLVPFSIKQIKSSVLMNALQPELKKLQTKLKSDPQKLQQETMKLYKEKNVNPFGGCLLLIIQYPILIALYYVFYSLHIKGIGFLWIHDLSQKATFSNWTTWILPIVSGATTYLSGILTMPPSSDPAQRKQTTTMNIGMSIFLLWMSWNFSAALVLYWTVSNLFQMAQSKIIITAVTAKLEAEKNSVEDSSNIISQNIDNKKNKKNKKK

SEQ ID NO: 51895 - protein, 174 aa, Clostridium acetobutylicum
MNIPNLLTLFRFFLIPCFIFAFFSRSNDSLINSAIIFFIAGFTDILDGYIARKFNEITKYGTVMDPLADKLMLLTVLCCLTIKGYIPLLILLIMLAKEFSMIIIGVFLYGKNIIIPANIWGKLSTLIFYVAILFFTFSKFLGTYLLYIAILGAVVAYINYFLIFLSKYRQNATK

SEQ ID NO: 51896 - protein, 514 aa, Clostridium acetobutylicum
MNNTNKLIITIVCLVIIITIVEMYIRRKYAWAKISKAEEDAKKIKEDAKREAETLKKEATLEAKEEAHRLRSDLDKETRERRNEIQRLERRNLQREETLDKKNDLLEKRENGLNERENSIQERQNTIEQLYKEEREKLEQLSGLTSEEAKNLLLEEVNREIKHEKSIMIKEVEQKAKEEADKKAREIITYAIQRCAADHVAESTVYVVSLPNDEMKGRIIGREGRNIRAIETLTGVDLIIDDTPEAVILSGFDPVRREVAKVALEKLILDGRIHPARIEEMVEKAKKEVENNIKEEGEQATFETGVHGLHSELTRLLGRLKYRTSYGQNVLKHSIEVSYLAGFMAAELGIDPTFAKRAGLLHDIGKAVDHEVEGPHALIGAEVSKKYHELPLIVNAIGAHHGDVEPQSLEAILVQAADAISAARPGARRETLEAYIKRLEKLEEIANSYEGVEKSYAIQAGREIRIMVKPETVDDAGSIEMARGIVKKIEEQLEYPGQIKVNVIRETRAVEYAK

SEQ ID NO: 51897 - protein, 117 aa, Clostridium acetobutylicum
MLNKVQSRKRRHLRVRNKISGTPERPRLAVYRSEKNIYAQVIDDVNGTTLVSASTLDKDFSAKAGSNKEAAKLVGGIVAKKALDKGIKQVVFDRGGYIYHGRIKELAEAAREAGLEF

SEQ ID NO: 51898 - protein, 211 aa, Clostridium acetobutylicum
MEEDSFYTKGEEIANAITHLVGAALAIAAIVILVVFAARNGNAWYVVSYSVYGACLFILYLFSTLYHSIFNKRAKKVFRIFDHASIYILIAGTYTPFSLTVLRHHGGWIIFSVVWIAAIIGITLKVFFCGKFEKLSTLLYVIMGWMIVIYFKTLLASMPFTGIVFLVAGGIVYTLGALLFLFDKIPYNHAIWHLFVMGGSVCHFFAVLYLL

SEQ ID NO: 51899 - protein, 221 aa, Clostridium acetobutylicum
MGITYNLQKVKEKIPKEVTLVAVSKTKPIEDIKEAYEQGIRDFGENKVQELMSKYDEMNSDVRWHLIGHLQVNKVKYIVGKVFLIHSLDSIKLLKEIEKRYTNEGLKADVLIYVNIGREESKTGILEENLEALLDECQKCNSVNVKGLMAVIPVGDDNSNRHYFRKMKAIFDDLKHKNIKNVDMKYLSMGMTHDYEIAIAEGANIVRVGEGIFGKRDYNKI

SEQ ID NO: 51900 - protein, 697 aa, Clostridium acetobutylicum
MGQKLVIVESPAKAKTIGKYLGKNYIVEASMGHVRDLPKSTLGVDIDDNYNPKYITIRGKGELLDKLKKAAKKCDKIYLATDPDREGEAISWHLSKVLKIDESEKCRIEFNEITKNAIKTAIKCPRKININLVDAQQARRVLDRLVGYKISPILWRKVKWGLSAGRVQSVALKMVCSREKLINDFKPEEYWSIDAQVYKQSKKDKFTIRLTSFKGKKIKINNEEENEQIINSIKKDEFKVENVKEGTKNKNTLPPFTTSTLQQDANKKLNFSTKKTMSVAQQLYEGIDVKGHGTIGLITYMRTDSVRVSKEAQEAANDYILNEYGKEYLPPSPKLYKSKKNIQDAHEAIRPTYIELTPGMVKSSLKDDQYKLYNLIWSRFMASQMANCILNTLSIEIKNGEYTFRASGSNVKFEGFMRVYKYNIEEDEHNEKIPLLQKGDLLHTDKIDGKQHFTQPPARFTEASLVKTLEENGIGRPSTYAPIISTLIDRKYVKKEKKAIFPTELGNIVDNILSDYFKQIIDIEFTADMENKLDNVEEGKENWKEIVDEYFKPLKEAIDIAEKEVAKITIEDEVTDIKCDKCGRNMVIKHGRFGDFLACPGYPDCKNTKPIVEKLKVKCPKCGGDVIVRRSKKGRKFFGCSNYPDCDFVSWFEPTEENCPNCGSFMVKKFSKAKGYYLQCSNQECKYEKSNPDPDKK

SEQ ID NO: 51901 - protein, 111 aa, Clostridium acetobutylicum
MEAKAIAKYVRMSPMKVKIVLDLIRGKNVNEAFAILQYTPKDAAVVINKVLKSAVANAENNFNLDGNRLYVSEAYAGQGPTLKRFQPHAQGRAFSIKKRSSHITVIVKERD

SEQ ID NO: 51902 - protein, 173 aa, Clostridium acetobutylicum
MSEKAKWYVVHTYSGYENKVKANIEKTIENRNLQNLIMDIQVPLQEEVEEKDGKKKVTLKKVFPSYVLIKMVMTDESWYVVRNTRGCTGFVGPGSKPVPLTDDEVKSMGIREKVASIDIVVGENVKVISGPLMDQVALIQEINLEKGKLKGLVNMFGRETPVELDFNQIEKLD

SEQ ID NO: 51903 - protein, 195 aa, Clostridium acetobutylicum
MYRPKDHGWVEVIVGPMYSGKSEELIRRIRRAKIAKQKIQVFKPEIDNRYSKEDVVSHMGEKEQAVAIKNSREILKYFEEDTEVIAIDEVQFFDDEIVEIVNKIAESGRRVICAGLDMDFRGKPFGPIPELMAIAEFVDKIQAICVVCGNPATRTQRLINGKPAFYDDPVVLIGAMESYEARCRKCHVVPQKKEV

SEQ ID NO: 51904 - protein, 356 aa, Clostridium acetobutylicum
MSGVWGNKIKLSIFGESHGKAIGIVINGLEPGVELDLEFINSEMERRAPGRTKYSTQRNEKDNFEIVSGFFNGKTTGTPLCAIIWNGNQHSKDYSNVKDFARPGHSDYTGFIKYKGFNDYRGGGHFSGRLTAPLVFAGAVAKQILFKDNIIIGSHILSIKDTKEKYFDKVNIDSETLISLTKKAFPVLDDKKGEEMKEVILKAKNDLDSVGGIIECCALNLPAGKGDPFFDSCESILSHMLFSIPAVKGVEFGEGFNITKMKGSEANDDFYTKNGIVKTYSNNNGGILGGITSGMPLVFRAAFKPTASIYKPQKTINMKTMENEEISIKGRHDPCIVLRAVPVVEAACALSILDII

SEQ ID NO: 51905 - protein, 662 aa, Clostridium acetobutylicum
MNIDELSINTIRILSAEAIQKANSGHPGTPLGAAPVAYTLWSKYLKHNPSNPKWVNRDRFILSAGHASMLLYSLLHLFGYKISIDDLKNFRQWESITPGHPEYGVTPGVEISTGPLGQGIANGVGMAIAEAHLASKFNKQGFDIVDHYTYVLSGDGCMMEGIASEAASFAGTLGLSKLIVIYDDNDISIEGNTDIAFKENVGERFKAYDWNVINVEDGTDVSSLSKAIEKAKQQNDKPSIIIAKTVIGFGSPNQGTAGVHGSPLGETGVSGLKKNLNWNYEEEFYVPEEVKEHIKKLQKTFEENESNWNELLNKYKEKYPDLFDEFNAWMNGEVKVKLDEIDAFKELEKPMATRDSSGKALNIIANVVPNLIGGSADLAPSNKTYMNDKGDFSSDDRSGSNLHFGVREHAMAAIANGVSAHGGLKIFVSTFFVFSDYMKGAMRMSALMNLPVVYVLTHDSIGVGEDGPTHEPIEQLAALRSIPNLTVLRPCDSKETVEAWKYALEREDGPTALVLTRQKLPLYNETGKGLLKGAYTLKDSKKDVPDMLLMASGSEVELVYEAQEELLNKGIDSRVISVPSFELFDKQDKAYKESVMPSSVRARVAVEAASSFGWHKYTGIDGEIISIDHFGASAPAETLFEVFGFTKENVIKTSEEVLKNNK

SEQ ID NO: 51906 - protein, 728 aa, Clostridium acetobutylicum
MGKILVLAEKPSVARDLAKVLKANINKKTHLEGNKYVVIWALGHLVSLADPESYGEKYKKWSMDTLPMLPKNMKLSVLKNTSKHFYDIKKVMERKDLDELVIATDAGREGELVARWIIEMAKWKKPIKRLWISSQTDRAVRDGFAHLRDGRDYENLYKSAKCRSEADWFVGLNVTRALTCKYNAQLSAGRVQTPTLYMIVSREEEIRKFKPKDYYTIEGKVKSFSMNWHDKSGDFKIFNKERAEKIEALVKGSKGKIVDVSESKKKKYSPALYDLTELQRDANRFFGFSAKETLSIMQRLYENHKLLTYPRTDSRYIPHDVVATLPDRLRAISIGKYSKFAAEILRSKINVHKGFVDDSKVTDHYAIIPTEERPALGALSNEEFKIYDLVVKRFLSIMLPPFEYIQTTVKAEVAGEIFIAKGKVVKSKGWKEVYDKTEDFEEKSELKDQMLPEMNKGEDITFSTVSIKKGQTKPPSRFTEATLLSAMENPQRYVSMDKISAKTLGETGGLGTVATRADIIEKLYKTFYIEKKGNEIVPTSKGKQLVNLVPSDLKSPLLTAKWEGQLDAISKGKLNGVSFVNEIKGYASKLVDDVKGSKDTFKYDNLTGTKCPECGKYMLQVNGKKGRMLVCQDRECGHRENLAMFTNVRCPECHKKLELRGEGEGRIYVCPNCSFREKYSSFQKRFKGNNNKVNKREVSNYMKKMKKEAEAPINNAFADLMSMFKDKN

SEQ ID NO: 51907 - protein, 325 aa, Clostridium acetobutylicum
MKGIDIYSGQGNVEFSKVKLSGVEIVYIKATEGVTYVDKTIRQFQSDAKNAGLKVGFYHFLRANNPINEADNFLSAISGLSYDCKLAIDVEATLGQTTNQISSNVRKFADYLKGKGLDVCIYTYTNFYKNNLNNSVKDLPLWVAEYGVTRPSINTPYVGFQYTENGSISGVSGAVDLNEFNDGIFINSDSRGEFIITGSDTVKIIQQQLNTLLKKGLIVDGISGASTTAAIKEFQGAMGLAQDGIWGPKTVAAVTEIYSKPTDGVKFKHYEYATRYIQYRVGGKLDGVYGPQTEANVKVWQSNHGLNADGIVGNDTWNKLLNENS

SEQ ID NO: 51908 - protein, 119 aa, Clostridium acetobutylicum
MKENRIRKNAEFRRVYRKGKSFSNRLLVLYVYKNYILKDINRIGISVSKKVGKSVVRSRVKRLIGESYRLNSSNLKKGHDFVIIARTACNGKRYSDIEDSIKNLFNKAGLVIYDEKNIT

SEQ ID NO: 51909 - protein, 368 aa, Clostridium acetobutylicum
MLSVIKTAIATIIISIISGLLLEYVKNVKNVAPKILCTVGKCVSLQMNGKKVFAYIVTVSNMSKNTVHELTLNIQSQRGSLNIADAKITKGLKFDSSIEYNTVDISMPFLSKGDKFSVTVYVETPNKPHIVLRSPENFKQVDSMDQKGVLASVFSMPKNVAETILGSKDEKGGTGTNRGLSKNKKVILAVASIALVILAAVAVKLSFQDDSPNKTQANSSKANTESKPANTTKPTGSTPTTSTGSNDSKSGSSVNSETNPSKSGSNKSTGTTSQSGGSGTGTDTKQSTGSGTNTKESGNSNSNTNTSSGTSTDTKTSTGETTGGSSTNSGTNTSGGTTNTNQDTKTSGSGTSSNSGSTTTTNGTTSGN

SEQ ID NO: 51910 - protein, 187 aa, Clostridium acetobutylicum
MEKLITSPIRQEEIQDLRAGDRVLISGYIYTARDAAHKRLIELLNEGKDLPIDIQNQIIYYAGPTPAKPGKVIGSAGPTTSGRMDAFAPRLLDMGLKGMIGKGARSKEVVESIIKNKAVYFGAVGGAAALISKSIVESKIIAYSDLGSEAIRKLKVIKFPAVVIIDTVGNNLYEIGRKSYLDKFVHE

SEQ ID NO: 51911 - protein, 187 aa, Clostridium acetobutylicum
MIYIKDEEFIRGDCPMTKEEVRILSIAKLEIEEDDTLLDIGAGTGSISIQMSKCTPKGKVIAIEREEKALKVLEKNKEKFKAHNLYIIKGDASQLNLDESFDGVFIGGSSGNIDKIIKSYALKLKKGGKMVMNFITLDNLYRAIETLKELNFEVECSQIAVSKMRAKSYMMLSNNPIFIVTGKVMEG

SEQ ID NO: 51912 - protein, 466 aa, Clostridium acetobutylicum
MEIFRKKTAEDFQDEASSSNLKRGLTSFDLAAIGIGAVVGTGIFVSTGQGAKLAGPSVVISFLVAAVTCGLCSLTYCELSSMFSVSGSTYSYSYIAFGEIIAWIIGWDLMLEYLVAASAISSGWSSTLIGIVKNYGVNVPDALTKSPLSGGIVDLPAIFITLVITFLLYRGVTESAKINNVIVGVKICIIALFVFLGITHVKVTNYHPFVPYGVNGIMSAAAIIFFSFIGFDAIATTAEETKDPKKDVPKGLLICFGVVVVLYMSVAIILTGIVPYTKIDINNALPGALSSIGITWGSALVGVGAVLGMISTLLVIMYGQIRIFMVMSRDGLLPKVFSSVNKKHSTPGLCTVITGVLVSIIAGFLPLKMIMELCNIGTLFAFILVSFGVIVLRYTMPNVERKFKCPGVPFTPLVTAFFCFYMMIHLPLFTWLRFGAWLLIGFVIYFVYGSKHSKMTARDRGKEEVS

SEQ ID NO: 51913 - protein, 321 aa, Clostridium acetobutylicum
MIVSKNDDGDFDTIQKAVDSVSKNNKKRVIIKVKAGVYKEKLSIRKPFISLIGEDVSSTVITFNDSANTLMANKERMRTFNSYTMFVDGDDFICENITVENNAGDGDLVGQAVAVYADGDRMIFRNCRLLANQDTLFTGPLPPKPIEGNNFGGPKDGMKRRDVRQYYENCYIRGDIDFIFGSATAVFNKCEIFSNDKNKEVNGFIAAASTPEGKEFGYVFLDCKFISDARKHTVYLGRPWRDYAKTVFIRCFMGEHIIPEGFHNWNKANAEKESYYAEYKSYGPGAANDKRVKWAKLLNDKEVEKYSITNILKGNDDWKVI

SEQ ID NO: 51914 - protein, 49 aa, Clostridium acetobutylicum
MRVKLTLACTECRQRNYNTMKNKKNDPDRLEMKKYCPFCHKHTLHKETK

SEQ ID NO: 51915 - protein, 468 aa, Clostridium acetobutylicum
MSLNGFYLLPHPPIVVPEVGRGEEKKIENTTKSFEAIAKDIAGKAPNTIIIVTPHGTMFQDYIALAYEDEISGSFKDFRAPNVSMELKINKELTSKIYELAYGERIPSVMATNDILKKYNTSVFLDHGCMVPLYFINKYYKEYKIVHITYAALSDIELYRFGMNVTKAVEELNENAVFIASGDLSHRLREDGPYGYNPAGEKFDKELLNNLKDGNVEGVFSIDKDTVYNAGECGRRSVAVLLGTLEGKKFKGEILSYEGTFGVGYGVMKLEAFSNDTSKLKELERIRKDEYESKKQEKDPYVKLARESLTQYLTTGEAIEEIPDYVTEEMRDLKRGVFVSLKKFGDLRGCIGTIFPVTDNIAEEIIRNAIEAGLNDPRFYEVGKDELVDIDFSVDVLDEPESATREELDPKKYGVIVTHGRKKGLLLPNLEGVNTVEEQLEIALEKADIDSHEDYTIEKFMVTRHKES

SEQ ID NO: 51916 - protein, 236 aa, Clostridium acetobutylicum
MNYDLTNPYEIAKYIKEAKKTTPLKVYVNGNLGDCTADDIDCFGTDDFYILFGESDKISAFLESHGDKIKKFKIEQDRRNSAIPLIDMTKIDARIEPGAIIRDKVSIGKNAVIMMGAVINIGSEIGEGAMIDMNAVVGARGKIGKRAHIGAGAVIAGVLEPPSKSPCEIGDDVLIGANSVILEGVKIGANSVIAAGSVVVEDVPSGVVVAGTPARIIKEVDDKTKDKTQIMDDLRK

SEQ ID NO: 51917 - protein, 228 aa, Clostridium acetobutylicum
MSKVTFYFMRHGETIINRAGRVQGWCDGVLTDEGIRVAEYAGEGLSDIEFKAFYSSDLGRAIKTARIVLGKNKRSENAELKEVPELREVYCGKYEGEFEKVMFSDILKYLKVESIEEALRKVPNFERAYVDSCAAMDETNEAEDYDILSKRINKAITDIGEETSKNGGGNVLVVVHGGMLRVLLRNLGYKQHIHNMENCSISTVQYQEGKFRILSINDNSYKRRGKEM

SEQ ID NO: 51918 - protein, 539 aa, Clostridium acetobutylicum
MIKKGISASKGYAIGHVFIKADNEVKIVEKKISDIESEKARLQGAVEKAREQLTKIKEKAEKDLGADKAAVFESHMMFLDDPDFIGSAENIISDEMINAEKALENVMKNYVAIFEGIEDEYVKERIADVKDVGNRVLQNLAGNDMTSLADVDNNTVVVAHDLTPSDTAQLDKNRVIGFLTNIGGRTSHSAIMARTLEIPAVVGLQDIVESVKNGDTIVVDGAEGIAIINPDEATLKEYEAKKAEYEKKQEKLRELINVETRTKEGKRVEVCGNIGKAKDVEAVLQNGGDGVGLFRTEFLYMDRDQMPTEDEQFEAYKAVVEKMGEKPVVIRTLDIGGDKKLPYLPLPEEMNPFLGYRAIRLCLGRKDIFKIQLRALLRASVYGNLKIMFPMISSLEEFLSAKEVLKECMGELDKEGKKYNAKLETGIMVEIPAAAVNSEELAKYVDFFSIGTNDLIQYTLAADRMNEKVSYLYNPMHPAVLKLIKMTIQSAHKEGKWCGMCGEMAGDEKAIPTLVEYGLDEFSMSASSILTAKELIMKA

SEQ ID NO: 51919 - protein, 307 aa, Clostridium acetobutylicum
MKKILISIMIIMMIFGSACSQNSIKTSKDTSKEAETITYKSENGPIKVPAHPKRIVALNGSTSGDIMKLGGNIVGVEKYSMANPLYKKYLKNATVVSDEDLEKIIELKPDLIIAGSTDKNLDKLSKIAPTVSYTYNKLGYLDQVIEIGKLINKKKQAQEWVNNFKKRASDAGEKIKNKIGNNSTVTILGGDNKQLYVFGSNWGRGSEILYQAMGLKMPAKVTANALKPGYYVISSEVLPQYIGDYLIYIKDSAADNSFQNTDTYKNIPAVKNNRVLEVDANKFYFNDPISLDYELDTFINYFLGNSK

SEQ ID NO: 51920 - protein, 431 aa, Clostridium acetobutylicum [sequence omitted]

SEQ ID NO: 51921 - protein, 601 aa, Clostridium acetobutylicum
MSIKKDSIKVYDMTCTSCEKKIEKALKTLPGVISVKASFVKQIVTIEYDDTICTIQKIKSEINSAGYRTEAKNIYKIAGFALIALFMVFMSTSTSGFDITSKLKGATYFIIFIVGVLTSIHCVGMCGGILLSQSITKEGNKSSSIKSAILYNSGRVLSYTILGGIVGALGSVFNLSLGLKSFLQIFAAAFMIIMGLNMSGFSLFRKIQLKLPFPRRIFKKAPKTPFFIGMLNGLMPCGPLQTMQLYALSTGSPIKGALSLFVFSLGTIPLMMTFGVLSGFISKGSTKVLLKFSGILVMVLGIIMGGRGLALAGVNVPTVSSIKNSVLASPSKDTNNSASKAKIVNGVQVIKMTADENGYTPNGLYVEKNKPVKWIIDGKSLNSCNGTIVIPDLNKEITLKSGENVIEFTPKGKDISFSCSMGMIRGVIKVVDNVASVDTSKKDSSIPKPSSGMSCCTGGSSASSSSQASSIYGSDISKVPTANLVNKANLNGNSQSLTLTGKGYEFQPLISVLNKGVETKLSVDLNGFDNPNGEYSIIDLNTRQTVTTFNGKKGIVEVDFKIDTSGSYGIVKDNNMIEALEVVDDLNTSDLEQIRTKYLGR

SEQ ID NO: 51922 - protein, 485 aa, Clostridium acetobutylicum
MELYKLKAHELKDMISKKEVKVEEVTNSFLNRIEEVDEKVNALLYVAKEEAVNTAKELDKKIESGESLSGLSGVPVAIKDNISVKNMQNTCASKILEGYVSPYDATVIENLKKNNGVIIGKANMDEFAMGSSTENSAFKVSKNPWSLERVPGGSSGGSAVAVASLEAPISLGTETGGSVRQPASFCGLVGLKPTYGRISRYGVVAFGSTLDQVGMFARDVEDCALLTQNIAGLDKMDFTTVDTPVQDYSKSLNKDLKGRKIGIPKEFFEEGLDEGVREAVKEAIKVFEENGAEVKECSLPLSDYALAAYYIISSAEASSNLARFDGVRYGYRDAEAENALDLYVKSRSKGFGEEAKRRIMLGTYVLSKGYYDAYYKKALKVRSLIKNDFQRAFKEFDAIITPTTPTPAFRIGEKTKDVLSMYMSDIYTVPVNIAGIPSISVPCGFVSGLPVGLQIMGNYFKEDTLFNLAYSYEQSTKWHDKIANL

SEQ ID NO: 51923 - protein, 132 aa, Clostridium acetobutylicum
MVMTDPIADLLTRIRNANVVRHGVVELPSSKIKKAMANILLQEGYLKDIEEYNDGVVPMLRLSMKYGKGKERIVTGLKRISKPGLRVYCRKEEIPKVLNGLGIAIISTSKGIVTDKEARKLGLGGEVLCYVW

SEQ ID NO: 51924 - protein, 98 aa, Clostridium acetobutylicum
MYTNSHDIIRKPVITEKSMAEMADKKYTFIVDPHANKVQIKKAIEEVFGVKVEKVNTSNILGKTKRVGVHVGKRADYKKAIVKLTEDSKAIEFFEGMQ

SEQ ID NO: 51925 - protein, 289 aa, Clostridium acetobutylicum
MDGILNIFKPIGLTSFDVVRQVKKISKEKKVGHTGTLDPLASGVLPICIGKATKIVDFVMEGKKIYDAEMKLGEISDTYDREGKILKVNQVTSSENNIVEAIMSFQGEILQVPPMYSALKVNGIKLYDLARQGIEIERASRKIHIYAIKILSIDIPFVKFRVECSKGTYIRSLCYDIGNKLGCGALMYNLTRVSSGNFNSSFSIPLEDLNEQNITENIINVDKCLENYDEIAVDEKFEKLLVNGVKVSDRRLIEKIPDNKTYRVYNMERKFLGLGNLSEEGFKIIKLLT

SEQ ID NO: 51926 - protein, 326 aa, Clostridium acetobutylicum
MYPLKFEHLYYEKIWGGRDLEKFRNDLPDGNIGESWDVACHKNGTSVICNGEFKGKKLDELIKEKSTEIMGTKLSKEWFPLLIKLINAKSDLSVQVHPNDEYAKKVENDMGKTEVWYVVDAKEEAALVVGTSGNCTKESLKEAIESGSLDKYMNRIPVKKGDVCLVRSGMIHAICGGVTIAEIQQNSDTTYRVYDYNRGRELHVEKALDVINLNLKGKKNKGIRVTKEGYEKTYFCLGRDFSLEVYDVLEKVTEKSDKERFYIFTCVDGEGEIIYKGGKEKISFGESILIPAALGEYTVKGKVKFIKSYVPDVNKVEREILDEISY

SEQ ID NO: 51927 - protein, 76 aa, Clostridium acetobutylicum
MVLDKVREVIANQISVDKETIDMATSFGKDLNVDSLDLFQIIIELEEKFDIQIEDTENIKTVGDAVKFIEAQLKKK

SEQ ID NO: 51928 - protein, 605 aa, Clostridium acetobutylicum
MKKKRKNPRLVLGKKLLTVLFIFSIVFSALIFRLFFIMFVHSDTYKAKVLNQRVSKITLYPKRGDILDRNGNKLATSISDYRVDVDMNTLRESLKFEKMTLKTLSDKLSKILGTSSDKIYSTLSAKSPDGVPLRFVNLARQISKTKVDNIKALNITGFISSEDSIREYPNNNFLSSVLGYTRSDGSGASGVELSYNKTLAGIPGYKSVETDVTRKQLPYGTYKYVAPKDGKNVVLTIDKNIQLIAEQAAQQALTDNKAKAVNITVMDPKTGEILAMVNKPDYNPNTPYAKQDGVSTDVANLFQANAVQQTFEPGSIFKVVTAYTGLATGTVKDTNAMDFDCNGSLSVNGTIIHCWQLSGHGYENFVDILKHSCNVGFMQLGQRIGKDNLLKYIHLFGFGQKTGIDLPGEATGIVRDTDKVNLVDLSNIAFGQGISVTSVQYMAALNSIANGGTWIRPHVMKEITENKNGQAVTDSKYSNYGKRNILDPNITTMLRGYLERVVSDNDGVGKNADIPGYHIAGKTGTAQKADPKTGGYSAGKYMSSFAGMAPSYDPQVTLLVSVDEPSNGSYYASDTAAPVVKQIYQQIFDYLSLNGKLNLSGNPQN

SEQ ID NO: 51929 - protein, 571 aa, Clostridium acetobutylicum
MKKIIVVIVLIILWLGIHNYLFNNKTVRVNVYKGNINLKNYDFDKNKIVKLEGQLELYNNKLLIPSELKGEKSSRYLTVPSELKDQLKGKVDEYMTLHLMVQAKDDVVYGLKIDELLMDSKVWINGILQDKAGIVNKSYYSERQVYLPGYYYFTAKNGIIDIVIQPSNHINIFHVIKPIYFSTKDKIMNEFIINASIDLIVFGGLIVTELIFLIIAFKLKKSKVLLYLSILGVFVQFKCLFLNEIIIVHLFPYISFEILSKIDVLTNYLWIPVYVLFIKKKFYDLSNKIVYGIFVFYFVYITMCIVTDNILYDKFMFFAQPILYIIIIIILVFLIGKIRNKVVGSGVSIVAFSIVILNCINDSPADGGAVYSRSSFVISMFILILIETCTIVAKYCSEIIQIEKLRHENKLIYEKSIKDNLTGMYNRNHIEEILDKEISDYIRYKKLFTILMMDIDYFKSINDKYGHLVGDNVLSVVSNAIIRNLRKEDFVGRYGGEEFIVVFPNTDKKEAFIIAERIRTDIENLLFENGIRVTISGGIYENSSFSKKVCIHNADRLLYYAKESGRNRIKM

SEQ ID NO: 51930 - protein, 276 aa, Clostridium acetobutylicum
MKNTTETFKNSKFKKEKLVMLTAYDYSTAKIIDSCDINGILVGDSLGMVCLGYENTLSVTMEDMIHHTKAVVRGAKSTLIVADLPFMSYQTSVYDAVFNAGRLVKEAGATAIKLEGGALVCDRIKAIVDAQIPVMGHIGLTPQSVNAFGGFKIQGKNISKAKELIEDAKKIEAAGAFAITLEGIPEKLAKIITESITIPTIGIGAGKHCDGQILVYQDMLGMFSDLAPKFVKRYGNIGDDMKEAFNSYAKEVREGTFPDEAHSFKIDQSIIDEITK

SEQ ID NO: 51931 - protein, 527 aa, Clostridium acetobutylicum
MLTVNNVSLRYGGRKLFEDVNLKFTPGNCYGIIGANGAGKSTFLKILSGEIEPNTGDVSVDSNTRISVLKQDHFQYDEYEVLETVIMGNERLYSIMKEKDALYAKPDFSEEDGIKASTLEGEFAELNGWEAESEAATLLQGLGISTELHSKKMSELIGGEKVKVLLAQALFGNPGILLLDEPTNHLDIKSIAWLEEFLIDFEGTVIVVSHDRHFLNKVCTMIADVDYGKITLYVGNYDFWYKSSTLALEMTKDQNKKKEEKIKELKDFIARFSANASKSKQATSRKKMLDKLNLEDIKPSNRKYPFIGFKPEREPGNDILTVENLSKTIDGEKVLNNVSFIVSKDDKIALVGDNEIAQTTLFKILSGEMEPDSGSYKWGITITNAYFPKDNSEYFNDCDLSLVDWLRQYSEEKSETYIRGFLGRMLFSGEEALKKASVLSGGEKVRCMLAKTMLTNANFLMFDQPTNHLDLESITALNNGLTNYKSNLMFTSHDHEFIQTIANRIIEITNDGIIDRKCTYDEYLEIQ

SEQ ID NO: 51932 - protein, 336 aa, Clostridium acetobutylicum
MENMFRRVIFEKKALDYPMGRDILRQFENTDIEIRYSETGRITGIPGKDEAQSFFEGKNTLVVGVRRELDFQTCKPSANYQLPIVSGCAAMCEYCYLNTHGGKKPYVKINVNLDDILSKAGEYIEKRKPDITVFEGAAISDPVPVERYSGALKKAIEYFGKNEYSRFRFVTKYADISELLAVQHNNHTTIRFSINTPRVIKNYEHRTSSLEDRIESAYNILNSGYKTGFIVGPVFLYENWKKEYEELLKKASDKLGDKELEFEIISHRFTTSAKNKILKVFPNTKLPMDDEARKFKFGQFGYGKYVYDKDDMQEIKEFFINNINLYFNKATIKYII

SEQ ID NO: 51933 - protein, 297 aa, Clostridium acetobutylicum
MADKLVKATAKNGDVRIIAAITTDMVNEGVKTHKCAPTAAAALGRMLTAGVLMGAQLKAESDSITLKINGGGIAKSVTVTSYSDAHVKGYIANPNADLPVNSQGKLDVGGIIGKNGNLLVIRDMGLKEPYVGQVPIYTGEIGDDIAYYYVNSEQTPSAVGLGVLVDKDLSIKASGGFIIQMMPGADDLVADLITYRLQEIPSITDLIAKGMSVEDILEFIFEDMDLKILDEGIVPEYRCDCSRDRVEKALISIGMKDLKEIYDDGKQEEVVCNFCNKKYVFTNDEVGSLIKRLENNK

SEQ ID NO: 51934 - protein, 303 aa, Clostridium acetobutylicum
MEVLNDSFKIKLNCRTYVTIGSFDGIHMGHLSLIKKAISLSKKNNTMSMLSTFKEHPLNVINKSIVPKILMDNETKIEILKSIGLDILNFFDFNEEIMKMMPEDFILNMINHYNIDGIITGFNHRFGYKNSGDIHLLKTLSEKYGFELYVLPPVSFKNDMVSSTRIRNCISDGNIEEANQMLLRPFSIKAKVIHGREIGRQIGFPTANLSYDNKFILPKIGVYYTTVEYNKITYKGITNVGTNPTVNGDKLTIETYILDFNQNIYDEEIRVNFVKKIRDQIKFESIEQLKVQLEKDKKFAYKQ

SEQ ID NO: 51935 - protein, 253 aa, Clostridium acetobutylicum
MIFDAHAHYDDDEFNEDRDKVINELKSNGVIGVLNCGSSMEGTLKSVELAEKYDFFYAAVGIHPEYADKFDENTLKEIEALTKSSKVKAIGEIGLDYYYDENPPREVQKKVFIKQMELAEKLNLPVIIHDRDAHGDTLDIIKQFPKVKGEIHCFSGSVEFAKECLKLGYYLGFTGVVTFKNAKKVVKVVREIPLDKILVETDCPYMAPVPNRGKRNRSEYIEYIVEKIADIKSILPINVKEQTASNVRKLLNV

SEQ ID NO: 51936 - protein, 130 aa, Clostridium acetobutylicum
MAKVQYMGTGRRKEAVARVRLVPGEGKVVINKRSAEDYFGLETLRFIVNQPLNLTGTKGKFDVLVNVHGGGFTGQAGAIRHGISRALLKADETLKGELKKAGFLTRDPRMKERKKYGLKKARRAPQFSKR

SEQ ID NO: 51937 - protein, 246 aa, Clostridium acetobutylicum
MNFLHGLVNNYAQFFSLKVLIATLSDPSNLMMIFSLIILEGLLSSDNAVVLAIMVKHLPKKQQKRALFYGIWGAYIFRFIAIGVGTYLIKIWWVKLIAALYLLKMTYSHFAGKAEDDDVDESKVSKKGFWATVATVELMDIAFSIDSVSAAFGVSSKVWVLFLGAVFGILAMRGVAQIFVALIEKVPEMESSAYVLIGIIGIKMLLNLINIEIPNTIFFGVIVVVFGGTIAFHYIRQAGVKSQKQN

SEQ ID NO: 51938 - protein, 81 aa, Clostridium acetobutylicum
MVKIRLKRMGAKKAPFYRIVVADSRSPRDGKFIEELGYYNPTTEPVTFKVDADKVNAWMKNGAQPSETVKKLLDKSGVTTK

SEQ ID NO: 51939 - protein, 365 aa, Clostridium acetobutylicum
MRLGIVGLPNVGKSTLFNAITKAGAESANYPFCTIEPNVGVVSVPDKRLDVLEKMYNSKKKVHTSIEFYDIAGLVKGASKGEGLGNKFLSHIRESAAIVHVVRCFKDDNIVHVDGSIDPIRDIETINFELIFSDLEVLEKRIEKTTKTARSGDKKAKDELVILEKLKKHLEDGKSVRTLEFTDDEAEFVKGLFLLTSKPILYAANVSEDDILSGNVENDMVKSVQDYAKRENSEVIPICAGLEEQLSSLEEEEQKEMLSEYGLEDSGLNRLIERSYKLLGLMSFLTAGPEEVRAWTINQGTKAPAAAGKIHTDIERGFIRAEIVSYDDLINCGSEAAAKEKGLYRLEGKDYIMQEGDVVFFRFNV

SEQ ID NO: 51940 - protein, 159 aa, Clostridium acetobutylicum
MDYKEIEELIKTIDNSGLTYLEIESNGTKITMRKGTSNEESTSVVQNAQIQENKIERVVTTQTHDDDKKVIDKPSVDDENIRVVTSPIVGTFYESSGPDSEAFAKVGTQVKKGQTLCIIEAMKLMNEIESEFDGEVVEVLVKNEEMVEYGQELFKIALK

SEQ ID NO: 51941 - protein, 637 aa, Clostridium acetobutylicum
MIKVTLKDGKVMEFENTTTPGDVAKAISPGLYKKAISAKINGKRAELMTNIDKDCNLEILTFDDEDGKWTLRHTASHILAQAIKRLYPEAKLAIGPAIDSGFYYDIDADFSFTEEMFAKIEKEMNKIIKENLKLERFELPREKAIEYMEEKKEPYKVELIKDLPEDAVISFYKQGEFVDLCAGPHVESTAKVKVIKLMSVAGAYWRGNEKNKMLQRIYGTAFTKKADLDDYINMLEEAKKRDHRKIGKELDLFTMHEEGPGFPFFHPKGMVLKNLLLNYWREVHDKAGYDEISTPIILNEALWHQSGHWDHYKENMYFTKIDEADYAIKPMNCPGSILVYKDNIHSYRELPIKLAEIGLVHRHEKSGALHGLMRVRCFNQDDAHIFMTKEQITEEILGVIKLIDSFYKVFGFEYYVELSTRPEDSMGSDEDWEAATNGLINALNAANLEYIVNEGDGAFYGPKIDFHLKDCIGRTWQCGTIQLDFQMPERFDINYIGADGEKHRPVMVHRVVFGSIERFIGILIEHYAGAFPTWLAPVQVKVMNITDSQVEYVDAISEKLKEAGIRVEKDVRNEKIGYKIREAQLKKVPYMIVIGDKEIKEGIISVRSRKEGDLGSMNIEDFIFRINAEVKEKISSI

SEQ ID NO: 51942 - protein, 376 aa, Clostridium acetobutylicum
MYTLLKKTGKVRRGRFETVHGTIETPVFMNVGTLAAIKGAVSSMDLKEINCQVELSNTYHLSLRPGDDVVKKLGGLHKFMNWDRPILTDSGGFQVFSLAEIRKIKEEGVYFNSHIDGRKIFMGPEESMKIQSNLASTIAMAFDECVENPSPREYVERSVERTTRWLVRCKEELDRLNSLPDTINKKQMLFGINQGGVYDDIRIEHAKTIAKMDLDGYAIGGLAVGETHEEMYRIIDAVVPHLPQDKPIYLMGVGTPSNILEAVSRGVDFFDCVLPARNGRHGHVFTKHGKINLRNEKFELDASPIDEGCQCPTCKHYSRAYIRHLFKAKEMLAMRLCVLHNLYFYNTLMEDIRNAIDADCFEEFKNEKLKAWAGKA

SEQ ID NO: 51943 - protein, 203 aa, Clostridium acetobutylicum
MNLANKLTLMRIFLVPVFLIFIVVRQIPYGRSIATAIFIIAAITDKLDGYIARSRNQVTKFGKIMDPLADKLLVSSALIALVEFHVIPAWIAIVIIAREFAVTGLRSVAAGEGIVIAASWWGKIKTFIQIVTIIFALLFINLRKNYDFRKFVDQFALLSNHSAQVEKFLRYGTDITLAIAFIVTLISGIDYFYKNRHVFINDK

SEQ ID NO: 51944 - protein, 90 aa, Clostridium acetobutylicum
MARDNGNKDRDGKRPNGGRNRKMKRKICSFCMEKSESIDYKDINKLRKYVTERGKILPRRISGNCAKHQRELTIAIKRARNIALLPFTTE

SEQ ID NO: 51945 - protein, 264 aa, Clostridium acetobutylicum
MTRLYTDMLNVAYDNNLIVKNLSIKIPDKKITTIIGANGCGKSTLLKALTRIIPTKTGTILLDGKNILKENTKTLAKKIAILPQTPESTDGITVAELVSYGRYPYQKGFGRLSKKDYEVIDWALEVTGTKNYKFRQLDALSGGQRQRAWIAMALAQETDIIFLDEPTTYLDMAHQLEVLELLQKLNKEQHRTVVMVLHDLNQAARFADYIIALKNGTIVKAGKCEEVITKKVLMKVFNIDAEIGIDPRTTKPICFTYNLIKEMK

SEQ ID NO: 51946 - protein, 619 aa, Clostridium acetobutylicum
MYNILDNYEDVDDIKNMSSDELKEFASEIRKFLIDKISKTGGHLASNLGVVELTLSLHKVFNLKKDKIIWDVGHQAYVHKILTGRKDKFDSLKQFNGLSGFPKRNESIYDAFETGHSSTSISAASGIARARDLSKDNYDVIAVIGDGALTGGMALEALNDIGYKKTNVIIILNDNQMSIAKNVGSISKYLNKIRLDPKYNKLKKDVKTKLQRTNIGSEVANSIERIKGGIKQMVVSGMFFEDIGIKYLGPIDGHNIEELTSVISKAKEIKGPVILHVKTQKGKGYSYAEENPNKFHSIGKFNSKTGEALSKPKDTYSKAFGKAMVQMAENNDKIVAITAAMTDGTGLCEFSKKFPQRFFDVGISEQHAVTMAAGLAATGYKPVFAVYSTFLQRAYDQVLHDVCIQKLPVVFAIDRAGIVGEDGETHQGVFDISYLSSIPNMTIMAPKCVEELNYIMNWAVKQNYPIAVRYPKGGNDISDVLAPLKEFRHGKWEILKDGKDVAIVAVGKMVQRAMVVRDELLKYGIDCAIINATFIKPIDKDTLNRFARDNYKFVVIEDNVLHGGIGSLILEHLNDMKFKNDVLNLGFKDEFITHGNIEILYKLYDLDIEGICKRIISFK

SEQ ID NO: 51947 - protein, 284 aa, Clostridium acetobutylicum
MLVTTKGLLVKAQKEHYAVPAFNIHNLETFRVVVETASALNSPVIIAGTPGTIEYSGEDYLIAIAKEAAAKHNNIPIAMHLDHFEDVERLKHCIDVGFTSAMIDASRMSFDDNIKVTREVVEYAHLSGTVVEAELGMLGGREENVVVDEKDAMYTNPDAAKEFVERTGIDSLAVAIGTAHGLYKGEPKLDFERLKEIREKVDVPLVLHGASDVPENLVKRAIELGICKVNIATDLKIPFSDAVKEYFKEHPDANDPRNYMTPGKEAMKEIVIKKIKMCGSEGRA

SEQ ID NO: 51948 - protein, 587 aa, Clostridium acetobutylicum
MEKWFMKNIKADYKAIAKAFGISEVIGKLLINRGIKDVKLIDSFLNPRFEKMHNPKDMKDLKRASEILKSKIDSGKRIRIIGDYDVDGVISTYLLFTALKRCGADVDYDIPDRVKDGYGINIHIIEKCIEDSVDTIITCDNGIAAIEPINYAKECKLTVIVTDHHDIPFIEEENGQRSFISSNADAIINPKQKECKYPFKGLCGAGVVFKLIEVLYDEFKIHKKEFYGLSQFVAIATVCDVVDLVDENRILVKNGLKLLNETRNVGLRSLIRQTNIEDKKISTYHLGFVIGPCINATGRLDSAKRGIELLISENEDEASRLSKELFDFNNERKEMTQKGVDTAIDLIENTEMKNHRVFVIYVPEIHESIVGIVAGRIREKYNVPTIVLTKTENGAKGSGRSIEGYNMFEELIKCKDILLKFGGHPMAAGLSLEIENIDCLRERLNENTTLSAEDLIPKITLDMGMPLEYINYDFVKELNMLEPFGKSNPKPMFGEKKAKVVSARIIGKNHNVLKLKFLSKNRRYIDGIYFGDIEEFEKIVINNYGSEQMNKMYSGIENNIYLDIAFYPDINEYNGKVNIQIIVQHFR

SEQ ID NO: 51949 - protein, 555 aa, Clostridium acetobutylicum
MRREKDKIKIIPLGGVDEIGKNLTVIEYREEIAVIDCGLSFPDEEMFGIDLVIPDVTYLIKNREKVKGIFLTHGHEDHIGALPYVLKELNVPVYGTKLTIGIVETKLKEHNLLSKVDLKVVKPRDIIKLNSMSIEFIRQSHSIADSVAIAIHTPMGVVLHTGDFKVDYTPIDGCVADFARFAELGKRGVLAMMCDSTNVERPGYTMSETTVGETFNTVFTKAKGRIIVATFASNIHRIQQIVEAAERYNRKVAVSGRSMENIVAVAIELGYLKVKEGVLIGIDAINRYADNKIVIITTGSQGEPMSALTRMAAQEHKKVKIQEGDMVVISANPIPGNEKLVSRVINQLFKKGAEVIYEALADVHVSGHACQEELKLMHTLIKPRFFIPVHGEYRHLKQHKELATNLGMPKANVVIPEIGGVIELTRSSIKKTDTVVAGKVFVDGLGVGDVGNIVLRDRKHLSQDGIVTVVVTIEKVSGTVIAGPDIISRGFVYVRESEDLMEESKEIVKTALLECEEKHITEWATIKSNIKDVLRIFLYERTKRKPMILPIIMEV

SEQ ID NO: 51950 - protein, 900 aa, Clostridium acetobutylicum
MDINYERPDPYYLLNKIDKEEKNKNRGKLKIFFGYAAGVGKTYAMLRAAHYMKELGKDIVIGYIEPHARMDTMSLTKGLPQIPVKNIDYKGVILREFDVDKALLRKPEIILVDELAHTNAKSQRNKKRWKDIEELLDAGIDVYTTLNVQHIESLNDIVANITHVSVRETIPDKVFDDADKVELIDIEPDELLKRFTDGKIYRKEQVKRAFNNFFTKNNLYALREIALRRTADRVNFEIEIARLSKGQITVMATSDQILACIGTSPSSARIIRTAARMAESYHSKWIALYVDTGRSLGKADKETLNANFNLVELLGGELVTVHGENVADQIIRYAELRNTTKIVIGKNHKRTGTLLHFYAKDVVDKLMDSNSYIDVYMIPNSSYYRDHKNSILSKISIQHKGSVKDVLKAIIIMAITTDIAELFSYMGFKDVNVIMIFILGVIIVYMATKGQIMGIISSIAAVLVFNYRFTEPKNSFIVYDKSYLVTFPIMMIVAFIIGSLTNKVQKEAQDSNMREKRTQTLYIVSGKLLSAVGTSEVVSIGIKYISRLVNRNVICYLADTSNKLSTPFVYKKDKGAKEEIIMSKDENAAAYWTFLNGKESGCGTSTFYRAKGYYIPIKIKNKVLGVIGVSCPSGPLRPQKKAVVDTVTGQIAIALDREILSKEQEKSKVEIERERLRSNLLRSISHDLRSPLAGIKGAASTILENGELIDEKRKQELINGIYEDTEWLIRLIENLLSMTKFDEGNTKIKKDVELVEEVVSEAVQRSSKYFKNHKIKVSVPEDVIMVSMDGSLIEQVIINLLDNASKFSPKGSTIEIKVYEKKKDVVFEIIDEGQGISEDILPNIFDRFFTNGSKISDSRRGVGLGLAICKSIVEAHGGKIEAVNKGSGGAIFKFNIPKEL

SEQ ID NO: 51951 - protein, 188 aa, Clostridium acetobutylicum
MKKWHMMSLIASANVMIFLTACGQIAVNKNTNNFSKTTVQTIKASQPYKVPKLAEKRKDELIVGIEKPDDGKMVPLNSGSVYNQYMWEMMYESLGDVDEKGEPIPGIAKWDISKDGLTYTFHIKDNVKFSDGTPLTAQDVEFTFTYLCDKLCSSITFDPSTVDIKGWKDYYDGKANKEQEYKLKIPIL

SEQ ID NO: 51952 - protein, 365 aa, Clostridium acetobutylicum
MKIIIKENERGYLFKDGIFIKLLNPGKHSYIWGNYEIKKVNVDSMKEISTSDMDIFLKDENFKKSVVKIDIPDGKLAVHYVNGRKLNVLVSGEYAYWNIIKKHTFELIDISKPEVQESIDRSLFKYMPVSLYTKIEVSEGQRAVVYFNGKFHKELSSGVYYFWNSCIKVTYQLVDIRVQKLEVLGQEILTTDRVSLRINFVCDFRVVDAVSITSKIKDYATQLYTFSQMVIREYIGKFKFDDILNQKEEIGGFILSRLKEKEREYYVEFIGAGIKDIILPGEVRDIMNTVLIAEKKAQANVISRREEVASTRSLLNTAKLLDENETLYKLKEMEYLERICDKVGSISLSGGNNLLGQLNELLCQK

SEQ ID NO: 51953 - protein, 349 aa, Clostridium acetobutylicum
MDNEKLKAIDAAMSQIEKQFGKGAIMKLGEQDILNIDAISTGCLSLDIALGIGGVPRGRVVEIYGPESSGKTTVALHILAEAQKKGGAAAFIDAEHALDPQYARALGVDIDNLVVSQPDTGEQALEIAEALVRSGAIDVIVVDSVAALVPKAEIEGEMGDSHVGLQARLMSQALRKLTGSINKSKCIAIFINQLREKVGIMFGNPETTPGGRALKFYASVRMDIRKIDTIKQGEEMIGNRVRVKVVKNKVAPPFKQAEFDIMYNEGISREGNIVDVGVKENIIQKSGAWFSYGDIRLGQGRENAKLFFKENIDIRSEVENKIREKYDLPIQKVKNEKPKIEKGTENNTK

SEQ ID NO: 51954 - protein, 384 aa, Clostridium acetobutylicum
MKALHFGAGNIGRGFIGYLLYKSNYETTFVDIFDKVVDDINKYKRYTVITLSTSKNKEKVENVRAVNLKDSVALEKEVLEADLITTSLGLNNLKSTGELLRGFLKKRSEINDKPLDIIACENALFASDVLKKAILDGADEELKKYLEKSVGFPNCTVDRIVPNVDIEKELPIDVAVEDFYEWDIEKNKVKINNKIIGAEYVEKLDPYLERKLFLLNGAHATIAYLGYLKGYKYIHEAIKDKEINKIIVGFHSEAVQALSEKHKIDIQILKEYSNKLLKRFENEYLKDDVSRVGRDPMRKLSSNDRLITPLKLCCDLKIDFTNILFGVASGYLFNYKEDEKAQGIQNIITKEGIKKAISNVSQIKEGDYLNNMIAYKYEELKKQN

SEQ ID NO: 51955 - protein, 254 aa, Clostridium acetobutylicum
MILLTKITLLLFSSIFFSYILYMKSHSFKKIEPRKCSLNLMIIGMAFIVVGEFLNFISSFVKYRVDIYVSFCFILGAILFVIFAIIFLNSVDNTLKCLYGCVYEDAMTGVYNRNGIKKIFKDTINKEDNFFVMSFDLDETKIINDNFGHLVGDEYIISAARAIKEVLGAKGVVGRTGGDEFAAIYISTDQEELKKVKTHINKRASEIFNGSNINISMGFSTYKKDGKNMKELFDLADKRMYQDKKNKRKADQRF

SEQ ID NO: 51956 - protein, 368 aa, Clostridium acetobutylicum
MNNKFLIILKTIFFLYVLIQLCTNGVGGGIIVIIFLTNVILFVLKERFLKLRYGAVVELISVIISGLFNSYFVFLLPGVIFDLVYDEFYLGIALALIGIIYFREYSNLNFSVFCLISGMLAYCLINMRKREELYRKTFDDERRLVYELENAKTRLMNSSLEVAHMAEIKERNRIARDIHDNVGHSIAGTYMQLQVALKLYDKDSEKSKKILKESTERISEALTLIRNTVHNIVPKEKVGIEYIKNIINNFKFCSVDFSYTGSEELVSAINMQIIALNVKEALTNALKYSAATKVIVNIDINDKYIRLYIKDNGVGCSKMKEGLGISGMRERIRSVGGSISTSGENGFLIVCIIPINNGGGKIFEGINS

SEQ ID NO: 51957 - protein, 1241 aa, Clostridium acetobutylicum
MIHPVQVGKRTRMSFSKLDEIGVMPNLIEVQLDSYQWFLDNGLQEIFDDINPIQDYTGNLILEFIGYKLDMDNIKYSVEECKERDTTYAAPLKVKVRLLNKETGEVKEQEVFMGDFPLMTEQGTFIINGAERVIVSQLVRSPGAYYDYIVDKNGKKLFSATVIPNRGAWLEYETDSNSVIHVRIDKTRKLPITILVRAMGFGSDAEIVNYFGEEERLKATIEKDNTKTREEALLEIYKRLRPGEPPTVDSAFSLINSLFFDPKRYDLSRVGRYKFNKKLAVSIRIANKTAAKDIVNPETGEIIVEKGQRISKEKALEIQNSGINSVDISVDDNIIRVIGNNFVDIKSYIKFDISDLNIRELVYYPVLKEILENYTDEEAIKEQLKKNVHKLVPKHIIKDDMFATVSYELGLAYGIGNVDDIDHLGNRRVRSVGELLQNQFRIGLSRMERVVKERMTIQDQEVITPQALINIRPVAASIKEFFGSSQLSQFMDQINPLSELTHKRRLSALGPGGLSRERAGFEVRDVHHSHYGRMCPIETPEGPNIGLINSLATYAKVNEYGFVETPYRTVDKEQGRVTDEIHYITADEEDRCLIARANEALDENGYFIDKKITVRAPDEVLVVPANEVDLMDVSARQMVSVATAMIPFLENDDASRALMGSNMQRQAVPLLKPQAPVVGTGIEHKAAVDSGILPKARNAGVVEYVSANEVRVRRDSDGGVDTYRLLKFKRSNQGTCINQRPIVEKNEKVEKGTVLADGQSTDLGEIALGRNIRMGFITWEGYNYEDAMLISEQLVRDDVFTSIHIEEYEAEARDTKLGPEEITRDIPNVGEDALKDIDERGIIRIGAEVRSGDILVGKVTPKGETELTAEERLLRAIFGEKAREVRDTSLRVPHGEAGIIVDVKIFTRENGDELPPGVNELVRCYIAQKRKISVGDKMSGRHGNKGVISRVLPEEDMPFLPDGRPLQICLNPLGVPSRMNIGQVLEVHLGWAAANLGWHIATPVFDGALEPEIVECLKRAGYAEDGKTVLYDGRTGEAFDNRVTVGYMYILKLAHLVDDKIHARSTGPYSLVTQQPLGGKAQFGGQRFGEMEVWALEAYGAAHTLQEILTVKSDDVVGRVKTYEAIVKGENIPEPGIPEAFKVLIKELQALCLDVKVLSDNNNEIELKESIEDETEDLDVNIEGNEDSKVEPIRPQDVQENVSGENVDAGYENEDVDIDYEDLDIDDLKNGLGLEDFNDEH

SEQ ID NO: 51958 - protein, 95 aa, Clostridium acetobutylicum
MNKYETLFILNPSLDEEGINTNVEKFKSVITNGGGEVENVDLWGKRKLAYEIDKVNEGIYVLVNFQSDAQLPKELDRVFRISDSIIRHLIISLEK

SEQ ID NO: 51959 - protein, 214 aa, Clostridium acetobutylicum
MKKFSILNGRNKFTKRAKIKSNKMKLLIGAMGLILCCELLVGVVYKLHDKKTVEQKKIEAEKTPSKAKKKNTTKAESKPEVKAATNTQNATVPQSKDSNQKVDTSGAANSPSSNTASNKTSKSSSPNNTSQKPNNNRVGQESKNVTQSQTTRRTTQTTTPAVHPTQEPSQPVVNEPQQPAVQNQDQQNKITSQDEIDASKSQDEIMKEIHNNGN

SEQ ID NO: 51960 - protein, 595 aa, Clostridium acetobutylicum
MGESLNGLKRTIMCGEIRENHIGNRVVVMGWVQRKRNLGGLVFVDLRDREGILQVVFGEEINKDAFMKADLVKSEYCISVSGTLVKRESPNPNMPTGMVELKGEEIKILSESETPPIYIKENLDAAENIRLRYRYLDLRRPDMQKIFKIRHKTTKIIRDFMDEENFLEMETPILTKSTPEGARDYLVPSRNYNGKFYALPQSPQLFKQLLMVSGYDKYFQIAKCFRDEDLRANRQPEFTQVDMEMSFVEEDDVIELNERLIQKVFKEMAGVEVKLPIERMTWKTAMEKYGSDKPDLRFGMEINDISEAVSTSDFKVFKSAIEEGGSVRAIKAPNSADMPRKKIDKLGEFVKTYKAKGLAWIALKEDGIKSPIAKFLKEEELKAIIDKVQGKTGDLILIVADKNSVVFQSLGALRLEIAKELEILKDNKEFRFVWITEFPLLSYNEEEERFQAEHHPFTMPMDEDIEYLESDPGRVRAKAYDIVLNGEELGGGSVRIHDTALQERMFKVLGFTKESAWERFSFLLEAFKFGPPPHAGLAYGLDRLIMFLAGTENIKDVIAFPKNQNAFCPLTEAPNVVDENQIEELGIKVESKEEE

SEQ ID NO: 51961 - protein, 575 aa, Clostridium acetobutylicum
MSYKEKFKAWLDSEYVDVETKKELEAIKDEKEIEDRFYKDLEFGTGGLRGVIAAGSNRINIYTVGKATQGLADYLNKNYNNASIAIAHDSRIMSREFAERAASVLCANGIKTYLFDSLRPTPMLSFTVRHLNCKAGIVITASHNPKQYNGYKVYNEDGNQLTDNAAAEVLDFIEKTEDFSGVKLIDIKKAEKDGILDIIGEEVDKVYIDKVKDLTIRKDMVKESAKDLKIIYTPIHGSGNIPVRRVLKELGYENLTVVKEQEKPDGNFPTAPYPNPEQPSVFNIALELAKKVDPDVIFGTDPDCDRIGVLVKNKSGEYKVLTGNQTGVLLTHYIISSLKDTGKLPANGAVIKTIVTSEMTRKITEDYDMKLIDVLTGFKYIGEKIKEFEETNSNTYLFGFEESYGCLAGTFVRDKDAVVAATLVCEMALYYKNKGLSLDDALNELYEKYGFYKEKLVSIELQGKEGQEKIQKALNYLRENMSDNVAGVKIVKKFDYKSSVEKDIPKNEEKKIELPKSNVLRFILEDGSWFVVRPSGTEPKMKVYLAVAGTNKEDSEARMNKFNNDVMDIINQACK

SEQ ID NO: 51962 - protein, 147 aa, Clostridium acetobutylicum
MLMPKRVKHRKVQRGRMKGKATRGNFIAYGDFAIQATECAWITSNQIEAARIAINRYVKRGGKLWIKIFPDKPVTQKPAETRMGSGKGSPEYWVAVVKPGRVLFEMSDVTEEQAREAFRLASHKLPIKTKFVTRKDFEEMGGEANEG

SEQ ID NO: 51963 - protein, 237 aa, Clostridium acetobutylicum
MELNNTIATPLYKQLEKKLQQEIDSGKRPAGSRLPTENELSKAYNVSRVTVRKALAELSESGYLERKSGKGTFVAEKKLERGITNGVLGFSEMCKMMNAIPGAKIIKIALEEPSEKDIQKMSLNKDEKVLVLERVRYANGKPVLLELNKFPESFSFLFEENLTDASLYDILEQHNIILDHSRKTLDIVFADTKEAKTLGISRGYPLLRINSIIHNADNTITNLCQQLCIGDKFTFII

SEQ ID NO: 51964 - protein, 229 aa, Clostridium acetobutylicum
MGKKYIESAKLVDKNTLYAPDEAVDLVVKTSKAKFDETVELAVRLGVDPRHADQQVRGVVILPNGTGKKVRVLVFAKGDKAKEAEAAGADYVGAEELATKIQSENWFDFDVVVATPDMMGVVGRLGRVLGPKGLMPNPKSGTVTFDVAKALTEIKAGKVEYRVDKTAIVHVPVGKSSFGAEKLKQNFHALMDAIVKAKPASAKGQYVKSVALSSTMGPGIKINPVKVLD

SEQ ID NO: 51965 - protein, 703 aa, Clostridium acetobutylicum
MLHFLETDIAGRKLKVECGKTGMLSNCAMFISYGDTVVMVNVNASEKPREGIDFFPLSIEYEERQYSVGKIPGGFVKREGRPSEKSILHARAIDRPLRPLFPKGYRNDVQVVCTVMSVEQDNLPEILAMNGASMALCLSDIPFTTPVATVSVGCIDGKFVLNPTLEEREKSSLDLTVCATNERVMMLEAGADEIPEDLMIAAIDFGFNACQDIVAFQEKAMKEFGKEKVTPELYHPKEEIEKDVTEFAFESIKEIMYITDRDERNLRLREIKEKISNEFAEKYPDDGADIDEVVYTLQKKVVRNMLLKEHRRPDGRRFDEIRPISCDVDLLPRTHGSGLFTRGLTQVMTVTTLGPIGDAQVIDGLGVEESKRYMHHYNFPPYSTGEVKPLRGPNRREIGHGALAEKALVPLIPSEEEFPYTIRLVSEVLSSNGSTSQASVCGSTLALMDAGVPIKRPAAGIAMGLITSEDLSKEAVITDIQGLEDFFGDMDFKVAGTEKGITAIQVDTKIHGLSKYCIKTAINDARKARLFILEKMVACINEPRKELSTYAPRAYTINIDTDKIRTLIGTGGKTINKIIEETGVKIDIREDGTVFVLSSDADSANRALKMIDDLTKDVKVGEVYLGKVTKITNFGAFVEVLPGKEGLVHISKLDINKVNKVEDVVSVGDEILVKVTDIDNQGRVNLSRKDVLKQQESNNSKEK

SEQ ID NO: 51966 - protein, 197 aa, Clostridium acetobutylicum
MSYNIDNKFELHKRWVETSGHEGEKLCLEEVDFRKFDLSDKLFEQANLAECVFDNLNLENIDFHTSLLCSSTYKNTNLRGCDFYKTDLSYTDFSDAVIKNVRFSKSDCWESIFRNVNLINCNLINDYFYLTDFSNATLDNVDISLSTFEETLLNGVKLRNIKGIEEAHFESINIGTFEKPILLKSQEAKKWVLENCL

SEQ ID NO: 51967 - protein, 369 aa, Clostridium acetobutylicum
MNLWGDRVGYSKYKYEGLLNLCLEVFQRLGYTKEDSYTIGEVLLLADLFGIESHGVQRLTLYYKGIRNGSIKVKNHMNIVKESPVSVVIDGDGGMGQIISKKAMERAIDKAKKTGIGMAIVKNSNHFGIAGYYSRMAERKGLMGIAMTNTRAIVLPTYGREQMLGTNPISIAMPARPIPFLLDMATSVITRGKVEVYSKNNQKLNYGWAMDDEGRKTDNPDKVLKLANGNTGGLLPLGGDTEIFGGHKGYGISFAVEMFTSILSGGLTSDEIRGNNNTNGVCHAFAAIDYGLFDDKNAIEKRMSAYMQKIRNSKKAYGASRIYTHGEKELEAYEDRMENGIPINENTIVEIKEICDYVDIDINNYLKKY

SEQ ID NO: 51968 - protein, 465 aa, Clostridium acetobutylicum
MDKINEKIDLLKDDMVSSIQEILRIKSISGEAEGNAPFGKDTAKALDYALKLAERLGFKTVNLDNYVGYAEYGEGEDYVAVLGHLDVVPEGDGWNYPPYAAEIHDGKLYARGSMDDKGPTVACLYSLKAIVDAGLTMSKKVRIIFGLDEETGSGKDTEHYLKNEKPPVLGFTPDAEYPIINGEKGITIFNLVKDFKNDYEGDTKIIYVKGGERSNVVPPYAEAGIRADLKGEIIDKCESFAERTGYDIKAEEKDDMVIVKSKGIAAHGSMPELGKNAIMQLLAFLEELNLGKSDFNDYIAFLNRYVGMETNGESFGIGMEDKVSGKLSFNLGIIDFNKDQGKVVLNVRYPVTCKYEDMMDGINARIADTGIRVENMTHQKSLYFPEDHELVKLLQKVYKEQTSEEPKLLSIGGGTYAKEMPNIVAFGPIFPGEPDVDHQANEFIKIEHLILNAKIYAHAIYELAR

SEQ ID NO: 51969 - protein, 322 aa, Clostridium acetobutylicum
MAEGNKSDVLIEVKNLKKYFNVGHNAILKAVDDVSFTIKKGETLGLVGESGCGKTTCGRTVLGLYQATEGEVNYDGVNIHSLRGKAKKEFSKKAQMIFQDPYACLNPRMTVGDIIAEGIDVHGLYKGEERTKKIYEMLDHVGLNREHASRFPHEFSGGQRQRIGIARALAINPEFIVCDEPISALDVSIQAQIVNLLIKLQREMGLTYLFIAHDLSMVKHISDRVGVMYLGTMVEFAASHDLYENPLHPYTKALMSAIPIPDPKVEKTRQRIKLEGEVPSPINPKPGCRFAGRCKQAKPDCFEKKPEFKEIEKGHFVSCHLY

SEQ ID NO: 51970 - protein, 211 aa, Clostridium acetobutylicum
MKNVDYKLYLVTDRKVLKERDLYKSIEEAIKGGVTLVQLREKEMSTLDFYESALKLKKITETYKIPLIINDRIDIALAINADGVHIGQSDMPLIKARELLGKDKIIGVSAHSIEEALEAERNGATYLGVGAIYNTSTKGDAQAVSLEELKNIKNSVKIPVVGIGGINEENANKVIETGVDGISVISGILSAQKIKDKARVMFDIVKKNSTK

SEQ ID NO: 51971 - protein, 482 aa, Clostridium acetobutylicum
MNISIFKEKSLKWQLLRRMFLLLICFLIILEIFQYFFLRHYICKDKEMLLESRINNVAHLMTTIDSEASLKKNSGYLIKKSLYFDTTSSVIDKNGNVLLFHIKDKHPTSPPIISASEYKAIMKREGNLEGYTITKNKCGEPQITIWRKIGNLNSPLGLIQLTTPYHSAAQFLYKQIYIYIVACVLILILSILIGGTLIKHTLKPLYRIAHTLNNLTVGDLNKRLSENNNQVEIDHLATAFNNMFSRIEISFNREKELKKKMQQFISDASHELRTPLTSIRGFVEVLLIGSYKDEKKLKLALNTILIESERLTELVNNLLTLTRLDRSTHTEMTKQNMSDIIEEIYPQLKILAKNRQVNLNLYDNNAYFLGNKNQIKQVIFNIVQNSINYTDKETGIITLSLSIEDTLFILKISDNGIGIASKDLPHIFDRFFRSETHRSRESGGYGLGLSIAKSIIQSHGGEISTKSIINQGTSFYIKLKRI

SEQ ID NO: 51972 - protein, 567 aa, Clostridium acetobutylicum
MKRKFITVVIPSIIIASLLSSCTNTSNSTAAKATKVSSLKDQYIKASLPSKNPEKAKNRKDTFIAAISEPGGVFLPYFYDNGWDGNATDPIFPSLVSTDEKGNPIADLAEKWDISSDNLTYTYHLRKRLKFSDGSPLTSDDVAFTLTLLDDPSYSGSFDISTCYIKGSTDYKNGKATSISGIAVVDPLTIKITTEKINPLNLTRLGGQVLSKAYYGKDYKKGNLDYLKSLYSRPLGAGPYKLDKYIPGQEIRYTANENYYKGKPKIENFIFKVTSKDTNLQLFQTGEIDSDSFSTDKDTVDQLENLGFANIRISTVSDYGFVYMNNKKPYLKDKNVRQALIYGLDRQKIVDVAYKGYGEVANVPTSPLVLSYTTDGINSYKFNPEKAKKLLEDDGWRLNSNGIREKNGQKLKISYLTSKNTDQTIPIAKENYKALGIDFEPEIMDFNTLVEKLNKGDYDLAAVRTSGLVDPNDSVEEFSSKKTSENVSGYFNPKVDELISEGVNTLNVKKRKAIYKKLYKELSDDPPVILIDYRKGLKAWNSRIKGMENDNFAGVSSTNLSKLKIEN

SEQ ID NO: 51973 - protein, 477 aa, Clostridium acetobutylicum
MSKGFSKEFLWGGATAANQCEGAYLEDNKGLSTVDVIPKGKDRFPVGLGKMKMLECDSEHYYPSHEAIDFYHRYKEDIALFHEMGFKCFRLSLAWSRIFPNGDDEIPNEEGLKFYDAVFDECLKYGIEPLVTITHFDVPVNLVKTVGSWRSSKMVEYYEKLCKVIFSRYKNKVKYWLTFNEINMLLHLPFIGAGLVFEEGENEEAIKYQAAHHQLIASAKATKIAREINPNFKIGCMLAAGNNYANTCAPEDVWRSIEKDRENYFFIDVQSRGEYPNYAKKMLKRKGIELQVEDEDAGILKNNTVDFISFSYYSSRLTSANPNINGNTEGNVFATLKNPYLKASEWGWQIDPLGLRITLNSLYDRYQKPLFIVENGLGAVDTPDENGYVEDDYRIEYLREHIKAMRDAVNVDGVELMGYTPWGCIDLVSASTGEMKKRYGFIYVDKDNDGNGTLKRSKKKSFYWYKKVIESNGMDIE

SEQ ID NO: 51974 - protein, 437 aa, Clostridium acetobutylicum
MKLWGGRFRESESELMEEFNASLSFDKKLYEEDIEGSIAHVKMLNKCKIINNEECEEILSGLKSLYKDIRSGKLKIEGDYEDIHSFVEVNLIDRIGAVGKKLHTARSRNDQVAVDMKMYVKKSSYIIIECINKLMETIKDKAENNHFIMPGYTHMQRAQVVTFTHHMMAYYSMFNRDKKRIDNAISNLNESPLGCCALAGTTYDTDREMTSKELGFSKPVDNFLDGVSDRDYIIEVLSAFSICMMHLSRLSEELIIWSTKEFSFIQMDDKFSTGSSIMPQKKNPDAAELIRGKTGRVYGDLIAMLTIMKGIPLAYNKDMQEDKEQFFDSFDTLKMCILVMDGMIATMTVKKEAMKEAVKGGFLNATDVADYLVNKGVAFRDAHKISGELVIYCENNDKAIEELNINEFKNFCNLFDEDVYEFINYNNVIKKGNKKIM

SEQ ID NO: 51975 - protein, 320 aa, Clostridium acetobutylicum
MFRRHRRLRKNSYIRDMVRETTLSPNDFIYPLFVVEGINIKKEIPSLPNNYHYSLDRLPEVISEINDAGVKGIILFGIPDYKDEIGSSAFDENGIIQKAIRKIREIDKDLFIITDVCMCEYTSHGHCGIIHDGYVDNDETLKYIGKIALSHAKAGADMIAPSDMMDGRIEEIRTTLDENGYKNVSIMAYSAKYCSAFYGPFRDAADSAPKFGDRKSYQMDPANAREAMLEIEDDIEEGADVIMVKPALAYLDILRTAKNRFDVPVAAYSVSGEYSMIKAGAKMGWIDEKAIALESLLSIKRAGADMIITYYALEASKWLK

SEQ ID NO: 51976 - protein, 456 aa, Clostridium acetobutylicum
MEMMLGKTYREMVFWMAWIIIPFLMEIVPALGGFIILLRKRLSIKDKAFSGKLPQITIIVPVYNSEDTLKGCIESIYNSDYPSEFIDVMLVDNQSSDNSFKIFTRCQKEFDGLSLRYMNSKQGKSKALNMALFNSSGKYIIHIDSDGKLHKDAIKNMVTRFEGNPHVHCMTGVILTDKELIEKTKGSFFKLLRKCEFFEYAQAFLAGRNFESEVGSIYTLSGAFSAFRKSTILKTQLYNSETVSEDTQITFQVKKLLNQKVYLCENALFFVDPIEGFNKLYTQRQRWQRGELEVSHMFLRDGLKFGKGFVSDFMVRTLMYDHTFAFPRMIWYFALIFLVFMNYPIYLVVGSVAVIYLLYSLSAFLFYLNVISYLKKYKEVRSYYAKKFYLIFLMPMYNFGVFWIRFCGIINSIQLQGNWKTLNLTDEWRNFLGVFKRDFSVVFKVLNKLRQVVNNE

SEQ ID NO: 51977 - protein, 500 aa, Clostridium acetobutylicum
MRYLLGIDVGTSGTKTALFDECGNTIKTSTHEYELFQPQVGWAEQNPENWWTACVKGIREVIEKSKIDPLDIKGIGISGQMHGLVLIDKEYKVIRNSIIWCDQRTEKECTQITDTIGKEKLIRITGNPALTGFTLSKLLWVRNNEPDNYKRIYKVLLPKDYIRFKLTGVFAAEVSDASGTQMLDINTRNWSEELLDDLRIDKNILPDVYESVVVSGCVIEKASKETKLAVNTPVVGGAGDQAAGAIGNGIVREGLISTVIGTSGVVFAATDTPRFDSKGRVHTLCHAVPNKWHIMGVTQGAGLSLNWFKRTFCAKEILESKEAGINIYDLLTEKASQSKPGSNGIIYLPYLMGERTPHIDPNVKGAFLGISLINNHNDFVRSILEGVGFSLKNCLDIIENMKVNIEEIRVSGGGAESSIWRQILSDIFNYELTTVKASEGPALGVAILAGVGAGIYNSVEEACDKIVKGNEKVMPNANLIEVYSKVYEVYNSAYPKIKDI

SEQ ID NO: 51978 - protein, 128 aa, Clostridium acetobutylicum
MMEEKSFLPLGSIVILKGAIKKLMIVSRANVVNNNYFDYGAILYPEGMIDENVAYFNGKDILKVVSEAYTDDDDALMVEQLCQAKEEYLASSVEIKENVSAPETAAAEEGNFDDDPFAAVRDMEDDDE

SEQ ID NO: 51979 - protein, 448 aa, Clostridium acetobutylicum
MGRMFGTDGVRGIANKELTAELAYRLGRAGAYVLTNETHKPKILVGMDTRISGDMLEAALVSGILSVGAEAVCVGIVPTPAVAYLTRKYKADAGVVISASHNPVEYNGIKFFDAKGYKLSDNLEDEIQKIIESDFEGVPLPTGESVGRKVVEESAEEDYIKFAKSTIGTDLKGMKIALDCANGAAYKTAVKTFRELGAQVTVINNDPDGININCNCGSTHPEELMDYVVKKNCDLGLAFDGDADRCLAVDEKGNLIDGDFIMAICGKYLKDKGELHKDVVVVTVMSNMGLFLALDKANIKTVKTKVGDRYVLEEMLKEGYKLGGEQSGHIIFLDYNTTGDGLVTALKICSIVKESRKTLSKLASIMHKLPQVLANAKVPNNKKDIYLEDKEISDEIKKIEEELHGKGRVLIRPSGTEPLVRVMLEGEDQDRLNTLAHGLAELIEKKAN

SEQ ID NO: 51980 - protein, 215 aa, Clostridium acetobutylicum
MKLFIDTANVEEIKEVNDMGVICGVTTNPSLVAKEGRDFNEVIREITSIVDGPISGEVIALDAEGMIKEGREIAKIHKNMVVKIPMTEEGLKAVKVLSSEGIKTNVTLIFSAGQALLAARAGATFVSPFLGRLDDIGADSIGLIESIVNIFDIHDIRTEIIAASIRSPKHVIDSAEAGAHIGTVPYKVLKQLIKHPLTDIGIERFMKDWKEAFNK

SEQ ID NO: 51981 - protein, 411 aa, Clostridium acetobutylicum
MSKFKSHNSNNTKQTINKHALIFGLISVFLSGIGFTIISPVIPFLVQPYINNPGNQAIIVTLLTSVYAICMFFSAPGLGALSDKYGRRPVLLVCLLGSSIGYLIFGIGGALWVLFAGRIIDGITGGTISTIFAYFADIIPENERTKYFGWVSAVVGVGTIIGPTLGGLLAKFGYSVPLYFGAIITLLNVVYGFFFMPESLDKNIRLKEITFVRLNPFTQLANLLSIKSLKRLLISAFLLWIPNGSLQAVFSQFTIDTFSWKPAIIGLMFSIMGFQDIISQSLIMPKLLVKLSDKYIAILGMISEVIGYSLIAASALFYFYPLFIAGMFIFGFGDSIFGPSFNGMLSKSVDSSEQGRIQGGSQSIQALARMIGPIIGGQIYVSLGHATPAFMGIVLITVAIPVLYKNIHINI

SEQ ID NO: 51982 - protein, 239 aa, Clostridium acetobutylicum
MKYFDIMSLECKKIGIEFTEEKYGKFMRYKELLQEWNKVMNLTSIVDDEEIVKKHFIDSIKIFECEHIVKAKRIIDVGTGAGFPGLPIAIMNDDIEVVLLDSLQKRVNFLNEVIKELNLKNISTVHGRAEDFGVDKDYREKFDVAVSRAVANMAVLSEFCLPFARVGGYLVALKGPGINDEISTAKKAIKVLGGTLDKVINVEFENEDFQHNLVVIKKQNGTPKKYPRKAGKVSKNPII

SEQ ID NO: 51983 - protein, 267 aa, Clostridium acetobutylicum
MIKDITIGQYIPGKSFIHKLDPRTKILLSLVYIVNLFLIDKFKGYIFITAFTLFIIFISGIKMKYIYKSLKPILLLIIFTGALNIFMTPGAAAPLFHWSFIHIYKEGLVLAAFMSIRLIFLIIGTSMLTYTTSPIELTDGIEKLLTPFSKIGLPAHEFAMMMTIALRFIPTLIDETDKIMKAQMARGADIDSGNIIKKAKSLIPILVPLFISSFRRADELAMAMESRCYRGGEGRTRMKQLKFTSRDCVAVFFSVVLVGVSVLSNYL

SEQ ID NO: 51984 - protein, 729 aa, Clostridium acetobutylicum
MPKRILVDKATIRNRIFIVFLILTCVIFLLCYKLFNVMVARSSRYKKMAQEQWTSEVKISAKRGRILDRNGEELAISGNVYRVDLDLNTIKNSLAEKKMKMDELADRLSSALDMDKKDVSKQLNKKFKDGRPMGSAILTRRIDKDKANKVLAINVKGVMVSPDTKRYYPNSDFLSQVIGHTNSDGDGLTGVELKYNKYLKGKPGVRKAEIDKNSANLPYTISEYSKPLDGRDVVLTIDKNMQYFAEKYAQEALVNNKAKAVSILIMNPKNGEILAMANKPDYDLNDPWDKSKSYDELQKSWRNRVVSDAFEPGSIFKVITSSAAMSLGIVHENDKFNCGGSITVAKKTIHCWKRTGHGEETFVDILKNSCNVGFAELGERLGAKNLNDYINKFGFGRKTGIDLPGEARGIIRPTNKIGPVDLATIAFGQSNTVSMVQYMQAFNSVANGGYLITPHVMREISHVENNRQVVDKEYSDYNKKRILDESMTATLRGYLEKVVSEGGGKKAFIDGYHIGGKTGTAQKPNPNGGGYEHGKYIASFVGMAPASDPKITVMVSIDEPDPSNYYAGQISAPVGQKVFNDIFNYLGIKPDTSSSDAAKSMLKDVVIPNIRGMKKEDAIKTLKNLNIDADVDGNGEYVSNTTPIPGITVKEGTKVVLYTGDSPNYNNNDVIVPNLTGYSKKEAEETLKSLGLDFKISGDGVVESQSIDAGKQVNKGTVLTLKLEENMSE

SEQ ID NO: 51985 - protein, 642 aa, Clostridium acetobutylicum
MQMKKDFGYIRVGVASCELKVANPNYNVKSIISIMKKAYRRHHIKVLVFPELCVTGYTCGDLFNQNLLIKRAENELNNLLVSTSNINMITAVGMPVKADNQLFNCAVIINNGNILGVVPKTFIPTYNEFYEKRNFAGAISRISDEIILCGKKVPFGENLLFKDIYSELCIGIDICEDLWVNIPPSSYHTLNGANLILNLSASDEIVAKSDYRRDLVRLQSAKCITSYAYASSGQTESTSDLVFSGHSIIADNGSILKDIKFEEASYVKYADVDIEKLISDRIKFNTYMGRIEDKEYRTINFHLGYNENMHLERYVEASPFVPSNKSKRNIRCREILDLQASGLYQRLNKTGINKAVVGISGGLDSTLALLVIVEAFKKLKAPMKNIIGITMPGFGTTRRTYNNAVELMKKLGITIKEISIKKACIQHFNDIGQDLNTHDTIYENSQARERTQILMDIANKEGAIVVGTGDLSELALGWCTYNGDQMSMYGVNSSIPKTLVKYLIMWYAEASKDNDIRNILLDIYNTPVSPELLPPDKEGNIKQKTEDLIGSYELNDFFLYNMLRSGYEPLKILYLANIAFKDKYSEDVIHSALKNFYKRFFTQQFKRNCMPDGVKIGSVSLSPRGDLRMPSDASYGLWMDEL

SEQ ID NO: 51986 - protein, 378 aa, Clostridium acetobutylicum
MKNKTEVKNGGEKKNSKKVSKEESAKEKNEKMKIVKNLIDKGKKSGSLTYKEIMDELQEVDLGPEQIEKIYEVLESVGVDVVGDMHEIEVEEEDLDLTIPEGIAIDDPVRMYLKEIGKVPLLSPEEEIDLAQRIKNGDRSARKKLAEANLRLVVSIAKRYVGRGMLFLDLIQEGNLGLIKAVEKFDFKKGFKFSTYATWWIRQAITRAIADQARTIRIPVHMVETINKLIRVSRQLLQELGREPQPEEIAKIMDMPVDKVREIMKIAQEPVSLETPIGEEEDSHLGDFIPDDEAPAPADAAAFRMLKEQLLKILNTLTPREEKVLRLRFGLDDGRARTLEEVGKEFNVTRERIRQIEAKALRKLRHPSRSKKLKDYLD

SEQ ID NO: 51987 - protein, 706 aa, Clostridium acetobutylicum
MSERKKSTGMSKGPGGGPPMGRPAEKAKDFKGTFRKLLKYLAPFKMRFLIVVIAAIFSVCFNVRSPKIMGNATTKLADGIKGKIILSKINPQEKKVNDAAKKLSTQKSNLDAQKAKLDAQIKANPMMAQVPKVAEAEAQMTKGEEQLTKAQAQIKAAQKKISNAKKDTINKYGSKIDFDAIGVIILELIGLYAVASLFSFLQSFVMAGVAQKTVYNMRKDVDEKLNRLPLKFFDSKTHGEILSRVTNDLDTVATTLQQSLTQLITAILQVIGVVIMMLTISGWLTLICVLTLPVAGFVTMFIAKKSQKFFAGQQKELGMINGHVEEMFTGHIVVKAFNKEQESIEKFNEINDRLYKSGWKAQFISGIIFPLMNFINNIGYVAVCVAGGIFATKGMISIGDVQAFFQYNRLFTMPIIQTANIANIIQSTMAAAERVFELLEEEEEIQDAEDSKIVEFPKGAVRFENVKFGYKEGSTLINDMNLDVKPGQTVAIVGPTGAGKTTIVNLLMRFYEINAGKITVDGVNTKEMKRNDLRGMFGMVLQDTWLFNGTIRDNIAYSKDGATEEEIIRAAKAAHADHFIRTLPDGYDTVINEEASNISQGQKQLLTIARVILANPQILILDEATSSVDTRTELAIQKAMNNLMQGRTSFVIAHRLSTIRDADLILVMNQGSVIEQGNHEELLEKKGFYADLYNSQFTSGNNEEIG

SEQ ID NO: 51988 - protein, 473 aa, Clostridium acetobutylicum
MQKTKMIFTVGPASETEEIVTAFIKAGMNASRHNFSHGDHAEHGGRIALVKKVRAKLNKPVAICLDTKGPEIRTGDFNPSKLELQKGSKFTIVCGEEIVGDATKCSISYKDLYKDVKPGNTILIDDGLVGLTVEAIEGTNVICTVANTGLVGSHKGVNVPNVSIQLPAMTEKDKSDLIFGCKEEIDMVSASFIRKPEDVLAIRKVLNENGGENIQIFSKIENQEGVDNIDAIIEVSDGIMVARGDMGVEIPIQRVPLIQKMIIKKCNAVGKPVITATQMLDSMMRNPRPTRAEASDIANAIFDGTDAIMLSGESANGSYPIEAVTTMAKIAQEAENEINYDKFLAERKGNEKKNTSDVISLGTCTAAADLEASAIITATQTGSTARTVSKYRPKAPVIAVTPSEKVARKLAMSWGVHPIISDKFGSTDELISTSVDKALEAGYVQKGDLVVVAAGVPTNVSGTTNMLKVQVVE

SEQ ID NO: 51989 - protein, 262 aa, Clostridium acetobutylicum
MEKELLNQVAIVTGGNSGIGKAISCELALRGATVAILARNKNRNEETQKEIIAKGGQAECYSVDVSDTKAVNDAVNQIYSKYKQIDILVSNAGNATPLEYATKMSVENFQSVLKTHLLGAFNCVKACGENMRKRKYGRIVIISSVAGYHGFAGQMNYAVAKHGLVGMGYSLAKEFDGSGVTVNVIQPGIIPTPMCEGVIEVAKEELSPERIGKPEDIAYATAFFCSPRAGFMNGTPLVIDGGLVLETSVDRAVKQLLKNNSL

SEQ ID NO: 51990 - protein, 411 aa, Clostridium acetobutylicum
MDNPNLLSEEANRCLLCKNPRCKANCPINTPIPEIISLYKEGKIMEAGEILFNNNPLSVICSLVCIHEDQCKGNCVRGIKSEPIKFHEIEEEISEKYLKEAKLKNVQKDKDRIAIVGGGPAGITVAFVLANKGYNVTIFEAHDKIGGVLRYGIPEYRLTKKLVDKLEERLIEVGVKIRPNTVIGPVISLDRLLEDSYKAVFIGTGVWNPKTLDVKGETLGNVHFAIDYLKSPESYRLGKKVAVIGAGNVAMDAARTAKRNGAEVTILYRKSFNEMPASKQEIRETKEDGVEFKLFRAPIEITEEGIKVAFTENVTDAEGKIRTKIIEGKEEFFECDSVVVAVSQAPKDNIVSNTTGLDTKWGLIVTDEKGNTTKKGTFACGDVVTGAKTVVEAAAQAKVVAETIDEYCKNN

SEQ ID NO: 51991 - protein, 292 aa, Clostridium acetobutylicum
MIRSMTGFGRASNDNGRLGFNVEIKSVNHRYFDLNIKLPRNLISLEEKIRKEVGNKIKRGKVDIFITQNVYDSSTTNVNLNKGLAYNYCECLKQIRDDFNVLDDISVSLISKFPDVITVTQNEEDLDEISSLLLKPINEAVDTMLSMREKEGARLKEDIEGKLTNIEELLVNVEKRAPYTVENYRNKLEERIKDLLVDNQVDEAKLAMEVTIFADKSCIDEEIVRLKSHISQFKSTLSKNEPVGRKLDFIVHEMNREANTINSKSNDIDIVHCVLDIKNEIEKIREQIQNIE

SEQ ID NO: 51992 - protein, 695 aa, Clostridium acetobutylicum
MKIVQLMKKDKSIKVMTFLFAFIIIYVILLTSVDTRKYSLKEGDIAKNDIKATRDVNDEAATEERRKQAVNSVGIQYDKNTEIINNIIDNINNDFTIMNKVKDENSDDKTKLSQLKSSLKTDLDDSNLSVILSMNKEDLKDLQQFIIKTLKDAYNGEIREDESSDIKKAQSSIAAEFSKEKFSKDATELGIAISNSYVKPNMFIDSKKTEEIKKDISKKVENVVIKKDQIIVKEGEPVTANEISVLEDLGLLSNSNGQSWYIYVALAVAVLIVLFLQIYYIYRYYKEIYRDNKKIIMLCVLNIISIILARSVGIISPFLIPLACAPMLMILLMDSRISLFESILNCIFISLICKFNIEVTILALMSSVIAFMSFRKMKQRNDTIYAALFIAIMNALMSFSIGFLVSSNLVDNVQKASFAFIAGILSAILTIGFLPIFESIFDVVTDVKLLELSDPNHPLIKKLLMEAPGTYHHSIIVANIAEAAVEEVGGNALLARVAAYYHDIGKLKRPYFFKENQVGGNNPHNKINPNLSALVIISHVKDGVDIAKEYNIPQIIQDTIQQHHGTTLVKYFYVTLKNASDNPEDIKEENFRYPGPIPSSKETAIIMLADSVEAAVRSIQEPTQGKIEEMINNIIEARLSDGQLNQCELTLHDIEKIRRAFLKSLLGIYHQRIEYPTDKSVMRQKKIESSKEKRK

SEQ ID NO: 51993 - protein, 722 aa, Clostridium acetobutylicum
MKRNRMKILNLPIFFVVLMFLLSNVGIIRVKANNLTPVEINGQLKVSGSKLLNSNNQPIQLKGMSSFGIQYSPQFVNYNTMKYLRDNWGMNVFRVAMYTDGDGGYIFNKAACKAKVEEAVNAAQKLGIYVIVDWHMFNNPQTDKSQSKDFFNQISSEYKNSPNVIYEIANEPCGDVTWGRDIKPYANEVIPVIRANSPNAIVIVGSPTWSQSVLDPANDPLSFSNVMYACHFYAGTHGQWLRDRITQALNKNIALFATEWGTSDCNGSGGTYIEESQRWVDFMTQNKISWTNWVLDDANATASILKPGSNPNGGWTDNDLTESGKFVKAAMLQNNTPTTGGNTTPTTGGNTTPTTGGNTTPTTGGNTTPTTGGNTTPTTGGNTTPTTGGNTTPTTGGNTTPTTGGNTTPTTGAVIDTSKTYKIISSSTGKVLNVRNYSSQSGAQIEELVDVGALSEQWKIADSGNGSYKITSALSNLSLDGGVSTEGTDVKQYQYAGAENQQWNIEKINANTYKITNKKSNLALETTGVYDSADIQLWNYTGKGTQQWIISDVNAGTNTTPTTGGNTTPTTGGNTTPTTGSAIDNSKTYKIISQNTGKVLNVRNYSSESGAQIEELVDVGALSEEWKITNSGNGSYKITSALSNFSLDAGTSTEGSDVKQYQYTGAESQQWNIEKIAANTYKITNKKSGLALNGTGAWDGSNLQLAKYSSTADQQWILKAVN

SEQ ID NO: 51994 - protein, 243 aa, Clostridium acetobutylicum
MSMIETCGLTKVFGKLTVFKDLNIKVKRGEVLVIIGPSGSGKSTFLRCINHLEIPEKGSVVIEGEKIDSKNKKTYKGIIEKMGMVFQGFNLFPHMTVLENVMEAPITVKKEAKAVVKKRAEELIDKVGLIDKCNVYPSKLSGGQKQRVAIARALCMQPDIMLFDEPTSALDPELVGEVLNVMKDLAREGMTMVVVTHEMGFAREVSDRVIFMDGGKIVEEGKPEDIFNNPKEERTRAFLNKIL

SEQ ID NO: 51995 - protein, 371 aa, Clostridium acetobutylicum
MKISNSKTSLEFERNKDFFQVRLESTQFKEAVLKELSDKVIVNEDNETWVLSYPVPEAAKSLASATRLAKTRLERLKLAQKLATLSGLENQFKIPFLHPENILLMGETLFVVHFGLHKLLAPFDMTPVDFLKSYKALIFYIFNSKVPFESLVSGSLAMNDKFSQTINSFESTQEIAEFIDEELQKETEKINRNIAFVSKGRYRFFKYFGTLAIILALVLGWFTYYYYSNSQKQNAIITAQTDFLTNNYDKTQTDLQNYSPSKLPKSARYILAVSSVNLSDLTTTQKQAILNNISTKSDDNTLNYWVYSGRGDFKQALNLAQNLGDVQLTLLAYTNLYETTKLNTTMDGAKKQQLLDEYNKKIQELTKNLGK

SEQ ID NO: 51996 - protein, 286 aa, Clostridium acetobutylicum
MPIKIENLTYTYMPGTPFEKKALDNVNITIEDGEFAVFIGHTGSGKSTLIQQINGLLKPTSGSIFIDDVDITDKSVKLNDIRKKVGLVFQYPEYQLFEETIEKDIAFGPRNMGLSEEEVSTRVKKAMKMVGLEYNDFKDKSPFELSGGQKRRVAIAGVVAMEPKVLILDEPTAGLDPKGRDDILYEIKKLQKEYKMTIILVSHSMEDVAKVADKIFVMYDSRCILSGNLDEVFNEIDTLEKVGLAVPKVTYLVRKLREKGFDISKDIFTIEAAKKEILRVLESAKR

SEQ ID NO: 51997 - protein, 687 aa, Clostridium acetobutylicum
MARKYPLEKFRNIGIMAHIDAGKTTTTERILFYTGKTHKIGEVHEGAATMDWMVQEQERGITITSAATTCYWKDHEINIIDTPGHVDFTVEVERSLRVLDGAVAVFDAKGGVEPQSETVWRQAEKYNVPRMAYINKMDILGADFYRSVQMMRDRLSANAVPIQIPIGKEDNFLGLIDLIRNEAIVYTDDLGTTMEEQEIPADMKELAEKYRSEMIEAIVELDEELMNKYLEGEEISVEEINAALRKGVIANEIVPVTCGSSYKNKGVQQMLDAVVEYLPSPLDIPPVKGVDEDGNDDERKADDSEPLAALAFKIATDPFVGKLAFTRVYSGVMKAGSYVLNSTKGKKERIGRLVKMHSNHRQEVEELEAGELGAIVGLKLTTTGDTLSSEDNPIILEKMEFPDPVIEVAIEPKTKASQEKMGIALAKLAEEDPTFKTYTNQETGQTIIAGMGELHLEIIVDRLQREFKVECNVGKPQVAYKETIRKPVKAEGKFVRQSGGRGQYGHAVIEMTPTEGEYEFENAIVGGAVPKEYIQPIDNGIQEASLSGIIAGYPTVNFKVRLVDGSYHDVDSSEMAFKIAGSMAFKNAMTKADPVILEPIMKVEVTVPEEYMGDIMGDVNSRRGRIEGMEQRAGAEVIRAFVPLSEMFGYATSLRSRTQGRGVFTMQFDHNEEVPKNIQEKIIGEKK

SEQ ID NO: 51998 - protein, 1035 aa, Clostridium acetobutylicum
MYKKVDSSKSFVDIERDVLKLWHEKEIVKKSFNSNQDGEYFSFYDGPPTANGRPHVGHIITRVMKDLIPRYKVMKGYKVPRKAGWDTHGLPVELEIEKKLGISGKPQIEEYGIEKFVKECKESVFSYVSLWKDMSEKLGYWVDMENPYVTYHNDYIESVWWALKQMWDKDLLYKGHKIVPYCPRCGTALSSHEVAQGYKDVKEATAFVKFKVKGEENKYILAWTTTPWTLPSNVALAINKAYDYVEVINNGEHLILAKALLTVLEGEYEVVSEFKGEKLLGMEYEQLFKFANPDKKAFYVVHGDFVTLSDGTGIVHIAPAYGEDDNMLGKKYDLPLINLVNGEGKFVDEVEPWKGLFVKKADPKILEYMKENGTLYKSEKFTHSYPHCWRCDTPLLYYPRDSWFVRMTSLRDKLVENNNKIHWYPDNIRTGRFGKFVENVIDWGISRDRYWGTPLPIWQCECGHRDCVGSIEELKEKGINVPENIELHKPYIDEVKLTCPKCGKPMTRTEEVIDCWFDSGSMPFAQLHYPFENKEVFENTFPAQFISEAVDQTRGWFYTLLAISTSIFDKSSFENCIVLGHVLDKHGLKMSKHKGNVVDPFDVLDNQGADACRWHFYTSSAPWLPTRFSQEDVAETQRKFLSTLWNVYSFYVLYAEIDKFNPNDYKDFVSGNVMDKWIVSRLNTLTKDVGNYLDSYGITQAALEIQDFVDDLSNWYVRRNRSRYWTQELTDDKVGAYVTLYRVLVTLSKVAAPFIPFMTEQIYQSLVTSINEGAEESVHLCKWPEYDESLIDSSLEEEMKLAISIVKLGRSARNGANIKNRQPLYEMRVSTKALPDYYGDIIRDELNVKKVEFGADLSKYVNFEIKPNLPVLGKSYGKLIPKIRKEISSMDQMKLAERVRSGEAVKIDVDGTEIELNSENLLVTMQGLEGFAFAGIGEIGIVLETTITDELREEGYLREVLSKVQNMRKESGFEVADKIEIYVSGNEKLENVIRKFEDTIKKETLATDIIYSENKEAAIYNINGEELNVFVKKNC

SEQ ID NO: 51999 - protein, 274 aa, Clostridium acetobutylicum
MYLKGDFHIHTNASDGKYTPEKVLELAKTAGINILAITDHDTTSSVKKAIAVGNELGIKVLPGIELSTLKNGESIHILGYFRDISYENKDFQNFLTEMQNYRVWRAKKIVENLDTYFNIKLDYASILKEASNVIARPHIARAILAKGYNYTYEYIFNNILNKESPAYIPNKKVSVEEGIKLLKAANAVVVLAHPVLIKKTPIEDFLKLDFDGIEAIYPMNSESDTERFLSLAKIYNKLVTAGSDFHTDDSSDTKHGRIGEIYLDENNIDILLSK

SEQ ID NO: 52000 - protein, 165 aa, Clostridium acetobutylicum
MRLYVLSVLVDNIPGVLTRVCGLFNRRGYNLESVTAGVTENDKISRLTLIASVKDENEIDQIVKQIKKIEVVHKVVLLNRENSVCREIMLIKVNAEGVQRQEILNTVSIFRASVVDVTTKTFTIEITGNSSKIEAFQKMLEPYGIIEVVSSGSIAIERGQNSILS

SEQ ID NO: 52001 - protein, 235 aa, Clostridium acetobutylicum
MELVCCIAVTTLVMLFLNSTIIRKRAIWYFISLAASFATVFFEIFKILYKVHIGGVLAVFEKVCIKGFIAISLFLLVMFAGALNNKLAVTKKLVAIRAQMAIMASIFIFPHVCIYLYYVLKYTFPEVIDKGSIELFTAAYILAGIIAFIIMMPLFITSLKKVRRKMNGVKWKKLQRWAYLFYLLVYGHILFVMLNSQKIDITRFATYNILFGIYFILRVTKTRLSSVTKSVEPIA

SEQ ID NO: 52002 - protein, 360 aa, Clostridium acetobutylicum
MNKLRVGLIGGTGMVGQRFACLLKDHPWFEVTLIAASKKSAGLTYEEAVKDRWKMNEPIPEGVKNLIVKDAFDVDEISSMVDFVFCAISLNKEETRLLEEDYAKHEMPVISNNSANRYVQDVPVLIPEINNNHTEIIDIQKKRLGTKRGFISVKPNCSIQSYVPPISALLKYEPETILACTYQAISGAGKTFKECPEILDNVIPYIKGEEEKSENEPLKIWGKIENNKIVNASSPLITTQCIRVPVTDGHLAAVFVNFKTKPSKQEIIDAWENFKAPECALNLPSAPKKFLHYFDEPDRPQTKLDRDFENGMGITMGRLREDKLFQYKFVCLSHNTLRGAAGGGVLSAELLKTQGYLTSK

SEQ ID NO: 52003 - protein, 772 aa, Clostridium acetobutylicum
MIKKYTLHLYILLGVYLILYFISTIFQSKFFGDILSPIGTLISFFILIYVYKKSERFKGVWLTLSLGSLIWSITDILWAICELLIRINPENITIFDFFYLGTNICIVTAGYIYMKKFIKGVNLVQFFIDVSAISISCFIIFGLLFLHGSFNLFIKNANNIIEFIYIITDLLIINCILSGLFSVRKGKLTKGVYITILGTAIYAVVDLVYVYEYFYNLYVPNSIIDFMYATSLLIIAFGGLTVLKYSNFEWADEFYSKTKNIGSEKKGLYLLLTIPVYVIFGGFDFSKILVLLYIFVAYEILSNYVQKAINNETLLTYEKDINLILEEKIKERTKELLLKNQELEYISNHDPITNVYNRRYLNKRLQCIINEKKLDNQVTILYIDVDGFKTINDTYGHDIGDYVLIEISDRLKKTVKENNILARLGGDEFVIIIEGKLSKEEIKNICEKLINSCKETIYSDNYLFNVTISIGVAMFPHDAISRNVIMKNADIAMYDAKSKGKNRYSFFDSHVSNEILEKGEIELLLRNVDYDKEFELYYQPQIDINTNKLIGVEALIRWHSPIMGNIPPNKFIKIAEETGSIEKIGQWVMNTAAKQIGIWNEKFDSNIRMSINISPNQLVSIDFASDLEKIMKKYGLKSDWIDIEITENIAMKGEGIFKQIFLTLDNMGISISIDDFGTGYSSLSYIQKFSFNRLKIAKELIDNITIDLNKRHIVKAIVMLSEGLNILTIAEGVETEDQLNIVKEIGCNQVQGYVYSKPVTADRFEKEFLLQI

SEQ ID NO: 52004 - protein, 397 aa, Clostridium acetobutylicum
MCGIAGFVNFKKNLIDKKSIIEDMTNTLIKRGPNEKGYYISKNALLGHRRLIVVDPKGGSQPMIKIHNGKKYIIVYNGELYNTEDIRKELLEAGYEFSSYSDTEVLLTSYIHWKEDCVNHINGIFAFAIYSETDKKIFLARDPLGVKPLFYTIKNNNLIFGSEIKTLLANPLVEPILTKEGLTEIFALGPARNLGSGVLKDIHEIPPANFIEFTEHKFKLHEYWRLSCKPHTENASETAEHIKFLLTDAIKRQLYADVPVCTFLSGGLDSSIISAVAASEFKKHGKTLNTYSIDYKDNNLYFKNDNFVITPDSVWAEKMRKFIGSNHHKIINNNLDLASALYDAVKANDIPGMADIDSSLFLFCKGVAEKNVVSLSGERAIQMITNLVKQFINIGEL

SEQ ID NO: 52005 - protein, 291 aa, Clostridium acetobutylicum
MKLTIATRKSKLAQVQTELIINVLKDKYGISSEKLLMETLGDKILDKSLADIGGKGLFIKDIERILLEDKADAAVHSMKDVPFEVPDMFEIAAVTLRVDVRDVFVSRDGTHFKDLKNGAVIGTSSNRRAAQLKMLRDDIKVVPIRGNVQTRIRKMGEEKLDGIILAAAGLKRLNMENIITDYFSVEEMIPAVGQGALGVEIKKENKNRDLFRKLDNKNSRMCVEAERSFMRTLNGDCHSTIGAYAEIVNGQMNVLGFYEIDGRRVKKDVSGNIEDYMSLGKTLAEKILEDK

SEQ ID NO: 52006 - protein, 446 aa, Clostridium acetobutylicum
MAAQLNELWQKTINIIKGELTEVSFNTWIKSITPISIDKDSIRLSVPNQFTKEILENRYKDLIINSMKIITTKKYDIAFLISSEEALETDEDQETDTNNVNTDTSSSMLNPKYKFDSFVIGNSNRFAHAACLAVAEAPAKAYNPLFIYGGVGLGKTHLMQAIGHYILDNNPKAKVVYVSSEKFTNELINSIKDDKNVEFRNKYRNVDVLLIDDVQFIAGKERTQEEFFHTFNALHENNKQIILSSDRPPKEIPTLEDRLRSRFEWGLIADIQAPDFETRIAILKKKADVEHLNIPNDVMVYIATQIKSNIRELEGALIRIVAFSSLTNKEISVDLASEALKDIISSKQNKQITIDLIQDVVSSYFNLRIEDFKSARRTKNIAFPRQIAMYLSRKLTDMSLPKIGEAFGGRDHTTVIHAYEKISSALKEDDDLKYTINEITKRFSPK

SEQ ID NO: 52007 - protein, 201 aa, Clostridium acetobutylicum
MKKIIIASNNQNKIREIKQILKEFDFNIVSLKEENIDIDVEEDGKTFIENAYKKAYEIYKMRKDCMVIADDSGLTVDELEGAPGIYSARFAGIHGDDKKNNEKLLSLLEGVPFEKRNAQFVCSIVLIIDEANSIKVEGEISGFITDKEIGTKGFGYDPLFYVPEFKKTFAELTEDEKNSISHRAIALEKLCSEMKKLNWGE

SEQ ID NO: 52008 - protein, 371 aa, Clostridium acetobutylicum
MKLLSLVPEIYEFNDFSKFAEEFKLGKGDFVLTDESLYKSSIENLNLKSKFVFRKSYGIGEPSDDMIDAIVSDMEKEDINRIIGIGGGTILDICKLLALKPTKKSIDLFEKKVPIVKEKELILIPTTCGTGSEVTNVSIAEIKSKHTKMGLACDELYADYAVFIPEFVKTLPFKFFVTSSIDALIHAVESYVSPKANHFTKMFSVEAIKLIINGYKEVIKNGEEYKNNIINDFIIGSNYAGIAFGNAGVGAVHALSYPLGGVYHIPHGEANYQFFIEVFSTYNGLKPDGSIKALNKILQDALECDSTSVYDSLSNLLDKLLSRKPLKDYGMNEEEIDKFTDSVIEGQQRLLLNNYVPLSRDEIKGIYKRLF

SEQ ID NO: 52009 - protein, 229 aa, Clostridium acetobutylicum
MINNSLKITDLPNNERPRERLLRYGSEVLSNSELLAIILRTGTLHENIINLSSRILKESGGLNGVLNLSFEELKKVKGIGNAKAVQILALGELFKRFKAYKSFESVKITSPKEAANLVMEQLRSFNKEHLYVIMLNTKNIVIKISDVSVGSLNSSIVHPREVYVEPILKHAASIILCHNHPSGDPKPSNEDLNITKRLYECSKFIGIELLDHIIIGDGIYISLKEEGLL

SEQ ID NO: 52010 - protein, 322 aa, Clostridium acetobutylicum
MELKTISELEAGNRIDGFFIIKSAEKRISSNNKKYLDFTFGDKTGDINGKLWDASDEDEDAFVDNMLVKVRGTVIEWQNNLQLKIDKIRKTVDSDNVKVADFVPSAPYLPDDMYSTILEYVEKIKNADIKNILYDVLESAGEEIMYWPAAKKNHHSVRSGLLYHTFTMLKVGEKISEIYTFLNTDLIYAGVILHDMAKLEEMVSSELGIVTDYSVEGQLLGHIILGVEKVRNSAKKVGADKEISMMLEHMVLSHHYEAEYGSPKKPMFPEAEVLHHLDDMDAAMFDMKKALETTAPGEMSDAIWSLDRRRIYKSKFDKDVIE

SEQ ID NO: 52011 - protein, 333 aa, Clostridium acetobutylicum
MDLIESIWECAKQDKKRIILAEGEEKRNLIAADKIIKEGLAELVLVGDENKIKEKASELNLDISKAEIMDPETSLKTETYARDFYELRKHKGMTIEKSEKMVRDPLYFATMALKDGYVDGMVSGAVHTTGDLLRPGLQIIKTAPGVKIVSGFFVMIIPDCDYGEEGLLLFADCAVNPNPTSDELADIAITTAETARKLCNVEPKVAMLSFSTMGSAKGEMVDKVKNAVEITKKFRPDLAIDGELQLDAAIDSEVAALKAPSSNVAGNANVLVFPDLQTGNIGYKLVQRFAKAKAIGPICQGFAKPINDLSRGCSSEDIVNVVAITVVQAQRGI

SEQ ID NO: 52012 - protein, 61 aa, Clostridium acetobutylicum
MARKALIEKWKKEPKYSTRAYTRCKICGRPHSVLKKYGICRICFRELAYKGEIPGCRKASW

SEQ ID NO: 52013 - protein, 335 aa, Clostridium acetobutylicum
MGFFGISRDMGIDLGTANTLVYVKGKGIVLREPSVVAINTNNKEVLAVGNEAKQMIGRTPGNIIAIRPLKDGVIADFDITESMLKNFISKISSKSAFASPRILVCHPSGVTEVERRAIKEATKRAGAREVKVMEEPMAAAIGAGLPVEEPRGSMIVDIGGGTTEVAVVSLGGIVTSKSLRVAGDELDQAIISYIKKEYNLMIGERTSEIIKMKMGSAFKTEESLENIVIKGRNLVTGLPKNIEISEEEVREALREPVASIVDSIKLALEKTPPELAADIMDKGIMLAGGGALLKGLDMLISKETNISVHIAESPLDCVALGAGKALDHFEKLVSD

SEQ ID NO: 52014 - protein, 368 aa, Clostridium acetobutylicum
MRMARKRLLRLVGRNQININKGEGSEVKKIKIGVLLSTIIFTIGILSGCETKSEKLSQVKIAYFGNITHSQALLQRDDGSLQKALGSNTKIKWEKFSAGSAEVESLLAGEVDIGYIGPGPAINAYTKSNGDIQVIAGAADAGAILVSKKGADIKSVKDLKNKRVAIPQYGNTQDLTLRILLYENGLKDRAKGGNVEIVEAENSDIKTLLGKGSIDAALVPEPWGTRLVNEVKAKVVLNYEDIWRKGQYPTAIVVARKEFVKAHPDIVEKFVKNLVEETNKVNSNRDNSEKAINRQLKEITGKGLSKKILDSSFERIKVTNNPEKDAVLDMANWSFKAGFIKSKADLKDMFNLSFLNRALKESGKAEIK

SEQ ID NO: 52015 - protein, 239 aa, Clostridium acetobutylicum
MQNVFNVNQKIGDIVVKFPRAIEILKRYKIDFCCGGDRVLEEAIKEQGLNGQEIIDEINEDYNKYIMEEVKDRDWATEPYSKLIEHVINTHHAYLNETLPRLSELTTKILRVHGAKHSELAKVHKLLHSLKMELEQHLIKEEEIVFPLIQEYERTGNNETLSNAVEKIIELEEEHEGAGSILKELREVTKNYELPEDACNSYKAAYKLLEDVEDDTFRHIHLENNIMFPRLVSESKKHK

SEQ ID NO: 52016 - protein, 483 aa, Clostridium acetobutylicum
MINNDLNDLESMTVNDLKELAKELGLRNVSKYRKKDLIDEINKKSPNSIEKNGIMLKENIKPKNDLSEKSNTSESSNGNVSRPAEKTYTNNNRYVQKEKENKNERFKEMVDESDSAKGVLELVENNNFGFLRGKNYLTSPEDIYVSPSQIRRFNLKTGDEVQGKVRIPKEGEKFKALLYVEKVNGENPEKSVRREPFEKLTPIYPNQRLSLEKNSDELATRLMDLISPIGKGQRGLIVAPPKAGKTTLLKSVAQSLAKNHPETKLIVVLIDERPEEVTDMQRSIKGEVIYSTFDEEPEHHTKVAYMVLERAKRMVEQGQDVVILLDSLTRLARAYNLTITPTGRTLSGGLDPGALIMPKKFFGAARNIEEGGSLTILATALIDTGSRMDDMIFEEFKGTGNMEVHLDRRLQERRIFPAIDIYKSGTRKESELLSHDELEAAFKIRRVLYSNNSTQDVTEKLINMLNETENNNEIVNVINKGKW

SEQ ID NO: 52017 - protein, 478 aa, Clostridium acetobutylicum
MSYETVIGLEVHAELSTKTKIFCNCSTKFGAKPNENTCPICMGLPGTLPVLNEEVVHLAVKAGEALHCKINKLNKMDRKNYFYPDLPKAYQISQFDIPICSGGYVEIPTKDGVKKVRLNRIHIEEDAGKLVHLEYEPHSLIDYNRVGVPLVEIVSEPDMRSPEEAVEFMKTLRAMLQYANISDCRMDQGSMRCDANISLREVGSTEYNTKVEIKNINSFRELQKALEKEEKRQKELYDFNEGFRIKQETRRWDSGKGKTVTMRTKEDANDYRYFPEPDIIPIVVKDELLEKVKEEMPELPVERKARFEDQYKLGSKEIEILIEDKALADYFEKLVEAGCESKTASNWILGDMLRLMRETETDSKAIPVPVEHMNQLIEMIKTKEISNTAAKEVFEEMFKTSKEPKVVVKEKGLSQISDESALQKMVEDVINNNEKSVLDYKAGKKQAIGYLVGQVMKQSKGKANPPMVKELLEKVLSE

SEQ ID NO: 52018 - protein, 250 aa, Clostridium acetobutylicum
MTKYRMKFLNTNVDNVNMKEAIEIIDGFIKDGKYHYVVTPNVDHIVRLEKDEEFKKVYENADLILTDGMPLVWISKWLKTPVKEKVSGSDLFPRVCKLAAEKEYTVFILGAAEGVAHKAGENLKAKYKGLKVAGTYSPSFGFEKKPEEIKYIIEMINDIKPDILAVGVSAPKQEKFVAQYRDELKVPVALAIGASIDIEAGTLKRAPLWMQKSGLEWFYRMFRQPKKIFKRVFFDDLKIIGIYSKYRSLG

SEQ ID NO: 52019 - protein, 215 aa, Clostridium acetobutylicum
MKIILLGPPGAGKGTQAKLISSEFSIPHISTGDIFRANISGKTELGMKAKGYMDKGLLVPDELTIDIVKDRISKDDCKSGFLLDGFPRTVNQAEALDKFLVGRKEKIDCALLIDVPREKIFNRMTGRRVCSKCGASYHIEYNPTKVEGICDLCGSPVVQRKDDSEDTVKERLDVYDRQTEPLVVYYRNEAVLKSVDGTQDIDKVFEDIRNVLGEI

SEQ ID NO: 52020 - protein, 366 aa, Clostridium acetobutylicum
MKFICEKNILQEAIITAQKAVTGKSTMPVLQGILMSVQNNELTLIGSDIDLSIETKINVEVLEEGKVVLDARLLSEIIRKLPNSKVEIQTIENNCVEITCNKSKLTLVYLNPNDFPSLPEIDENSIFKINQKTLKTMIKGTIFAIAQDETRPILTGVLFEIKDSKLNLVAIDGYRLALRSQYIDNETSINAVIPGKTLNEVIKILEDDGDVNITFTSNHILFNLGNTKIISRLLEGEFIKYNSIIPEEYNLNIVARKEELLDCIERASLMAKDGNNNLIKLDIEDDVMIITSNSQLGNVREEINIILQGQPLKIAFNSKYLIDVLKIMNQEEIVMNFSSSISPCIIKNKENDDSTYLILPVRLATI

SEQ ID NO: 52021 - protein, 139 aa, Clostridium acetobutylicum
MENEVVLVEIFGVKEKASCSGCSSKTENSSCSSCSGCSSQGSCEGGCSSGGCGNSESMYNQYEAFKEYIAKTDVAANVEVQFIDVSEIDINKYKYVEGAIGKKYMLPVVAINEFIRFYGGMKDRLIYNAIKKELNNIYM

SEQ ID NO: 52022 - protein, 657 aa, Clostridium acetobutylicum
MIGTVLSNRYKIEEEIGVGGTAVVYKAMDTLLNRHVAVKVLKHEFTEDEEFVFKFKREASAAARIANANIVNIYDVGADGNVNYIVMEYVAGKTLKKLIKENGKIEFNKIIDYATQIAKALNFAHKNGIVHRDIKPHNIMVTDDDIIKVTDFGIAKASNESTITTTNKVVGSAHYLSPEQAQGIPVDCRTDIYSFGIVLYEMATGKVPYDADTPVSIALKHIQDAAVPPNELNKDIPIALNKMILRCIEKKPENRYQNANEILDELSNVKNNYVNDDEEFTRVMDPAQIQNESNPNNKLDNDDTYYNGEPYNKEQPQEEPQEENEEPKNKIKGNNMLSGKAKKALVASIIVVLILAGSALAFSMGSGIFKPNSNSVSKVKVPKIIGLSESDAKGKVEDAKLKFQVVDRVKSSKPKGTVVTCYPNEDTEVDSGTVVRVDISSGDTDQTLPSLVGLPESAARAQIKQYGCNVGSVTQEYSDDVAQGNVISQSPSEGSQIKKGMTIDLVISRGPEVKKATVPSVYGKTSDSASSILQNAGFGVNVQNKDVTNADQNGIVIEEYPNGYVNKGTTVTIVIGRFNSTAVQPPNNNNGNGNQNQNQNKTPDTNHDDSKAPTGGNNDNQNQNNTTNPNGTQPAGGNVTGTGNGNVTNTPNGTGQK

SEQ ID NO: 52023 - protein, 106 aa, Clostridium acetobutylicum
MANKIHVRKQDSVVVISGKDRGKIGEVLAVNPKKGTVLIKDVNVVVKHQKANKENMQGGLIKKEAPINSAKVMLYCTKCKTATRISKKVLDDGTKVRVCKKCGETF

SEQ ID NO: 52024 - protein, 428 aa, Clostridium acetobutylicum
MEKDINLKIFKGNLIFTKTSDKFTIMKDSYIVVIDGKIASVSSNLPDKYKGNPIIDFRNNIIIPGMNDLHAHASQYKNLGIGMDKELLPWLNNYTFPEEAKFLNVDYAKKTYGRLIKDLIKNGTTRVALFATLHKDSTIELFNMLIKSGIGAYVGKVNMDYNCPDYLTENYITSLNDTEEIILKYKDKSNIVKPIITPRFVPSCSNELMDGLGKLSYKYRLPVQSHLSENLDEIAVVKSLHKKSNFYGEVYDKFGLFGNTPTLMAHCIHSSKEEINLIKRNNVTIVHCPTSNFNLGSGMMPVRKYLNLGINVVLGSDISAGHTCSLFKVIAYAIQNSKIKWQESGKKDMFLSTSEAFYMATKKGGSFFGKVGSFEEGYDFDALVINDSNLYPEDYDLTERLERFIYLGDDRNIMKRYVCGNEIFGPKF

SEQ ID NO: 52025 - protein, 582 aa, Clostridium acetobutylicum
MKTIILNGNEVHTDKDITILELARENNVDIPTLCFLKDCGNFGKCGVCMVEVEGKGFRAACVAKVEDGMVINTESDEVKERIKKRVSMLLDKHEFKCGQCSRRENCEFLKLVIKTKAKASKPFLPEDKDALVDNRSKAIVIDRSKCVLCGRCVAACKQHTSTCSIQFIKKDGQRAVGTVDDVCLDDSTCLLCGQCVIACPVAALKEKSHIEKVQEALNDPKKHVIVAMAPSVRTAMGELFKMGYGKDVTGKLYTALRMLGFDKVFDINFGADMTIMEEATELLGRVKNNGPFPMFTSCCPAWVRLAQNYHPELLDNLSSAKSPQQIFGTASKTYYPSISGIAPEDVYTVTIMPCNDKKYEADIPFMETNSLRDIDASLTTRELAKMIKDAKIKFADLEDGEVDPAMGTYSGAGAIFGATGGVMEAAIRSAKDFAENKELENVDYTEVRGFKGIKEAEVEIAGNKLNVAVINGASNFFEFMKSGKMNEKQYHFIEVMACPGGCINGGGQPHVNALDRENVDYRKLRASVLYNQDKNVLSKRKSHDNPAIIKMYDSYFGKPGEGLAHKLLHVKYTKDKNVSKHE

SEQ ID NO: 52026 - protein, 463 aa, Clostridium acetobutylicum
MENVLVKQLYRLSSEFGGKKVRLSGWVRTIRASKSFGFIEINDGSFFKNIQVVFDDKLDNFKEISKFIISSTITVEGEFVLTPNAKQPFEIHAENITLEGNSDNDYPLQKKRHTLEYLRSIAHLRPRSNTFSAVFRVRSLAAYAVHKFFQERDFVYVNTPLITASDAEGAGEMFQVTTLDLKNPPKNEEGNIDFSKDFFGKKANLTVSGQLSAETFALAFRNVYTFGPTFRAEESNTTRHAAEFWMIEPEMAFAELSDYLDTAEEMVKYIINFVMENAPEEMEFFNTRIDKGLFDRLHNVVNSEFGRITYTEAVDILEKSGEKFEYPVKWGIDLQTEHERYLTDKVFKKPLFVTDYPKDIKAFYMRINDDNKTVAAADLLVPGVGEIIGGSQREERLAVLEKRMEELNLNKEDYWWYLELRKYGETKHSGYGLGFERMIMYLTGISNIRDVIPFPRTTGSAEF

SEQ ID NO: 52027 - protein, 596 aa, Clostridium acetobutylicum
MVNTVIREYIKNNVLVTDGAMGTYYSKTTGDYNNFCEFANLTNPEVILNIHKEYIKSGAKLIRTNTFSANTLTMDISKTELENIITKGYMIARKAAEGKEIFIAADIGPINKFEIEKPVEYIIEEYKFVVDIFMNLGADIFVFETLSSIDCLKEVFQYIKRKNKNAFILAQFAIMQDGFTREGISVNSIVNKIKAIGSIDAYGFNCGSGPAHLYNIIKGLDIYGDIISTLPNAGYPEIINERMVYVDNPDYFADKMSMIKNRGVKIVGGCCGTTPKHIEKMVSNLKENLINIEEIEIKKNKGINNYKKKNSFTEKLDKGEFPIVVELDPPFDTNIDKIMYAAKVCKQNNIDLVTIADSPMSKVRVDSVMIASKIKRELGIEVMPHICCRDKNVNAIRSSLLAAHIEGIRNILAITGDPVTGIDKVNTKSVFNLNSYKLMNLISEMNKETFKEDKISIGGALNLNVLNKEVEVTRMLKKVENGGTFFLTQPIFKEETIEFLAKLKKDRNIKIIGGVLPIVSYRNIQFINNELFGVDIPKEYIERFSVDMTRQEAEEVGVNLARELIAKIRNYVDGIYIVTPFNRIGMVMKILENVRK

SEQ ID NO: 52028 - protein, 251 aa, Clostridium acetobutylicum
MVYFIGAGPGDVDLITVKGRKIVEKADIVIYAGSLVSKEHMDFCKKEVKIYNSAHMTLEEVISVIVKAEVENKITVRLHTGDPSIYGAIKEQMDELGKRNIAYEVVPGVSSFTAAASAIKREFTLPGVSQTVILTRIEGRTPVPENEDIEKLASIGASMAIFLSVGMIEKVVEKLKKGYKRNVPIAIIERASWEDERSIIGTLEDITDKVKKAGITKCAQILVGDFIDSNYSKSLLYDKNFTHMYREGKKK

SEQ ID NO: 52029 - protein, 317 aa, Clostridium acetobutylicum
MKKGYMYIALTTIIFSTMEIALKLVSKSFNPIQLNFTRFFIGGLFLVPFALNTLHKRHLSISTKDLRFFALLGLLGTVISMSLYQLAVQNTKASVVAVLFSCNPVFVTILAFFLLREAIHKNNIAALILEVIGTIVIIDPLNTKLSILGLALTIASTLIFAAYGVFGKKKCAKYGGIVVTCFGFLFGSIEMLVLIGITHITPIANLFSSNGIAIFSNIPLFTGYSLKNLPLMCFICLINTGAGFACYFKAMEETSAQTTSLVFFFKPILAPILALILLHEIIPVNMIIGILFILAGSISSILPELLAQRQTKLEKTA

SEQ ID NO: 52030 - protein, 135 aa, Clostridium acetobutylicum
MIMEHEYRLEVRGYELDSFGHVNNAVYLNYLEAARWDLCSKLNLTDYNESNELFIVVIETNIKYIRELKLFDKVLIKTELTYEDDYLIFKHNIYNEVTKRKASVAKSKMVLVSKQRIIYEIPQFIKDKLDICAYG

SEQ ID NO: 52031 - protein, 399 aa, Clostridium acetobutylicum
MYIKVLSVSELNNYIKRVVDSDYILSNAQVKGEISNFKFHSSGHVYFSLKDEGGKINCIMFRSNAEKLKFIPENGMKVNVKGRVSVYVKDGAYQLYCTEITPEGRGELYEAFEKLKEKLLNEGMFSEEHKRNIPKYPKMIGVITSPTGAAIRDIINVATRRNKSVDMIICPTLVQGVNAPGELIKALDYLNNREDIDTIILARGGGSIEELWAFNDEKLAYAVYNSKKPVVTGVGHETDFTIVDFVSDRRAPTPSAAAEIAVPNINEEMNSFVSLKRALDTSIKTYIQNKCNQLEIAKRMLEKNSPEILIVNGYSSIDNFKYVLDMRIANKIKIEKEKILRYNSILKSNSPINILNKGYSIISDEIGNNISNVDKLKEPDKVHITFKDGKVNAKIDILR

SEQ ID NO: 52032 - protein, 309 aa, Clostridium acetobutylicum
MGKIYKNLIETIGRTPLVELSNYKEKNKIEGNILGKVEYFNPSGSIKDRIAYSMIKNAEEQGLINKDTVIIEPTSGNTGVGLAFIAAAKGYKLILTMPETMSVERRKLLTAYGAEIVLTSGVEGMTGAIKKANELASENPNSFIPQQFKNPSNPAIHEVTTGIEIWEDTDGKVDAVVAGVGTGGTITGIAKTLREKNKDIKIIAVEPATSPVLSGGKAGPHKIQGIGAGFVPDVYEAELIDEIIQVKNEDAFASAKELAREEGILAGISSGAALFAAKEVASRPEFKGKNVVVILPDSGQRYLSMSVFD

SEQ ID NO: 52033 - protein, 268 aa, Clostridium acetobutylicum
MKIANKDFILGERTYIMGILNVTPDSFSDGGKFNNLDNALKHAAKLIEDGADIIDIGGESTRPNHSSVDKNEELERVIPIIEAVSHEFDIPISIDTYKGEVAEAALESGAHLINDVWGFKKDTYMAKVAAKYDVPCCLMHNRENNDYSNFLQDVIDDLKESIDIAINAGVKPENIMIDPGIGFAKDFNQNLLLMNNLEKLNVLNFPILLGTSRKSMIGNILNLPPNKRVEGTVATSVIGVVKGCDFIRVHDVLENKRACMVADAIIRR

SEQ ID NO: 52034 - protein, 146 aa, Clostridium acetobutylicum
MNRQILSGDNILLELKSESKDAAIERAGKLLVSRGYVKENYINGMKAREEEVTTYMGNGVAIPHGMNEYKKDIMDSGIVIAQYPEGVDFGEGNIAYIVIGIAGRGEEHMQILSQIALTVQYEENVERLRNAKNKEEIIKIIEEGDD

SEQ ID NO: 52035 - protein, 110 aa, Clostridium acetobutylicum
MNKILLIGRMTKNPSIKQIETTGNNRCNFTIAVNRRVRNTNGENEADFIPVTVWGKTAENVARYMKKGYLVGVSGRLQVRTYQDVDGNRKYITEVVGEEVQFLETKKEAV

SEQ ID NO: 52036 - protein, 638 aa, Clostridium acetobutylicum
MSSTSGTGSTSAYNSPMRMTGLASGLDVDSIVSKLMQPYEMKRDTMKQDETYLEWKRDAYRAVTTSSATLSSTYFDQLNQDNYMLTPNAYADYTGISDDNTNTTSDASKDTGVIAKGHEGTAEGNYSVTVNRVGTTARNANTLTGQTVTDAGGKTYTLSDSGSAVAANGGNDTLTVVFNGKTQDFKLGNMSVDDTLKSVASYFNLTVTSSTLDGQYHISANSSIGGNIFQSGTTGKVTSGATVDSSAPADTVVGVGGISGGKGALGAVDYNASGNNFFKNIFGLSGTNTSTAASVTAIDGNSKTKTLSNVTGINMIDGVNANVTITEPNGSKGTVESMNNDFSVDGVEYDISKINLAESGSVYTPHKANIQMTLNVDKIYNKITGFIDKYNAYVQQINDKINETKTYSYKPLTDAQKKAMTDDEVTKWETQAKQGILANDSYLQSMVTEFRKAFYTGVDGAGFTLTDLGISSYSGVGDAVNKAGQMKYDPATLKTAIKKYGSSIYNIFAKQSKDESLYIKNNDINQSSADIAKTMARRQTRYSQEGIFQRINDIMQDYTRVNTFPPGTLVQLAGSSTSTDTTSTLTKQIKDKLQAINDYDSTLSDKQEQFYLQYSKLESYLAQAQSQQQSLQSQLSKL

SEQ ID NO: 52037 - protein, 184 aa, Clostridium acetobutylicum
MSKIVIFKGSPRKNGYTAKLLEQVAKGAKSKGAEVIEFDLNNPGIRGCQGCFYCRTHDGCAVNDYLQPMYEDIKEADAIVFGSPIYYYKITGQSKIWFDRTFPMTGNDYKPKYPGKKLITVFAQGNPDPKIGAEGVKFANDMLEELGWKLEDSINYCGTSHDPDLAMFDELSLRAFKDGENLVG

SEQ ID NO: 52038 - protein, 186 aa, Clostridium acetobutylicum
MRVGVLSFQGGVVEHLEHIEKLNGKPVKVRSLEDLQKIDRLIIPGGESTTIGKFLKQSNMLQPLREKIYGGMPVWGTCAGMILLARKIENSEVNYINAIDITVRRNAYGSQVDSFNTKALIEEISLNEMPLVFIRAPYITRIGETVKALCTIDKNIVAAKSNNVLVTSFHPELADNLEFHEYFMKL

SEQ ID NO: 52039 - protein, 78 aa, Clostridium acetobutylicum
MTKGIGLNEVEIKSKVKVIGIVPESKVRRKIMDMGIVRGTEIYIEGKAPMGDPIALRLRGYSLSLRKSEAKDILVEVL

SEQ ID NO: 52040 - protein, 149 aa, Clostridium acetobutylicum
MSLKEKLQEDWKCALKSKDKFKANVISMAKAAILQVEKTDGVKLNDEDIIGVLAKEVKQRREALVEFEKGNRQDLVESANAEINILMSYLPQQLTEDEIRIIVKDAADSVGASNMKDMGKVMSALMSKVKGRADGSLVSKLVKEFLNNK

SEQ ID NO: 52041 - protein, 622 aa, Clostridium acetobutylicum
MRINILSEDTSNKIAAGEVVERPFSVVKELVENSIDAGAKTINIEIENGGRTLIKVLDDGYGIDKDDIEKAFMPHATSKISKLQDIYSINTLGFRGEALPSIASVSKTTLKSRTKENEFGREISISGGSVDYIKDCGTNIGTHIEVRDLFYNVPAREKFLKSTAKEASSISDIVNRLALAHSEISFRLINNGKRVITTYATDNLIDTIRAIYGKKICDNVISFERHTDLVSVHGYVGNAEISRGSRNNQSIFINKRYIKNKLITAAVENAVKSFMMINKFPFFIIFLDIFPEFVDVNVHPTKSEVKFQNERDIFKIIFDTVHEGIRNSLKESFKVEALKEEEDKLFDIKEDVITKNEIKHDDKIDGYIKKDSFPVPVQIPIDLKRPIENYDNSTKENKDRSFDDFREKDIIKETSQEKETYDIITNKKAKFPELRVIGQFNNTYILAESFEELYIIDQHAAHEKILFEKYREDIKNKGVSSQILITPSVVELLPEDFIYYDENKEVFKNAGFVIEYFGDNTVAIKEVPLFLGKPLVKDLFLEIIDNLKNMGSGETSEVKYRSIATAACKSAVKAYHELTHDEMKTLIQDLRFAEDPFNCPHGRPTIVRLTVTDFEKKFKRIQ

SEQ ID NO: 52042 - protein, 718 aa, Clostridium acetobutylicum
MKDISTRLAEKLKINVNQVKNVIEMLDEGATVPFIARYRKERTGGLSDVTLRELNESLIYLRNLDDRKETVIKSIEEQGKLTDELKEKVLKAETMTEVEDLYRPYKPKKRTRATIALEKGLKSLADEILGGKFKGDINEFASSFINEEKGVNTIEEALKGAEDIISEVISDNAEFRKWIRKYTYKNGVLETQGSSEEPTPYEMYYDFKEAVSKIPPHRVLAINRGEKEKILSVKIATDDEKIINYLVLNCLTGNEITDKYIEESVKDSLKRLIYPSIEREIRAELTEKGENSAIEIFKANLKALLMQPPIKGKAVLGYDPGFRTGCKIAVLDDTGKLLDTATVYATAPQNDVEGSIKTLKELIYKHNVGVVSLGNGTASRESEEVIARLLKEIKEEKGIDVYYVIVSEAGASVYSASELAAKEYPDINVSLRGAISIGRRLQDPLSELVKIDPKSIGVGQYQHDVAPKKMDESLKGVVEDCVNNVGVDLNIATPSLLSYVSGINANIAKNIVDYREENGAFKNRKELLKVKRLGPKAFEQCAGFLRIMDGDEVLDNTSVHPESYKKAKELLKKLGYEEEDIANNKLKDIDSKVSLLGIESLAESLDIGIPTLTDIISSIKKPGRDPREEMPKPILKTGIMDIKQLKSGMTLMGTVRNVADFGAFVDIGVHQDGLVHISQLSDSFVKHPLDVVKVGDIVEVRILEVDEKRNRISLTMKK

SEQ ID NO: 52043 - protein, 443 aa, Clostridium acetobutylicum
MNYTQGSLFENIENIPLAGRMRPRNLSDYIGQEHILEKGKALRNMLEKDSITSMILWGPPGVGKTTLAMIIASTTKCNFVEFSAATSGIKEIKDIMIKAEKDRLFGIRTLLFIDEIHRFNKSQQDTFLPHVEKGDIILIGATTENPSFEVNSALLSRCRVFVLKPLSNNDIVKLLKNALTDTRGFKNKNIQISEDLLTLIAVYSNGDARTALNVLEMAVLSSKLEHGVVTINKGILEDCMQNKALIYDKNGEEHYNLISALHKSMRNSDVDAAIYWLARMLEGGEDPLYIARRLIRFSSEDIGVADTNALNVTVNVYNSCHYIGMPECSVNLTEAVVYLSLAPKSNSIYMAYEKAKKDAKETLASGVPLHLRNAPTKLMSDLGYSKGYKYAHDFDNKVVDMQCLPDNLKDEKYYFPTTEGREKLFKERLHYIKKKKHTVNKSI

SEQ ID NO: 52044 - protein, 236 aa, Clostridium acetobutylicum
MEERLQKYMAECGVASRRKCEKMIQDGRVKVNGTIVTELGFKVDYKKDTIELDNKEIKLEDKKVYAILNKPKGYLTAASDYRGRKTVIDLLNFKERVFPVGRLDFNTTGLLIVTNDGEIFNRIMHPRQNVNKCYLATVKGKPQFKHLDALRKGIDIGGYITKEAEVSVVSFDGKNSILKIVIHEGKKRQVRRMCAAVGFPVEELKRISIGNIKLGDLKEGNVRMLNKEEIEYLRSL

SEQ ID NO: 52045 - protein, 275 aa, Clostridium acetobutylicum
MDKITIEDLEIFANHGVLGEEKVLGQKFLLSLYLTLDLRKPGLSKTLSDTVNYAELSDRVEEEFQRENFDLIETAAEKVAEFILLNYDLIQSVKVILKKPWAPVKKHLKYVSVEIERSWHTVYIGLGSNIADKSQNLKDALKIIDDNYLCKITKTSNFYTTRPVGYLNQDNFLNCAAEVKTLMTPNELMDFFLETEKSLKRERKIHWGPRTIDIDILLYDDLVTYDPHCTIPHPRMAERLFVITPLCDINPYLVHPISNKRLINIKNVLSKTQSL

SEQ ID NO: 52046 - protein, 154 aa, Clostridium acetobutylicum
MDRTITIINETLVELFNDILTIEQTALKQGGFNDLSVTEVHTIEAIGMYVPRTMSEVAATLGITVGTLTTAVGNLVKKGYVKRERSEEDRRVVKIALTKRGKLAYRIHAKFHSDMVKETVKGLSKEEERVLTSALEKLNRFFRDKYHIKNCKKD

SEQ ID NO: 52047 - protein, 528 aa, Clostridium acetobutylicum
MENKKFSDLKLNSSVLKAIDDMGFEEPSKIQAEAIPVVIDGYDMIGQAQTGTGKTVAFGAPIISKIKDIDEKEGVQAIILTPTRELAIQITDELTRLSKYARVRVLPIYGGQSIERQMRAIKRGVDVIVATPGRIMDHIKRKTVKLDKVKFLVLDEADEMLDMGFIDDIEGIIKNISGDRQTMLFSATMPAPIKKLASNYMKKEVKHIAIIKNSLTVERIQQFYFEVKNKDKFEALCRIIDVEEPETTIIFCRTKRGVDELVESMQFRGYNVEGMHGDMSQNQRINTLKKFKENNIDFLVATDVAARGIDVHNVSHVINYDIPQDMESYVHRIGRTGRANAEGIAYSLVTPREYVMIKQIEKFTKSKIRRKEIPTIDDIFETKYNTLTDKITKNIEKDDFKKYIPFVQKLDDEFNLVDVSAALVKMIFDKEMGFDYSDDDKLKSDESVRLFFSAGRKDKLTVKKLLEFIDNASGVEGNEIGDIDILDKFTFVDVPERLRDVIIRTCDGKKLNGRKVNIEVAKSKKKSK

SEQ ID NO: 52048 - protein, 1191 aa, Clostridium acetobutylicum
MFLKSIEIRGFKSFADKTDLIFKNGITAVVGPNGSGKSNISDAVLWVLGEQSVKNLRGGKMEDVIFAGTQYRKSVGLAQVSLILDNSDKQLNLDYSEVTVSRRLYRSGDSEYYINNTKCRLKDIQELFMDTGIGKEGYSIIGQGKIEAVLSGKPEERRALLEEAAGIVKFKTRKVDAEKKLENTNQNLVRINDILRTYEERLEPLRIESEKAKRFVELSDELKTKEINTIIYSIDNIDYRINDLKQKMADLKLSIDENVKDKEKISLELKVATESLDEFDAKYSSNKTKYYESKSEHQKILSEIELLKEKTSNSDVAKNKLYKEIEDLDNSIVNLKSRYEIQLKTLTEDKNYNKELLSKINKSEEKKKNIDGLIEEWEKSIKQYKNDAIDIISTISQNNNEVVILKKEIESNESKLESIKRAGEGYSKSLKINEVTKNTLSEELVKINDKISGYENQIRENRSKISKLNRIISDEEKLNRELNSKSNKLEANKNMLINLEKQYEGYNRSVKNLMQHVTKGFVDVKPESSFVLGEVIKVKKEFETAVEISLGAAISDIITLDDNIAKKLINYLKSKNLGRATFLPLNIIKGRKLNISDATRHEKGFIGIASELIDYDSTFLPAVNYVLGRTVIVDNMDSALKIAKLNSYSFKIVTLTGEVVNPGGSLTGGSTYSKAASIIGRKREIEELNLELNNVSQALEQSSNKIIENKKVVKELDNLCLDLTDTIHGEKIELTKIKERLKSIDIESEKLNKSYNTSVGEIGFIKEKINKHLEKLKVKEEENKALKLREANNNNLIDELERKLKDENSKVLNLNEEIMSMKVDKAKSDEMLMSSTREIERYKVEMHNMENKKISLKNEIDDFENQVKILKNKIEYNNGKVVQIKQVIEELENSFKDSEVERSKLKGNIENKRNSLQGINLVLQKLETEKHRYEINLAKIETESENLYERLNSDFKLTYSEAAEFKEEIEEMISYKKKIDELKREINKMGVVNVASIEEYKEVKEKYTFMNSQKEDLDNAKDELIRVIEEMTSKMRTVFNENFKKLNENFKITFRDLFKGGNADLILSGDDELNSSIEINVEPPGKKLQNINLMSGGEKGLSAIALLFAILKMKPTPFCILDEIEAALDDANVARYAEFLRRFSENTQFIVITHRKGTMEASDVLYGVTMEEKGVSKVISLDLDSDRENVS

SEQ ID NO: 52049 - protein, 939 aa, Clostridium acetobutylicum
MKDKIVIKGAKVHNLKNVDLTVPRNEFVVFTGLSGSGKSSLAFDTLYAEGQRRYMESLSSYARQFLGQMDKPNVEYIEGLSPAISIDQKTTGRNPRSTVGTVTEIYDYLRLLYAKIGVPHCPNCGKEISQQTVDQIVDSVMKLEERTKIQVLAPVVRGRKGEHTKLIAHIKKSGFVRVRIDGEVYEIDEDEIKLDKNKKHHIEALVDRIVIKQGVEGRLTDSVETALKLAEGLVVINVMGKEDMLFSENFACPDCGISIGEISPSMFSFNAPFGKCDVCDGIGTLLEIDEDLVIPDKSKSIMEGAIAPWGEGRLKEESWTFGVLKALSKKYKLDINKPIEDYDEKTLNILLYGAPDVLKVNYVKDSQEMVFNHHYEGIINQMKRRYMESNSDYIKSEIENYMSNNPCPKCKGARLKKEVLAITVGNKNIFEFCSMPIREEVSFIDTLELSNKHKIISAQIVKEIKSRLEFLINVGLDYLNLAREARTLSGGESQRIRLATQIGSSLVGVLYILDEPSIGLHQRDNDRLIATMKNLKDIGNTLIVVEHDEDTIKAADFIVDIGPGAGEHGGEIIAAGSLEDIKNCKESITGQYLTGVKKIEVPKERREAGKNFIEIVGAKENNLKNVNVKFPVGLFTCVTGVSGSGKSTLVNEILYKALNKKINRSKLNPGKYKSINGIENIDKIIDINQSPIGRTPRSNPATYTGVFDIIRELYASTKEAKLRGYKAGRFSFNVKGGRCEACKGDGIVRIEMQFLSDVYVPCDVCKGKRYNRETLEIKYKDKNIDDLLNMTVEDALKFFENLPRIKNKLQTLADVGLGYVRLGQPSTQLSGGEAQRIKLAYELSKRSTGKTLYILDEPTTGLHTDDVKKLISILQRLTDMGNTVVVIEHNLDVIKCADYIVDLGPEGGEKGGTILCSGTPEQVAQNSSSYTGQYLKKML

SEQ ID NO: 52050 - protein, 205 aa, Clostridium acetobutylicum
MDVRLTPMDINNKEFRRTLRGFDTEEVDQFLDQVSENYEQLYKENSELKERNSILKEKLAHYEKIEDTIQNTLILAQNAAEQAKQSAKTESDLILKNANDTAQRIIDKANQDVIKINDDYDNVKQQFMRFRAKYRNFMNSQLDMFNSLENDFESNYNVSTTESINEKEIEPESVKPSSVEVESTFDDSDKSFADDLEEVKKFFVK

SEQ ID NO: 52051 - protein, 397 aa, Clostridium acetobutylicum
MAKEKFERTKPHVNIGTIGHVDHGKTTLTAAITTILAKEGKAKAFNYEEIDKAPEEKERGITINTAHVEYETENRHYAHVDCPGHADYVKNMITGAAQMDGAILVVSAADGPMPQTREHILLASRVGVEYIVVFLNKADQVDDPELIDLVEMEVRELLNEYGFPGDDTPIVVGSALKALQNPDDAEAIKPIKDLMAEVDAYIPTPERPTDKAFLMPIEDVFTITGRGTVATGRVETGTLKVGDEVEIVGMKDEITKVVVTGVEMFRKILDSALAGDNIGALLRGVQREDIERGQVLAKPGSITPHNKFVGQVYVLKKEEGGRHTPFFNGYRPQFYFRTTDVTGSIQLPDGVEMVMPGDHIDMTVELITKVAMGDNLRFAIREGGRTVGSGVVTSIIE

SEQ ID NO: 52052 - protein, 408 aa, Clostridium acetobutylicum
MEEVIERFLKYVKFDTQSDENSNTVPSTDKQLKLGKNLVEELKEIGLSGVSIDDNGYVMAYLPANIEKNVPALGFISHMDTSPDMSGENVNPQFVKNYDGNDIVLNKDKNIVLSPKDFPEILKYKGKTLITTDGNTLLGADDKAGIAEIITAISYISKHPEIKHGKICIGFTPDEEVGRGADYFDVKKFGADVAYTVDGGDFGELEYENFNAASAKITVHGRNVHPGSAKDKMINSISVAEEFMRLMPKEQAPEYTEGYEGFYHIVDFQGSVEETKLQYIIRDFSKNKFEDKKKLMLDAAKFINEKYGRNLVEIEVKDQYYNMKEKIDEVKYVVDIAYKAMEEVEVKPLVRPIRGGTDGARLSFMGLPTPNLFTGGVNFHGKFEYIPTFAMEKAVEVIVKIVELYAEK

SEQ ID NO: 52053 - protein, 324 aa, Clostridium acetobutylicum
MKGIDIYSGQGSVDFNAVKESGVEVVYIKATEGLTYTDSTYKDFYDGAKNAGLKIGFYHYLRANDPTSEAEHFFNTISGLSLDCKCAIDVEVTLGQSIDQISSNVRKFADYLINKGLDVCVYTYTNFYKDNLNSTVKDLPLWIAEYGVSKPNIDASYVGFQYSDSGSVNGISGSADLDEFSEGILVGGTVVIDPGQGGDDNIKAIQQDLNILLKRGLEVDGIEGPETEAAIKDFQSIMGLTVDGIWGTNTSGAAQQIFSRPLDGVAYPHYEYATRYIQYRVGASVDGTFGSGTKAKVAAWQSNQGLMADGVVGSATWSKLLDEN

SEQ ID NO: 52054 - protein, 340 aa, Clostridium acetobutylicum
MCKDIKILAIESSCDETAAAVVVNGRKVLSNIISSQIDIHKKFGGVVPEIASRKHIENISLVVQDAIKEAGVELKDIDAVGVTYGPGLVGALLVGLQYAKGLAYSINKPLIGVNHIEGHISANFIQYPDLKPPFACLVVSGGHTFIVYMKDYGEFEVLGQTRDDAAGEAFDKIARAIGLGYPGGPKIQEMAKRGDESALQFPRAKFHDNSLDFSFSGVKSAVLNYLNTMKMQEKEINRADVAASFQKNVVDFLVDNTIKACKIKKIDRIAVAGGVASNSFLRETMVSRGRENGIDVLFPAPILCTDNAAMIGSAAYFEFKKGNIAPLDLNAIPNLKLGER

SEQ ID NO: 52055 - protein, 268 aa, Clostridium acetobutylicum
MYKLIALDMDGTLLNDDKIISKRNKEAIKKAKNLGYKVVLSTGRPLKGVERYLKELDLVNDDDYAIAFNGGLVQNTKTGEVLGKELMKFEDLDRLYKLSQKFNVNIHMLSINECITPKKNPYTEVEVNINQIPLIEKNFNELPHDTVIVKIMMIDSKEKLDKVEKLLPKEIYDDYSVARSSDIFLEFSPKGVHKGVGLKILSEHLNLKKEELIAVGDAGNDIAMIEYAGLGVAMGNAFPYVKESADYVTDNNETHGVAKVIEKFMLNQ

SEQ ID NO: 52056 - protein, 57 aa, Clostridium acetobutylicum
MAKISITLKKSLIGRKKDHIATVNALGLKKIGRTVEHEDTPQIRGMIKKVDYLLEVK

SEQ ID NO: 52057 - protein, 435 aa, Clostridium acetobutylicum
MIIGISSRLFKGGTNFPGRVALKIDKNILSTVTKNYNIVFITGTNGKTTTTNLIYSILKSSGKEVITNNTGANLKPGITSCFIKNFKFSDSKEKYAVIEIDEANLKFLTEYTKPKAIIITNLFRDQLDRYGEVYTTLLKIMEGVNKAPEATLILNGDESLLGNLDVPNKIMYYGFDCPINEENKISINADAKFCNKCKHPYEYEFITYNHLGKFFCSNCGYKRPNLDYYIDSVKALDPSGSSISINGTDFYLNQPGVYNIYNALCAYSVAKFLGIEDDTIFDSLKNSKSSFGRQETIDIAGKNVKIILVKNPAGYDEAIKTISLDKRELSLAVLLNDNYADGRDVSWIWDVDFEKLSNLNINKVMVSGIRLYDMAIRLKVAGLNNDNFELENNFEELLNSMKNCDGEIIYVLATYTAMIDLRKFLYSKGFIKKLW

SEQ ID NO: 52058 - protein, 355 aa, Clostridium acetobutylicum
MIKIIKKTTVIAMTIAMVTTVFSGCSNSNRAIEKKESTKMTVTDMSGEKTQVPKNSKRIGDGWPAHNEVLCMLGYGNNVVSTILTRKQEPWLYKVNPQMNESETVFTKTDVNMESLIKTKPDIVFLPTSYNFDNKIKKVGISVVKLNFTNFDELKSCFKLTGKILGSKSEKKADKYNKYLDNKINTVSKVTLQIPENQKLKVLHIQNIAPLTVDGSNTIIDSWIKVAGGINVASEVKGNMKEVSMEQILKWNPDVIILGADVKDEGAFFNSSAWKNINAVKNNKIIHNPNGAFMWDRYGAEEALQIQWAAKTLYPNKFSDLDITNETIKFYKEFLNYNLTKEEAERIIKGKAPVD

SEQ ID NO: 52059 - protein, 155 aa, Clostridium acetobutylicum
MRVGIGYDVHKLVENRKLILGGVEIQYSKGLLGHSDADVLVHAIIDSILGAAGLGDIGKLFPDSDNKYKGISSLKLLKEVNALIKDKGYKIGNIDSTIIAQKPKISPYIEDIKKSLCNVLDIDLGSINIKATTEEGLGFTGRGEGISSQSICLLI

SEQ ID NO: 52060 - protein, 70 aa, Clostridium acetobutylicum
MQKDIQPEYHQDAVVKCACGNTFTTGSTKKELKVDICSKCHPFFTGQQKIVDVGGRVEKFRKKYNLSADK

SEQ ID NO: 52061 - protein, 447 aa, Clostridium acetobutylicum
MKDIERDDLKYIWHPCTQMKDYEKMPPIVIDKGEGCYLYDVNGNSYLDCISSWWTNIFGHSNKRINKAIEKQLNEIEHVIFAHFSNKPAVEFSKSLIQIAPEGLDKIFFSDNGSSAVEIALKMSFQYYQQTGKVKKTKFAALTNAYHGETIGALSVGDLDLYSKIYKPLLIDTLRIQGPDCYRCKYNKERHSCEAECFEEMEKSLKKHNSELCAIIIEPMIQGAAGMKMYSPKYLKKLRYACDYYDISVIFDEIAVGFGRTGKMFACENADISPDIMCLSKGISAGYMPMSVVLTTSKIYNAFYDDYVNLKAFIHSHTYAGNALACAAAIESLKIFKEESIIEKNIGKSKLIEKLTKNRARNNKFIGDIRSLGMVTAIELVKDKDTKESFDWKSRVGYEIYKIALKKGLLLRPIGDVLYFMPPYSIGEKDIEFMVEKCFESIEQYLE

SEQ ID NO: 52062 - protein, 739 aa, Clostridium acetobutylicum
MVELRCVIEAVVFKNEENGYVVANANAEGKDKITIVGCIPYIMEGQSLKISGEWIVHPQFGKQFKIERCEEILPNSLLGIEKYLASGIISGIGPVTAKKIVNKFGEKTLEILDNDIYRLSEIEGIGKKKIDKIYEAYSEQREVRNIMIFLQNYGVTPKQCVKIYNHYKSKAIEVVKQNPYILVEEISGIGFKTADKIARSLGIQGNSPFRIESGVCYVINEFCALGNTYMPIDKLVKNCINVLNVKKEEVEKAIYECTLSQKIKVEIINGENCVFTMEYYYCEIGITRKIITLAYDSYKSLEIDVDQKIIQFENENKIKFAPSQVEAIEGAFSNGIEVITGGPGTGKTTIIRCITYIFEELNMKVFMAAPTGRAAKRMSESTGREAKTIHRMLELGYEDEVFFDNNNYSTLQCDVVIIDEASMIDVVLMNSLLKSIGMGTRVIIVGDVDQLPSVGPGNVLRDIIESKCVKVIRLNNIFRQAKESMITVNAHKINSGEMPLLNKKDKDFYFIREDNAEAITNTIISLVYKRLPLFNKSWKAARDIQVLAPMKKGIAGVANLNVSLQSIINPPHKSKDEIKFRDNIFRVGDKVMQIKNNYMLKWNRINGDGEKTGEGVFNGDIGFISNIDEDNNVIVIFDDEKEVTYERINLDELELAYAITIHKSQGSEFPVVVLPMTMGPPLLMNRNLLYTGITRAKQLVVIVGFPKAIKFMIDNDKSFERYSGLKWRIEDIIKEESEE

SEQ ID NO: 52063 - protein, 222 aa, Clostridium acetobutylicum
MGQKVNPHGLRVGVIKEWNAKWYANSKNFSSYLVQDNKIRKFVKNKLSSAGVSRIEIERAAKRVKLNIHTAKPGMVIGKGGQGIEALKKDLVNFVDKENVLINIVEVKNSDANAQLMAENIAQQLERRISFRRAMKQTIQRAMRTGAKGVKTACAGRLAGAEIARTEQYHEGTIPLQTLRADIDYGFAEADTTYGKIGVKVWVYNGEILPTKKIEKKEEANA

SEQ ID NO: 52064 - protein, 406 aa, Clostridium acetobutylicum
MDKPEILAPAGNLEKLKTAINFGADAVYLGGNKLNLRAYADNFTIEQLKEGIKFAHDRGKKVYITVNIFPHDKDLVGLEEYLKELDEIDADAILAADPGIIAVAKEVVPNLEIHLSTQANCTNYKSALFWHKLGVKRVVMARELSLNDFKKLREELPKSCEIEAFVHGSMCMAYSGRCALSNYMTGRDANRGECSQPCRYKYHLFEQEKGEQKDITENGKGTYIMNSKDLCMIEHIPELISSGINSLKIEGRMKSAFYVASVVKAYRQAVDSYVENPDKYVFNPKWMENLKKPSHRPYTTGFYFGEEVKQHHKTYAYIRDYDIVGVVKKYDKESKIATIEQKNKVYNGNKVEILSPKGDNIVMSIKDMRNKQGKVIDSAPSAQMIFTIKCDEELKKDDILMKAREE

SEQ ID NO: 52065 - protein, 155 aa, Clostridium acetobutylicum
MNAKNECAYYKSPIGNLEIKALDEKVSEINFVEAMGEENFQSDVLKAALIQIDEYFRGKRKQFHLRLFIDGTEFQKKVWNELTRISYGEVVSYGEVAKAIGNKNASRAVGGANNKNKIPIIIPCHRVIGSDGRLIGYDGGIWRKKWLLEHERKFK

SEQ ID NO: 52066 - protein, 157 aa, Clostridium acetobutylicum
MINISSNDSIRSFVFQNGDKKDFPLLTIGRNSYINDMDIQVSPGSEIVNIHIGNYCSIGYKVMLLVDRNHDYKSISTAPILEIERKLHRKGQIIIGHDVWIGNNVIILSGVRIGNGAVIGAGTVVTKNVPPYAIAVGNPMKIIKYRFDAIEIKNFKA

SEQ ID NO: 52067 - protein, 81 aa, Clostridium acetobutylicum
MNIDSHTFLLGMQYLGAGLAAIGCIGGGVGIGTVTGKAVEAIGRQPESASKVMPTMIMGLAFAEVTSLYALFVAIMLLFVK

SEQ ID NO: 52068 - protein, 299 aa, Clostridium acetobutylicum
MYSECPYFRETNNCPVPPTNFPPQHQNRQPGIESVMRPRPIYNNPCYYASGKLRNKVALITGGDSGIGRAAAVAFAKEKADVAIVYLYERNDAMETKRVIESLGQRCLTIEGDVRRDGFCREAVERTIRTFGNLNILVNNAAVQFPQDSILNITNEQLENTFRTNIFSMFYITKAALPYLKYGSSIINTASITAYEGEKTLIDYSSTKGAIVSFTRSLSKSLVDKGIRVNAVAPGPIWTPLIPASFSAARVATFGKDTPMKRAGQPYELAPAYVYLASDDSSYVTGEVIHINGGRMVTT

SEQ ID NO: 52069 - protein, 242 aa, Clostridium acetobutylicum
MERLDKIISNMGYGSRKDVKKIIKDGRVKVDGEVVKDNNKQLDPQKSKIIVNGEEISYKKYIYLMMNKPDGVISATSDDYDKTVIDLLEVEDQVFEPFPIGRLDKDTVGLLFLTNDGDFNHRLISPKWHVDKVYYAKIDKDVTSEDVVAFKEGIVLDDGYKCMSAKLEVLNNSKEGSEVKVTVREGKYHQVKRMFEAQGKKVVYLKRISFAGIKLDENLEEGEYRELTEDEMKAIKQKIKMQ

SEQ ID NO: 52070 - protein, 634 aa, Clostridium acetobutylicum
MRFSAIYKNTLSEKTRKILNYGDIIVFFIILVFKLITYGKEISPEYFDSSVITPIIASVLIIFSFSFLFKGKKRTAYLLIIDLIISLILISDIAYFRYNKDIITVSAVQTAKLLVGVKSSVADVLSIKDFMFLLDIIILVPTFIYVKSINKNTIKLKFRLVLFLAVFIFGAALDAQQFHKVNVEQPTLLTAMSNRIYLTKMIGNLNFHVVDAYNFTSTKVKNSKKLPEARKNAINNYLKNNNSIPGVKFKSEGSGKNLIMIQVEALQGFVVNKSINGKEITPNLNKWINKSLYFDNYFYQVAQGNTSDAEFMSLNSLYPAQSGAAYYTYAGNTFNSIPKDLGDKGYYTAALHGYNEGFWNRNVMYKSEKFDDFYGQTSYKNDEVVGMGLSDESFLNQSLAKMKTFKQPYFSFLITLSSHYPFNDTAGYEKYTMNKLDVGEYKDTLLGNYFEGIHYTDEQLGKFLDKLDKEGLTKNSIIVLYGDHFAIPKENINQLYSFEGIKDPTDLTWYEYQKVPMFIHFPDDEHKGVNHTYSGQMDIYPTIANLYNISNNYMFGEDILNVKDGDSTNVTFRNGSFTDGKIFYVSWTNTYYDIATGKKIKETPELNKKKEAATTELEYSDDLLNHNLIKTFLK

SEQ ID NO: 52071 - protein, 344 aa, Clostridium acetobutylicum
MEKKYIMFIIAMAISFLTTPIVRKFAKHIKAIDIPKDKRRVHKKPIPKIGGLAIYLAFVLVLVLKKGHLEKAEMGIIFGGGIIVLGGFIDDLKCLRPLYKVLFQLLGAFVLIGFGLRISMVTNPLSNSFSYIHINNFIGIAITIIWIIGVTNAFNLIDGLDGLSAGVGFISSVTIAIVAFLNGPTRSEAEILSVILAGSILGFLPYNFNPASIFMGDTGAQFLGFALAAISIQGAIKSASAVVLAVPILVLGLPIYDTIFAIIRRKINGKPITQADRGHLHHRLLDMGLSQKQAVLIMYFISAIMGLVAVIAMQLTNTKAYVIFAGAVICIVGLAWKFGLFKHK

SEQ ID NO: 52072 - protein, 333 aa, Clostridium acetobutylicum
MAKVSVVMPVYNSEKYLKESIESILNQSYSDLEFIIINDGSTDNSFKIIKEYAKLDKRINVISRENKGIVYSLNEAIRLAKGEYIARMDADDISAPKRIEKQISFLKSHRDIDILGTQVKVVGNISNDIKEKNENKLNIEFDIYDDNREKILNYWYCLAHPSVMFRKDILRELKGYNDFKSEDLDLWLRAIESGFKIYKLKEELIYFRMHEESKTRVDNQNYEGLKDGIKIKLIDVFKREFKKDFKYIVWGASNGGKITKEVLDEFFEKSQCIAFVDKFKTGEFEKIRILHPKDINHIKFDYVFIATEPGKEEAMSSLKSMGLKCIKDFLSTV

SEQ ID NO: 52073 - protein, 482 aa, Clostridium acetobutylicum
MFENISSNGVYKNLFDGKWVESKTNKTIETHSPYDGSLIGKVQALSKEEVDEIFKSSRTAQKKWGETPINERARIMRKAADILDDNAEYIAKILSNEIAKDLKSSLSEVKRTADFIRFTANEGTHMEGEAINSDNFPGSKKDKLSLVERVPLGIVLAISPFNYPVNLSGSKVAPALIAGNSVVLKPSTTGAISALHLAEIFNAAGLPAGVLNTVTGKGSEIGDYLITHEEVNFINFTGSSAVGKHISKIAGMIPMVLELGGKDAAIVLEDANLETTAKSIVSGAYGYSGQRCTAVKRVLVMDKVADELVELVTKKVKELKVGNPFDDVTITPLIDNKAADYVQTLIDDAIEKGATLIVGNKRKENLMYPTLFDNVTADMRIAWEEPFGPVLPIIRVKSMDEAIELANRSEYGLQSAVFTENMHDAFYIANKLDVGTVQVNNKPERGPDHFPFLGTKSSGMGTQGIRYSIEAMTRHKSIVLNL

SEQ ID NO: 52074 - protein, 243 aa, Clostridium acetobutylicum
MKIVSKSSPLPLHYQLKMILQEMIENEELLPGDTIPTERELCEIQKISRMTVNKAILSLVSEGILYREQGKGTFVAKKKEKQQLTKLKSFTEEMREKGLNISTKILSFEIKTATKHISTLLELPHKKMKVIEIIRLRLTDNDPSAIETVVLPLYLFSDMTKEVIDGKSLYNTFREKYGYEPTKAKQTIEPIMLTDYEAKFLNQVGNSLALLFRRLTYRKDGVPIEYTKSIYRSEKYKYEVILT

SEQ ID NO: 52075 - protein, 1167 aa, Clostridium acetobutylicum
MITLEAEFKDFVHLHVHTEYSLLDGSGKVKKLVERAKELGMKSIAITDHGAMYGCVEFYKAAKEVGIKPIIGCEIYVAGKSMHIKHPDAENETYHLVLLVKNEIGYKNLMEIVSTASIEGFYYKPRVDHEYLMSHSEGLIASSACFGGEVQSYILKDNLEKAKKAALFYKETFKDGFYLELQYHALKDDMKVNDTLVNMSKELDIPLIATNDVHYINKEDSIAHDILLCIQTGKTIDEENRMRYAPEQFYLKSQEEMYEQFSYVKEALLNTSKIADECNFEYKFHESKLPNFPLPEGEDHYEYLKKLCYEGLNERYNPITDTIKERLEYELGIIKEMGYVDYFLIVWDFIKFARENGVPTGPGRGSAAGSIVAYTLGITKIDPIKYSLIFERFLNPDRVSMPDIDSDFCYENRQKVIDYVVEKYGKDCVSQIVTFGTMAARLCIRDVGRAMNYSYGEVDKIAKMIPNVLNINIDKALEMNPELKAIYDDDDRIKDLIDISRKLEGLPRHTSTHAAGVVISSQPLVNYVPLLKNEESIVAQFTMGILEELGLLKMDFLGLRTLTVINDTIKMVKQNRNIDIDIDDIDFDDYGVYKMIGEGKTVGVFQLESAGMTSFMKELKPDSLEDIIAGISLYRPGPMNEIPRYIRNKNNPEEIKYVTPELKHILDVTYGCIIYQEQVMQIVRDLAGYSMGRSDLVRRAMSKKKHHVMEEERHNFIHGVVDENGNVEVPGCIKNGISEKIANEIFDSMMDFASYAFNKSHAAAYAVVAYETAYLIHYYPAEYLAAMLNSVMGNSEKVAFYIRCAEELKIQVLPPDINGSYSRFTVKEDTIRFGLAAIKNVGFNVIESIVRARNEKGNFISFTDFCNKIDTSEVNKRAVESIIKSGGFDTLGVYRSKLLAVFEKIMDGISGQRKKNIKGQMNLFTDFVQDDYEEVEIQYPDIKEFDKKYLLAMEKEMTGLYLSGHPLEDYEETLKNMTSIKISDIVAPQSLEDNDGVKLDENTDVQDGTRVIIGGIVTSVTKKVTRSNTMMAFIKLEDMYAAIEVVIFPKILEKNASYINEDEMVIIKGRINKREDEQPKVICEEISPIIKNTEKIYVLVEDDTAVKTSLKEIRKMLLLYNGDTPIYMCTKKDRKKFLIDKALWVQKEVEVIKFLTDKFGENNVKVI

SEQ ID NO: 52076 - protein, 104 aa, Clostridium acetobutylicum
MNKEELELTTMEIVAYAGDARSKYLEALNAANGGDYDKAQQLVLEGNDLITEAHNVQTKMIQMEAQGKKIEVGFLVVHAQDHLMTVMLLRDLVKNLINLYKKVN

SEQ ID NO: 52077 - protein, 476 aa, Clostridium acetobutylicum
MEYEIVIGLEVHAELATKTKMYCGCTAEFGGQPNTHVCPVCMGLPGALPHINKRAVDYGIKAGLALNCSITHIGRMDRKHIFYPDNSRNYQITQDELPLCTNGYIEIELEDGSKKKIGVERIHIEEDAGKLLHTNAGTLVDFNRCGVPLAEIVSKPDMRSPREAVTYLEELKSILSCVGVSDCKMEEGSLRCDANISVMKKGAKEFGVRTEIKNMNSFKAVEKALNYEYERHIKAIESGEKLTQETRRWDDAKNETAPMRSKEEANDYRYFPEGDLVTLNIDDEWIESIRKTIPELPYQKRERFIKEFGIPKYDASVLTLTMSMADFFEKTAKISGDAKSASNWLMGDISKIMKENYVWIEDLKFTPEQLSELIKLINEGTVSNAIGKKVIIKMFETGKSPKNIIEEEGLIQNSNEDEILNIVKEVLSENEKSIEDYKNGKNRVVGFLIGLVMKKTKGKANPKIVNKLMIDELNKQ

SEQ ID NO: 52078 - protein, 340 aa, Clostridium acetobutylicum
MGYFTGKNVLIVGGTGTIGHGLINELLKENPKVIRIFSRDEYKQFLMQNEFRGIAEKFRFLIGDVRDYDRVERAMNGIDVVFNLAAMKHVPACEYNPEEAIRTNITGMENVIKAATYHNVECVVFTSSDKAINPTNSYGATKLLAEKLVQAANYSKGNVRTKFVAVRFGNVMGSRGSVIPLFKKQIEENAVITVTDPTMSRFMMTLSQAVKLIMTAAKEATGGEVFILKMPVIKLIDLAKVVVEETSRKLDINPERIKIKEIGLRAGERCYEELMTREESVNAYDLGHSYVVIPSSFYITDYKSKYSKYKKAEIGSYNSSSIEPITLDEVRQLLKNCGLL

SEQ ID NO: 52079 - protein, 317 aa, Clostridium acetobutylicum
MGVIIYSVLISFLFSILQGPLFIPILHKLKFGQPIREDGPKNHMKKAGTPTMGGIIFITTAIIAMIIMRKNLNSNAVFAFVCFFSFAMIGLIDDSLKILHKKNEGLTSKQKFLLQIIVSAAISYYAYIRFGSDTFIPFLKITWTLPPIVYMAAVVFYFVAVTNAVNLTDGLDGLASSVTILVVTFFTVVSFSWHQYELSVFCGIIVGILLGFLKYNSYPAQIFMGDTGSIGLGGAVAAIALVLKLPLLVIIVGGIYVIEVLSDIIQVSYFKLTGKRVFKMAPIHHHFEKLGWHETKVVSVFSIVTVILCLIAFLSLI

SEQ ID NO: 52080 - protein, 283 aa, Clostridium acetobutylicum
MMIESINWFPGHMAKTTREIRENLKLVDAVIEIRDARIVYSSSNPDINSICKDKPRIILLNKFDLAEKSITDNWVKALSSESIRAIPVNALEGRGLNSIKPALNELLKPKLDNMAAKGIQNYIIRVMVVGIPNVGKSSFINKMAKNKVAKVGNKPGVTKSKQWIKTNIGIELMDTPGVLWPKFQDQKVGLNLAFTGAIKDEIMDIEELALKLVQFLQKNYPEKLMERYKLEDINEDPLINMNNIAAKRGALLKGGEIDYNRVSIIIVDEFRSGKIGKISLERP

SEQ ID NO: 52081 - protein, 72 aa, Clostridium acetobutylicum
MSKEDVIEMQGTVLESLPNAMFEVELESGQKILAHISGKLRMNFIRILPGDKVTVELSPYDLTRGRITWRAK

SEQ ID NO: 52082 - protein, 249 aa, Clostridium acetobutylicum
MGIIQTKDLNLYYGNVQALKKINLDFSANTVTALIGPSGCGKSTFLRTINRMNDLISTVKIDGEVMFEGKDVYKDYDEIELRKRVGMVFQKPNPFPMSIYDNVAYGPRIHGIKNKGKLDEIVERSLKGSALWEEVKDRLKKSALGLSGGQQQRLCIARTLAVEPEVLLMDEPTSALDPISTLKIEELMDELKHKYTVIIVTHNMQQAGRISDNTAFFLNGEVVENGKTEDIFYKPKDKRTEDYITGRFG

SEQ ID NO: 52083 - protein, 292 aa, Clostridium acetobutylicum
MINKNTKIGFIGTGVMGKGMIKNLLKGGYTVHVYNRTKEKALPLVEIGAVLETSIKELSQRCDVIITMVGYPSDVEEVYFNDNGILNNLKPQSYVVDMTTSKPSLAKKIYAAAKERNIFALDAPVSGGDIGAAEGTLSIMVGGDKEAFDALMPIFELMGKNIVLQGSAGSGQHTKMCNQIAIASNIMGVCEALSYAKKSGLNAETVLKSIGAGGAASWQLSAYAPRILKGDFNPGFYIKHFVKDMKIALEEADEMGLKTPALELSKKLYDKLIKEGKEDLGTQALYHLYNED

SEQ ID NO: 52084 - protein, 261 aa, Clostridium acetobutylicum
MWNDVESLEMVNDNLKLTVPYQKLSTMHPADLADIIEDMDFNYRKKVFESLDENLAADILEEIDPDIQADILESLSDDKKSEVLDSMPIDEIADILDEVDEETAEKILLNMEKEDAEEVRALMGYGEETVGSIMNKDFISFNVNITLNETLDIMREMNPEDEVIYCIYITDNEGKLEGYVSLKDLLFMPPEKKLKDVMNKKIAFVKDSDKLEEAIETSSKYNLISLPVVDNDNKLCGIILVNDLIDEVLLPAWKKKFKKVG

SEQ ID NO: 52085 - protein, 377 aa, Clostridium acetobutylicum
MKAITFEGMNNVKVKNVNDPNIIKNDDAIIKITSTTICGSDLHLLRGTMPKVPHGFIIGHEAMGIVEETGKEVTNLKKGDRVIVPFPVSCGHCWYCTHGLSSQCDNSNEHGEVGAIYGYGDLMGGYDGGQAEYLRVPYANFGPKLVPENLTDEQVLFLTDILPTSYWGTIVNGGVKQGDTVVVLGCGPVGLLAQKWAAYAGASRIIAVDNIDYRLEHAKKYNSAEILNFNDYDNTGEYIKEITHGGADVVIDCVGMDGERSPIENVETLLKIQGGSKSAIEISTQAVRRGGTVSVVGVYGARYNNFPFGDFFSRNITIKTGQCPAHSYVDVILDLIKQNKFDATDIITHTMSLSDGEKAYNLFNNKLDNCIKVILKP

SEQ ID NO: 52086 - protein, 305 aa, Clostridium acetobutylicum
MKDNIQIDKYLKKAEEAFLDNKLVKSLDYYNKVYELTNGEDVDTIINLALIYDSLGKVEKAEEYYKEALSIDDYEERAYYGLATIYDEKEDYEEAIKLYNKAIYINPNYHKAYFFLANAYDLSGQKNLAIETYEKLLSLDDMDFWSNLNLGCIYEEQNKNDLAYRLFSKALKINPNNHLALFNMGVICCKFNMIEKAINFYEKSIEKNKSYEYSYLNLAVIYKHRDTEKGIQILSSGIENCEKTHFLYYNRSCFYALINENNKSCEDIITALKLYPEFLKYVLEDEELESVRELNSFKSFAAKLN

SEQ ID NO: 52087 - protein, 543 aa, Clostridium acetobutylicum
MAKQILYGEEARRSMQKGVDKLADTVKVTLGPKGRNVVLDKKFGAPLITNDGVSIAKEIELEDPYENMGAQLVKEVATKTNDVAGDGTTTATLLAQAIIREGLKNVTAGANPMLIRNGIRLAVDKTVEGLKKVSKNVNGKEDIARVASISAADPEIGKLIADAMEKVGNEGVITVEESKSMGTELDVVEGMQFDRGYLSPYMVTDQEKMEAVLDDPYILITDKKIANIQEILPLLEQIVQQGKKLLIIADDVEGEALATLVVNKLRGTFNCVAVKAPGFGDRRKDMLRDIAILTGGEVISEELGKDLKDVKVEDLGSAESVKISKENTTIVNGRGDKSAIHDRVAQIRGQIEETTSDFDREKLQERLAKLAGGVAVVKVGAASETELKERKMRIEDALAATKAAVEEGIIAGGGTAYINVLPEVRELTSDEPDVQVGINIIVKALEEPVRQIAANAGLEGSVIIEKIINSEKGIGFDALHEKYVDMLSVGIVDPTKVTRSALQNAASVASTFLTTECAVADIPEKDKPEMPGGAPGMGMGGMY

SEQ ID NO: 52088 - protein, 1144 aa, Clostridium acetobutylicum
MVKKFKRVLVANRGEIAIRIFRACHELGIRTVAIYSEEDKLALFRTKADESYLIGQNKGPVDAYLNIDEIINLALKKGVDAIHPGYGFLSENSEFSRRCTEAGIEFIGPTGDMMDKLGDKINSKLAAKAAGVKTIPGVEKPIETEQQAIEFARTCGYPVMVKAAAGGGGRGMRIVEKEEDLIAACRSAKSEAKKAFGIEDIFIEKYLEGPKHIEVQVLGDKYGNIVHLYERDCSVQRRHQKVIELTPAVSMSEEKRLEICEDALKIARSIGYRSAGTLEFLLDKHGNHYFIEMNPRVQVEHTITEMVTGIDIVQSQILIAEGYKLNSPEVGINSQEDIHVNGYAIQCRITTEDPSNSFAPDTGKIDVYRTGSGFGIRLDGGNGFTGAVISPYYDSLLVKSTSWSRTFEDAIRKAIRAIKETYISGVKTNIDFLINVLNHETFRKGLCDTNFIANNPELFEITPRIDTELRVLKFIGEKVVNETHGHKIEVDVPSVPKYEIKEPLRGTKQILDEKGPKGLVEWIKDQDKLLLTDTTMRDAHQSLMATRLRTVDMVKIAKAESVLAKDLFSMEMWGGATFDTAYRFLKESPWERLERLRKRVPNVLFQMLLRGANAVGYKNYPDNVIREFIKQSSKSGIDVFRIFDSLNWVKGMEVAIDEVLNQGKVAEACMCYTGDILDTNRDKYTLNYYVNLAKEIEKSGAHILGIKDMSALLKPYAALKLIRALKNEISIPIHLHTHDTTGNGVATVLMAAHAGVDIADTAFNSMSGLTSQPALNSVVAALKNTDRDTKMDIGDLQKISDYWSTVRPVYSKFESGLKAVSAEIYKYEIPGGQYSNLKPQVESFGLGHRFEQVKEMYREVNIMLGDIVKVTPSSKMVGDLAIFMVQNELTSENILEKAKDMPFPDSVVSYFKGMMGQPKGGFPKELQKIVLKDEEAITCRPGELLPDEDFDKIRVRLKKENKIEPTDKDVISYALYPDVFEEYLKYKNEYGDLSRMGSDVFFHGLAEGEISELEIAEGKTLVVQLLHIGKLDKQGNRTLVFEVNGNRREIKIKDKVSSTKSEIVEEIVIADSSNKKEIGASIPGNVVKVFVKPGDKVKKGDSLMVIEAMKMETNVSVSEDGTVGGIFVKEGDQVQSGQLLVKLD

SEQ ID NO: 52089 - protein, 309 aa, Clostridium acetobutylicum
MVITVTLNPAMDKTLNIDNFNVGVVNRVSNIRYDIGGKGINVSKVLKNFNIESKCTGFIGGMWEKDFREELDKRGIKNEFITVSGNTRTNTKIVDDLNKVYTDINEAGPSISSKELEMFMNKFKDMCNKDDIVVLSGGVAPGIPKNIYGTLTKIAKEEGSFVILDAEGELLSEGIKENPYIIKPNDMEFELLLNKKFKNNTDIIDGAKEVIGLGVSNVLISLGSKGALFVNKDKSYYAKGLVVPVKSTVGAGDSMVAAFVYGIINSLNEKEILRFSIACGAASVSTEGTEACSLEDVKELLKSVVIEEV

SEQ ID NO: 52090 - protein, 417 aa, Clostridium acetobutylicum
MRKINIFKGKHNPQRTAIDFFKYVGPGLLVTVGFIDPGNWASNVSAGSDYGYSLLWIVTLSTIMLIILQHNAAHLGIVTGDCLSEAVSKKFKPWLTNIILYSAIGAAISTAMAELLGGAIALNMLFRLPIKIGTLIMLSLVIWMLFSSSYKKLERWIIGFVSIIGLSFIFELLLVKVNWQVAAVSFVSPSFPKNSMPIIMSVLGAVVMPHNLFLHSEIIQSRQWNVEKEDVIKRQLRYEFLDTIISMIVGFAINSAMVLLAASTFFKMHVSVSELSQAQALLKPLLGGSASVVFALALLFSGIASTVTAGMAGGSIFAGIYKEPYDIEDSHTQIGVIITMVLAAVIIFFIKDPFKGLIYSQMILSIQLPITIFTQIYLTSSKKVMGKFSNSLLDRVLLGIIAVIVTALNIALLVSYF

SEQ ID NO: 52091 - protein, 428 aa, Clostridium acetobutylicum
MSAFIVLGAQWGDEGKGKMTDYLAQGADVVVRFQGGNNAGHTVEVEDKKYKLHLIPSGILYKNKVNVIGNGVVLDPKAMFEEVEYLKGMGVEVTPENLIVSDRAHLIMPYHRALDGASEKHRGKNDIGTTGKGIGPCYTDKAERSGIRVCDLLHPEVFKEKLKSNLEIKNAIITKVYGMDAFDYNEICEEYLAFGEKLKPFVKDTSVIVYNEIKNGKKVLFEGAQGNLLDIDYGTYPYVTSSNTIGGGVCPGAAIGPTMITSAVGIAKAYTTRVGKGPFPTELLDEMGDRIREAGFEYGVTTGRARRCGWLDTVILKQAARVSGLTSFAMTKIDTLAGIDKVKVCIGYDFNGKTIDYIPASLEDLALCKPIYEEFDGWDESVADARSYDELPLNAKKYLKRIEELTETKISIVSVGPERNHTIEVSDI

SEQ ID NO: 52092 - protein, 282 aa, Clostridium acetobutylicum
MKKVCVIGAGTMGSGIAQAFAAKGFEVVLRDIKDEFVDRGLDFINKNLSKLVKKGKIEEATKVEILTRISGTVDLNMAADCDLVIEAAVERMDIKKQIFADLDNICKPETILASNTSSLSITEVASATKRPDKVIGMHFFNPAPVMKLVEVIRGIATSQETFDAVKETSIAIGKDPVEVAEAPGFVVNRILIPMINEAVGILAEGIASVEDIDKAMKLGANHPMGPLELGDFIGLDICLAIMDVLYSETGDSKYRPHTLLKKYVRAGWLGRKSGKGFYDYSK

SEQ ID NO: 52093 - protein, 155 aa, Clostridium acetobutylicum
MEVVIKISTTEAKKYLLIDTSVLPDVFEEVIQVKELLRSAKVKDITEAVKKVGISRSTYYKYKDYVFNVSDGLKSQKVTISILIEHRRGTLSEVLDKLAQRCCNILTINQDIPINNTANVNITFDISGISGDVKNIVEELKKIKNVLKVEIVAME

SEQ ID NO: 52094 - protein, 238 aa, Clostridium acetobutylicum
MIEEVIPNHIYQMSTINALVSGLYDGCASLKKLLTKGDFGIGTFKDLDGELTLLDGIFYRTKPDGSIYVCSENDSVPFAVITKLENYNTENIEACNSYEALKETLDGFIDSKNIFYAFYIKGSFNYVKTRTVVKQSMPYKPMAEVVKNQPVFNYENVKGHIVGFRCPDYVEGLNVPGYHFHFLSDDKKFGGHVSDISVKNAEVFIQNCLCFRMELPQSESFYSMKVENRNDEISKVEK

SEQ ID NO: 52095 - protein, 241 aa, Clostridium acetobutylicum
MRWIFLYIYFVFYMIRTTFFKIKLSYIRRNAPEQEYEAAVHKVIFNWAKTMLRVIGVKVNVKGMENIPKDTCVFISNHQSNVDFLAIMGTIDKQIGFIAKKEILKIKIVSSWMKMMHCVFIDRNDIRKSLMAINEGVDNLKKGYSMAIFPEGTRSKSSNMGEFKKGSLKLATKANAVVVPIAIDGGYRLFEDVKGKLRPGVVNMSILEPLNIADLDKEQKMNLSDILHKKISEELKLIKQD

SEQ ID NO: 52096 - protein, 86 aa, Clostridium acetobutylicum
MGSEINDNTIEFDVLKNKEDLTKEILNEVYNSLKEKGYNPINQLVGYLISGDPTYITNYNGARALVRKLERDEILEEVLKSYLGIK

SEQ ID NO: 52097 - protein, 133 aa, Clostridium acetobutylicum
MNKTILIGRLTKDPELKYIPNTGTATCNFTLAVDRRFKKEGQQEADFIPIVVWGKQAESTANYMSKGKLMGVSGRIQTRSYDAKDGTRRYVTEVVAEEVKFLEWGKDSNIENVDFGVPVQEDITPVDNSDIPF

SEQ ID NO: 52098 - protein, 337 aa, Clostridium acetobutylicum
MEELKVYYDEDADLNYLKDKKIAIIGFGSQGHAHALNLKESGLNVIVGLYDGSKSWKVAEDYGFEVYEVADAVKQAQVVMILLPDEKQKQIYEASIKDNLDEGDALFFAHGFNIHYNQIVPPKNVDVLMIAPKGPGHIVRRQYTEGGGVPCLYAVHQDYTGKGKEIALAYGKGIGGTKGGVMNTTFKIETETDLFGEQAVLCGGICALINAGYDTLREAGYSAENAYFECFHEMKMIVDLMYEGGMAKMRYSISDTAEYGDYVVGNRLINDNVRAEMKKVLTEIQDGTFAKNWLLENQTGRPAFNARRRIEADREIEKVGKRLRGMMSWINENPSNE

SEQ ID NO: 52099 - protein, 100 aa, Clostridium acetobutylicum
MLSINLSLCAHKKGMGSSKNGRDSESKRLGVKASDGEFVLAGNIIVRQRGTKIHPGVNVGRGKDDTLFAKADGLVKFEKRGKDKKFASVYPVEIEQSVAE

SEQ ID NO: 52100 - protein, 685 aa, Clostridium acetobutylicum
MKSKKSKFITKDILKEAIIESFKKLNPKYMMKNPVMFVVEVGFFVTILLTIFPSIFGDKGHNLRVYNLIVTIILFITVLFANFAESVAEGRGKAQADALKKTRKDTIAKLIGKDGSIKTINANELKKGDVVLVENGDVIPNDGEVVDGVASVDESAITGESAPVMKEPGGDFASVTGGTKVVSDWLKVEITATPGESFLDKMINLVEGASRQKTPNEIALNTILVSLTLIFLIVLVALYPMATYTGVKIPMSTLIALLVCLIPTTIGGLLSAIGIAGMDRVTRFNVIAMSGKAVEACGDVDTMILDKTGTITYGNRLAADFITVGGADKQKLIDYSVMCSLKDDTPEGKSIVELGKQLGITIDTKKYESIEFEEFTAQTRMSGIKLENGTAVKKGAYDAIKKRVQELKGVIPKDLDEAVNKVAKLGGTPLVVCVDNKIYGVIYLKDTVKPGLVERFERLREIGIKTIMCTGDNPLTAATIAKEAGVDGFIAECKPEDKIEAIKKEQDEGKLVAMTGDGTNDAPALAQADVGLAMNSGTTAAKEAANMVDLDSDPTKVLEVVEIGKQLLITRGALTTFSIANDVAKYFAIIPAIFTIAIPKMQLMNIMHLSTPYSAILSALIFNAIIIPALIPIAMKGVKYRPMKSEALLLRNMIVFGFGGIIVPFVGIKIIDMIITPMVRILNLG

SEQ ID NO: 52101 - protein, 175 aa, Clostridium acetobutylicum
MKIISKNKNFIVNEEIRQKEVRVIGDDGSQLGVIPTSEALKLAEEKELDLVAMSPNAVPPVCKIMDFGKFVYEQTKKEKENKKNQKIVNVKEVRLSASIEEHDVQIKSNNARKFLIAGDKVKVAVRFRGRQTDYAFKGRKILDNFFEKINDVGVIEKPAKLEGKNMIMILAPKKA

SEQ ID NO: 52102 - protein, 444 aa, Clostridium acetobutylicum
MKINKILMVSIIFIFIFNLNICVIVKADANNSNETIVSSDGTGDYTNIQDAISAGKKNIIIKDGTYLLSSALIIKNNNTVITGASKTGVKIIQTNTAADGVVIYADNVKVSNLTVDCQKYAGRGTAIVEGHSNNVMVSNCIVYGSNSNFSIYFAGKDYSSDEDTIKAVENGDLDKNNVVKDCTVYSTNEGDGVILALQRYGKLLNNTIIGTRIAFYMCNSSQVCGNTINDSKSHGIFVSIPAFNNIIENNIINNCALSGIKVAAETEHTNPEINNHTYMGTGFTIDNNKIINPAYFGIEIDELADSTIVSNKLSKCDYVGIYMLRSNNLHVVQNCVIDSGYGVNEPKDSNYSKNLSKNIKWDLNSNAAIFVDYNTKYIAIISNSIDNMTSGCAHAIFESNFDNNEAKDNFYVDNVIRGSYGSKTTNVNIDYSVLPLFYIGRFIR

SEQ ID NO: 52103 - protein, 282 aa, Clostridium acetobutylicum
MNNGKLFLVGTPIGNLKDITLRALETLQNCDVIAAEDTRQSLKLLNHFDIKKPLISYHKFNENNRSSELMDMVREGKKVALVTDAGMPGISDPGSVIVEKFIENNLEFEVIPGPTALITALVYSGLDTSKFVFRGFLPKETKDRKIVMEEVKNVKDTLIFYEAPHKLLNTLGFLFDNLGDREIAICRELTKLHEEIKHTTLKSAIEFYESTKPKGEYVLIIEGKSEEEIAIEKMSEWQDINVEEHIIKCMEEGLSKKEAIKKVAKARNLSKSEVYKYSIGIN

SEQ ID NO: 52104 - protein, 520 aa, Clostridium acetobutylicum
MAKDKRISLLKVTSMVIIINLLSKITGFIRDFITASKFGTSVSADAFSMSSVVPNIIFAILGAAIVNTFVPIFNDVIVNKGEKRAFKFSNNVITVLTLLSIILTLLGEIFCPQFVKLIAPDFHGYKYLLTIKLTRIFLLIIIVNTWVFLSTAILQAKEHFLIPSLIGIPYNLLVIVYLLFFSSKYGVLGLTEVIVFAMFVQFLIHVPSLARMKYRYKPEFNISDGYLKSMVVLLIPILLGTSVQQITSLFNGRFSSSLETGSVAALSYASRLNSLVMDIFVISIVTVIYPKMTKLSSENKIGELIESFNISIRSITIILFPIITIILIESVPIVKILFQRDAFGNKSTLMTSTALFYYIIGIIAAGLREVLCRMFYALKDTRTPMINSAITVLVNVVLAYYLKDVLRLGGIALASSIAAYVSSILLFIKLNSKLKNINYRKTIGVTIKVIFASIGMGIFLKVLYQIVGQALLKKAIIIEIIGFGGITLIALLIYMLILYLMKVEEINMVSAFLYKKIKRG

SEQ ID NO: 52105 - protein, 209 aa, Clostridium acetobutylicum
MKKGILGKKLGMTQIFNEEGKVVPVTVIEAGPCVVIQKKTSEKEGYDAIQVGFGTIREKLVNKPLKGHFAKGNVELKRFVKEFRLEDTSSYEVGAEIKADIFAAGEKVDVSGVSKGKGFQGTIRRWGAHRGPMSHGSKFHRAVGSMGGSSDPSRTFKSKKMPGHMGHVNTTVLNVEVAKVIPEKNLILIKGGVPGPNKSFVVIKNSVKA

SEQ ID NO: 52106 - protein, 482 aa, Clostridium acetobutylicum
MKLKKIIGDVKYELICGDLNVEIDNLNYDSRKVNEKGLFFCIEGYTSDGHDFIDKAVEKGADVIVCTKVPKKLPNCTVVKVEDGRKAMAVMGANFYDNPSHKLKLIGITGTNGKTTSTYMMKSMLESSGYKVGLIGTIANYIGDKKIESHRTTPESLELQKLFSDMVHDKIDYCVMEVSSHSLYLDRVYGIVFEEGIFTNLTQDHLDFHKTFENYYKAKMILFKNSKRSIINIDDKYGERVFKDAGNDKITYGLTEKADLKAENLKMTSRGTEFDLCYRGLREHVKINIPGKYNVYNALGSVAACLNEGISIEKVKDGLNKLSSVPGRCEIVTHNTNLDFDVVLDYAHTPDGLEKVLKASREFTKGRLISVFGCGGDRDKTKRPIMGEIGSKLSDIAVITSDNPRSENPEEIIKDIVQGIKTDNYVIVENRKEAIKKAMLMAKKDDVIVLAGKGHENYQILGDKTIHFDEKEIVSEFIKELF

SEQ ID NO: 52107 - protein, 439 aa, Clostridium acetobutylicum
MKNKFKVSLVVFLIVILGCFTSVFADNTNDGNEIGKSNFNNTVDNSAKVGDQLLHPEIGWKRVDDNNKNFTYSSSMGAITDSRDYNSTAHTTISKNQSYAEIKFRFYGSKLRIIACTWQDHSKKIYVDIDGNIEVYNPSVKNQFVTLAYEKSDLQLKCHDVKIYTDVKGDPNVVNGVWFNLDAIDIDSTGYLVHSESTLATGITLNKNTSSLEVGQTDTLTAAVTPNDTTNKAVTWTSSDPNVVTVDSNGKVTAVKEGKATITAVTQDGSNLSVQCTINVINSTTISLNKTTDSINVGQTDNLLADVSPSTEGVTWTSSDSSVVTVDGSGKITGVKEGQATITAATADGKTSKCTVTVSQEVNTDKAVLSITMTNGQTKQFNVTMDVVNKFIDWYKLRAAGSGDPFFQFDITDPSKPNVVKTDYIIFDKISSFEVDNYK

SEQ ID NO: 52108 - protein, 149 aa, Clostridium acetobutylicum
MMNYRKADMKDISLLVSIRKRQLIDEGIEPNIDIDKELTRYFNNKLANNLLVEWIAEENNQIIATAAIAFIDFPPTYTNKTGRKGYITNMYTEPTSRGNGIATGMLDRLVNEAKERNIHKICLVASKLGRPVYKKYGFQDTDEWLELNL

SEQ ID NO: 52109 - protein, 909 aa, Clostridium acetobutylicum
METKTNIDTVELALNKKYLIKPLMTIEEIKNSNLVEIMDEKSKVNLEENLQYPLLLKHSINGEAVNVRLKIVNERLLGIYIEVDYEGSLDGYYSSDGAASEQANDKQIPKIKGVNAVEYKKVQELCKIYGRFPSEEDFTGTIKKLQSKIAKITDELIRLNQERSSLEEANKAFQALDSIYKEYELSGFDEDVLNKNLDNIGKYEKIKEKVLNTTDIKEEAELEERIKTIENEIKKLDQIKNDISLDSNQISDSYSAYQKYKDIGTRKLEKIKKEFICNLKAKDELKSIIACDKDKITRYFYKEKTKVINENIKRLNKEINAISIIEEGVDDNIEYLIQKLKDEERYLKPNHPLNDMNKENEIKKIAKSAMEDVNSNMDSDLNAISELYNIESRMDQIQRNLKLKKDLVELKKEAQLLENAKEKLDILEKYKPIMVTRNKHKDNELFKNSYEKKYEKEIKEYNQAEDELKSMNISNLDDYDKAKIIFDDKEQELIEAENISDIASLDAEKENSKIIKYKAKRDDIIKQNSDILNVNMETYFADEVKEDSSKKIQNTINEKELLKKDENGINKENELKENKDIVKEESLPKENVNNKQEDNKTVKPADNKNKGKQVKENKNNKNKSVKNGQSKNNTQKNKPQKKTLEQLKKELLCSLKAKDELKSISKNTISEDMKAFCEEKVKKIDEDIKILDKEIGSLGVLGKSEIDDKINYMKEKFVFVSKMYNPIDQERYSRKYNSLKENQIREITEKAMANMDKAIVEEFKDISKLHTIENRIVEVQKVLDLKQQMIDLEEEGRKLEEAKEKLNIVNRYGYMMGFVSDTFYVNSYANTLKSQREAYNQAKEELSELNISNKKDFKEVKKAYDAKRKRILADKNISQITNLDREEELERIENYRKKQNEIIEKYKAV

SEQ ID NO: 52110 - protein, 740 aa, Clostridium acetobutylicum
MAELSDLLEKIDENCNNVDKDIVIKAYNFAYEAHKHQMRESGEPYISHPLDVACILAEMGMDMSTIVAGILHDVIEDTSYSYDDITEMFSKEVADLVSGVTKLDKITYKTKEEQQADNVRKMLLAMAKDIRVILIKLADRLHNMRTLKFKREQKQKEKAKETLDIYAPLAHRLGMSKIKWELEDLSFRYLKPKEYYELVDLIAEKRVEREEYISKIVEELKLNLEASGITPDIDGRPKHFYSIYRKMLNKSKSLDQIFDLTAVRILVNNIKECYAALGIVHTMYKPIPGRFKDYIAMPKPNMYQSLHSTVIGPEGKPFEIQIRTYDMHKTAEYGIAAHWKYKEGTIESTQNVPQNKNANKDDTKLTWIREMLEWQRETPSAQEFMENFKIDLFSDEIFVFTPKGKVINLPYNATPVDFAYKIHTDIGNRCVGAKVNGKIVPLDYKLKTGEIVDILTTSLVKGPNINWLNSVTSNQAKSKIRSWFKKAKRDENISKGKELLEKESKKQEFNFGEIAKGENLELVLKRYNMNSIDDLYASVGIGAVGASVILSRFKDIYEKNKDNGSLTNEEVLENVNKNIHKEHSSKKISKSEQPGVTVKGVSDVLVRFAKCCTPVPGDPIIGYITKGRGVSVHRTDCTNVNNLIKEDSSRIIEVKWGKSKNESYMAEVEIKAEDRQALLADVVEVISYMEIAIESVNAKTSKGSAYLNLKLKIQDVEHLALLMKKLRRLPGIIDIYRTNS

SEQ ID NO: 52111 - protein, 168 aa, Clostridium acetobutylicum
MVNKNRQLKEQKVAEIKEKMGKTEAMIMVKYQGLNVEEDTELRKALREAGVEYRVYKNSLAVRAINELGYEGIAQYLEGPIAIAMSYDDPTAPARIINDFAKTHKALELVAGYVQGEVFDVNKVKELASVPAKEVLIAKLLGSFKAPLSNFAYLLSAIKDKKEAEEQA

SEQ ID NO: 52112 - protein, 696 aa, Clostridium acetobutylicum
MERIDKMFGENVFNDAVMKERLTKPTYKALKKTIDKGESLDVTVADEIAKVMKEWAIEKGATHFTHWFQPLTGLTAEKHDAFIDPEGSGKVILKFSGKELIKGEPDASSFPSGGLRATCAARGYTIWDCTSPAFIKDGTLCIPTVFCSYTGEILDTKGPLLRSVDALSRQAIRVLRCLGNTTSQKVFPNVGPEQEYFIVDKKSYDEREDLIFTGRTLFGAPSPKGQELDDHYFGVLKERVSAFMKDVDKELWALGITAKTKHNEVAPAQHEIATIYTSGNLATDNNQLVMEILKKIALKHGLVCLLHEKPFAGINGSGKHNNWSMGTDDGLNLLEPTDMPHDNKQFLLFFTATIKAVDKYADLLRFSASNAGNDHRLGANEAPPAIISVFVGDQLEDILEQLEKGKATSTKGNSKLDLAISTVPAVEKDATDRNRTSPFAFTGNKFEFRMPPSSKSVAEPNTVLNVIVAEVLSEIADRLEKASNVDAEIEAILTETVKDHKKVVFNGNGYSDEWVKEAEKRGLPNIKTTVEATKALIADKNVAIFEKFGVLTKKELESRYEVALENYSKAINIEALTMIDMASKKIIPAVIKYTAELANSLNAIKAAVPTADVSTESDLINKISSLTGKLNFDLKELKASTEKASAITDAYDQAYAYKFDVFEKMSALREAADALEVLVDKKAWPFPTYSDLLFNV

SEQ ID NO: 52113 - protein, 249 aa, Clostridium acetobutylicum
MKEENEYIVKRRKKRRRKRITIFLFLLICILVTLCLKLPYFNIKYINVEGNKIIKSDNIIENSKLKKGNNIFYLNLNKYKDNIMQDPYIKNVSIRQKLPNTIDIIVKERQAVFYINSGENYFIIDKNGVLLEIRKNISGMNLIKLDGVTLKNGKIGTEIPCDSRRLELINQITSVSIKDNNLKITDVDMSHILSLKVYFKNMCVVIGTPDDIYNKLNEAVNVIISQKLIDKKGYVDVSFKGNPVYSLQQ

SEQ ID NO: 52114 - protein, 542 aa, Clostridium acetobutylicum
MAYTALYREWRPKTFGEVVGQEHVTTTLKNQVKNNRIAHAYLMCGTRGTGKTTTAKILSKAVNCLNPQDGEPCNECEMCKKINAGIAIDVTELDAASNNSVDDIRNIIDDVQYPPHESKFKVYIIDEVHMLSQGAVNAFLKTLEEPPQNVVFILATTDPQKLPVTILSRCQRFDFKRIKRESMIGRLREIVNEKGVFADDRSLGVIARMSDGALRDAVSILDQAIAEGNGKVDYEKVLQMLGIVTNEYIFDLMDHVINKDIEGSIKIVDKIILQGKEITVFMKDFIAHVRNLMVVKVSKKPEEVIDMSEENLKTLKEQSSKIRIEETMRDINILQEAEEKARKSMNSRIYMEMAIIKMCKIEYDTSSEILLARINKLETIIREGKISVQKVEAKQKPSSSQKVPRLTVNKAEEHDEAKPEEEFSSDLNISLDDVRKIWRDVIEMFKSRRNMVMGVHLSNGVPFSCKDGVIEVRFTKEYNFSKQHLEKPQNNKKVEEVLQDMLHGRVRVIYSLEKGDGTTNQGSTEDILKKTFGEEELHIIDE

SEQ ID NO: 52115 - protein, 419 aa, Clostridium acetobutylicum
MVVIEFKNVSKHFNLYKNKSYSLKEKFLNKVLNRNKLEVEQLHVLKNASFKIGQGETIGIIGENGTGKSTSLKLVANIIRPNEGQVTVKGKISSLLEVGVGFQPDMTGRENVYLYGSIMGLSKKEIDERYDEIVEFAELENFMDTPVKNYSSGMYMRLGFSVAVTVNPDILLVDEVLAVGDANFQKKCLNKIQAFKEQGKTILFVSHDMSTVRRICDRCIFIRKGGEVIEGSTDRMVGLYMKLLYAKSEEHKKEEQKSEESLADFDFKLHEADEFKDGNREGNKKLEITKLYFSDKEGRPRNFFGTEENIKVNVEFRKNTDIKAAVMAFEIITEEGYKLIYHDCKQDGMLITEMKDTNMVSFSLQNELLLKSKYYFSIALMDENLQEIYDFRHKHYWFTIHEGNIKEDGKVKISCDWML

SEQ ID NO: 52116 - protein, 125 aa, Clostridium acetobutylicum
MPTISQLVRKGRKTLAAKSTAPALKECPQKRGVCTVVKTTTPKKPNSALRKIARVRLTNGYEVTAYIPGVGHNLQEHSVVLIRGGRVKDLPGVRYHIVRGTLDAAGVADRKQARSKYGAKKPKQK

SEQ ID NO: 52117 - protein, 443 aa, Clostridium acetobutylicum
MEILKHVMDDVIKRNPNEPEFHQAVKEVLLSLEIVAEKHPEWVKDKIFDKIVEPERQIIFRVPWVDDNGEEHINRGFRIQFNSAIGPYKGGLRFHPSVNLGIVKFLGFEQIFKNSLTGLPIGGGKGGSDFNPKSKSNSEIKRFCQSFMLELNKYIGANTDVPAGDIGVGSREIGYLYGMFKKIRNESTGVLTGKGLTLGGSLVRTEATGYGLCYFMNEALKAKGKSFDGATVIISGSGNVAIYANQKATQLGAKVVAMSDSNGYIYDANGINLNTIRKIKEVERKRIHEYTKYHPNASYTEGCDGIWKLKCDIALPCATQNEIDENSAKTLIANGCYAVGEGANMPSTIEAVDLFIKNKVIFGPAKAANAGGVATSALEMSQNSMRYSWTFEEVDTKLQNIMKNIYIKCSNAANEYGFEDNLVAGANIAGFTKVAEAMYSLGF

SEQ ID NO: 52118 - protein, 385 aa, Clostridium acetobutylicum
MKQIKVISIFGTRPEAIKMAPLVRRLNENKNVESKVCVTAQHRQMLDQVLNLFDINPDFDLNIMKTKQTLTGITARVLEGLDKIFADENPDIVLVHGDTTTTFAAALAAFYKKIAVGHVEAGLRTYNKYFPFPEEMNRKLTGAVADLHFAPTLGSKKNLLREAVNEKNIFITGNTVVDAMNHTVEKDYVFENDELNKLDYKNKKVIMVTAHRRENWGKGIENICTALRRIAEENEDVEIVYLVHLNPVVKDVVYNNLNGMKGVHLLPPLDTKETHNLMNKCFMVMTDSGGLQEEAPHLGKPVLVLRDVTERPEAVEAGTVKLVGTDIKKIVDEAYKIMKDEEEYEKMSKAINPYGDGKASDRIVDAILYHFGVLKDRPDEFSPKK

SEQ ID NO: 52119 - protein, 142 aa, Clostridium acetobutylicum
MFIGEYNHALDTKNRIIIPSKFREELGDNFILTKGLDGCLYVYPLGEWKVLEEKLKKLPLTNHNARAFVRFFFSGANEVSLDKQGRVLVPQNLIEYASINKEIISIGVSTRIEIWSKEKWVEYNESSVDMNAIAEKMSELGI

SEQ ID NO: 52120 - protein, 496 aa, Clostridium acetobutylicum
MNHIYYKSTRNNDVSILASRAILKGISDDGGLYVPERVPELDFDIKDIVNMDYKEIAYKVMKTFFTDFTEEELKYCIENAYDSKFDTEEIAPIKKAGDTYFLELYHGPTLAFKDMALSILPYLLKTASKKNGIQDKIVILTATSGDTGKAALEGFKDVEGTEIIVFFPNDGVSEVQRLQMVTQKGKNTHVVAIRGNFDDAQSGVKKIFTDKEFIQELKENNCVFSSANSINIGRLVPQIVYYFYAYSKMCSKGEINFGEKINFVVPTGNFGNILAAYFAKSMGVPINKLICASNDNKVLYDFFENGTYDRNREFVTTISPSMDILISSNLERLIYLVCDRDSSKVADFMRELSEGGKYNITENMKKKLKDFYAGYATEEETKKAIEKMYKENKYLIDTHTAVAYSVYEKYLKNTKDKAKTVIASTASPYKFTNAVMTSLDNKYASYDDFELMKKMSEVINKDIPSGVKGLNERKVIHKDICSKDEMKKIVRSFLGK

SEQ ID NO: 52121 - protein, 173 aa, Clostridium acetobutylicum
MNYISSALIPIIIFSIVLYGMIKKVKVYECFVEGAKDGIRICVNIFPYILAMLLSVAIFRESGAMQYLINILKPVFKIIGFPSELVPLIIVKPLSGSGALGVFAEILKKYGADTYIGIIASIIMGSTETIFYTITVYYGAIKIKNIRHTLWAAIMADMTSIIVAILVVRFMGI

SEQ ID NO: 52122 - protein, 462 aa, Clostridium acetobutylicum
MKRDFNEFVKFIKNKKTAVVGMGISNRPLIHFLSKLGAEITAFDRKTKEELGDEVINEFSSENVKFELGENYLSALKGFDVVFKTPSMRIDSEALVKAKQEGAYITSEMEEFIKYCPAKIFGVTGSDGKTTTTTLIYNMLKEEGYKTWVGGNIGTPLFSKIKEVSTKDKVVLELSSFQLMTIDVSPEVAVVTNLSPNHLDIHKNMEEYINAKKNIFTHQSKGNVLIINRDNEITNNMESEALGDLLKFSRNEKVKNGAYYNKQDGNIYLFENKICNKDDIKIKGMDNVKNFMAAFCAVSKDVSKESMIKVAMNFAGVEHRREFVRELDGVKYYNDSIASSPTRTISGLNAYERPVILIAGGYDKHIPFEPLAEKGYDKIKVLILMGATKNKIKETFDKVICEKNIKLPIILSDNLEEAVCEAKKVATNGDIVTLSPACASFDSFPNFEVRGNKFKEIVNNLK

SEQ ID NO: 52123 - protein, 431 aa, Clostridium acetobutylicum
MKERKGLKKYSTIINNFLSLFVLQGLNYILPLITVPYLVRTLGPEKYGVTVFATAFITYFQIITDYGFNLSATRKISMNKKYKKKIEEIFNSVMLIKLALTILCFIVMLVIVFCFKRFQADYKVYIYTYGMIIGNFLFPVWFFQGIEKMKYITIVNVIGKVMFTIFIFIFVRTSKDYLNVALLNSFSYILIGIISLLIVKIRFKIKFRIPKTSIIKKDIKEGWYIFTTSFLTNILTSTGTFILGLFVNEKVVGYYGAIDKIVKALVSMFSPVTQAIFPHISELFKYSHKEAKNEIIKFSKYVMFFTTIMCIVIVLFNKTIIYILYGNRYIMYSHILAYMSVWIFLSILNNFIGIQYLIGSGNGKYYSRAFTIASIITLILYIGTVEFISYNSIILGSVVGELALTISMIYFIKSKLSNDNSCKGDVVNEQN

SEQ ID NO: 52124 - protein, 344 aa, Clostridium acetobutylicum
MAITRRPLFNENGDTETSKKKIVNGNTTNLNDFNNMKYTWVSDWYRQGMNNFWIPEEINLSQDLKDYGKLTDNERTAYDKILSFLIFLDSVQTANLGNINDYITASEVNLCLTIQAFQEAVHSQSYSYMLDTICSPEKRNEILFQWKDDEVLLSRNKFIGDIYNNFVEEPSDENFLKAIMGNYVLEGIYFYSGFMFFYNLERNGKMPGSAQEIRYINRDENTHLWLFRNIIKELQKEEPDMFTEEIKKELKDMVKTGVENEITWGHYVIGDNIQGINKKLIEDYIKYLGNRRLEAIGFEPIYEGYDENPALWVDIYADANSVKTDFFEAKSTAYAKASTLVDDL

SEQ ID NO: 52125 - protein, 566 aa, Clostridium acetobutylicum
MKKKLVLYNLGILIITLIMITVLFIKIEDYEYRQNTEQDLKRTNNVVSNVIDMNKGKDISSALKVVIKNSDIRVTYINKNGVVLYDNDINAEKLDNHNKRVEVAEARKNGYGYSVRYSKSLKNNIIYYAKVRGDGTVVRTAVELSSVERFEARYLKFYIYVIALSIIAAVYLSFKLSYVILNPIRELQNTSSRIAMGELETRVNVESRDEIGQLGKTFNNMAGRLQSTIRESVEKQKKLEAILVSMDSGVIAVDRKHKIIMINPYAEKIFGIDKNIIGQSLMDCIRNYEFEDIFNKRAEGYAEIKTSWPKERNLRIKTADIINGYECIGTVAVVQDITDIRKLENMRTQFVANVSHELKTPLTSIKGFAETLRYVEDDNQKGEFLDIIDDEVDRLTRLISDILTLSDIEIRPFMKKEEFDVNEIIKAVCGLLEKSASRKNISLKVFGEDVPNLIGDNDKFKQMIINLVDNAIKYTEAGGEVSVYKKYTKDDVIISVKDNGVGIPKEHLQRIFERFYRVDKARSRANGGTGLGLAIVKHIVLNFNGSINIESKLGVGTEFIITIPYK

SEQ ID NO: 52126 - protein, 306 aa, Clostridium acetobutylicum
MKFTAIDFETANEKRNSPCSIGIVVVKDGHVVEKSHHLIRPKEMRFMPINIGIHGIRPAMVEKEPEFDKVWEKIKHYFDDTLVIAHNASFDISVLRKSAELYNIELPEFNYICTMKLARNFYKGIENAKLNTVNNFLGYEFRHHDALYDALACSNIMLSISKELKCKDITEISKLLGVTVGKVDSKGYKPSQTKGIAVRTSDRIYFSKKKSAFERLKADEFKNEVVVFTGRLDSMSRDEAMGLVRRLGGTAGSSVTKKTTILVTNMKNIKNLRREEMSNKLKRASDLNARGQNIKFLNEEEFLKIK

SEQ ID NO: 52127 - protein, 406 aa, Clostridium acetobutylicum
MNKPELLAPAGNIEKLKTAIEFGADAVYLGGSKLNLRAFADNFSLDELKEGIEFAHSRNKKVYITLNVFPHNEDLNGLEEYLKDLYEIKADAVIVSDPGIIMTAREVVPNLEIHLSTQANSVNYKTAIFWHKQGVKRIVVARELSLKEIKSMKEKIPETCEIEAFVHGSMCISYSGRCLLSNYMTGRDSNRGACAQPCRYKYSLVEEKRPNEYFPVYEDEKGTYIMNSKDLCMIEHIPDLISAGIDSLKIEGRMKSSYYVASVVKAYREAIDTYFENPEEYKFNEKWMEYLTKPSHRRYTTGFYYGDSNKQHYESSSYIRDFDIVGIVRSYDKETGIAVIEQRNKCYAGDKVEVLRPRGENLEIELKDLKNKDGEAIESTPVAQMIYTIKTDKVLESGNMLIKGKN

SEQ ID NO: 52128 - protein, 56 aa, Clostridium acetobutylicum
MAYKITDACVSCGSCASECPVSAISQGDTQFVIDADTCIECGNCANVCPVGAPVQE

SEQ ID NO: 52129 - protein, 303 aa, Clostridium acetobutylicum
MLGNFFDKLKNGLSKTKNNLTSKISDVLTSTVTIDDDLYDELEEILITSDIGVETSLYIIDKLKEKIKENKVKDPSLVNDCLKEVIKDILGDKKGSLMPKQIPETILVVGVNGVGKTTSIGKISSRLKSQNLKVIMAAADTFRAAAIDQLEVWSKRANVDIIKHQEGSDPAAVVFDAIEAAKARKADVLICDTAGRLHNKKNLMNELEKINRIIDREFSQSTRRTLLVLDATTGQNAVIQAKQFMEVCKVDGIVLTKLDGTAKGGIVIFIKHQLDIPVEFVGVGEGIDDLQEFNPSDFVEALF

SEQ ID NO: 52130 - protein, 285 aa, Clostridium acetobutylicum
MGLFKKRKYITVSSKNLDENNDVENQPTIPDGMWIKCSKCGKILYKSDVDDNFKVCPKCNAHLRMNARERIEFIIDEGTFIEFDKNMMAANPLEFPNYEAKIKSMQEKTGLKDGVVTGLGNINGYKTVIAVMDSNFMMGSMGSVVGEKITRAIEEATERKLPVIIFTTSGGARMQEGMFSLMQMAKTSAALAKHNEAGLLYVSVLTDPTTGGVTASFAMLGDIILAEPKTLIGFAGRRVIEQTINQKLPSDFQTSEFLFKHGFIDMIVERKELKVTLGNILRMHS

SEQ ID NO: 52131 - protein, 279 aa, Clostridium acetobutylicum
MNQISINNVDYIYSDGFEALHDINMSIKKGERVAILGPNGAGKSTLFNMLNGIISPTSGEVKINGLDTKVKKNLNVIRRDVGMVFQDSDDQLFNSSVMQEIAYGLVNMKVSEEELQSRVKWALNVVNMDGFEKKSPHNLSGGQKKRIALASVLAMKPEVLVLDEPTVSLDPRGTIKLVKLLKKINEEMKITIVFSTHDMDIVPLFADKVYVLNEGKLILQGGVKEVFNNKKVLRNINLRLPRVAHLAEILKSDGCIEFDELPLTIGEIRKCIKNLKGGI

SEQ ID NO: 52132 - protein, 295 aa, Clostridium acetobutylicum
MNDKSTYFDRKSKKEDCFVDIFFKDDILNGENFKRHWHEHLQIYYFTAGTAYLECAQNKFDVTTGSIAIINSNELHYLESHSNNLKFYTIRIEPTFLFSNKEDLLQTKYLAPLALNRITFKNLIENDLQILECIKTILKEYSSKNIGYELAVKANIYQLIVYLLRGYVDKILNENEFEERKRILNKFQCVFRLIEEKYTEKLTLNELADCVNFSTHHFCRTFKQMTGKTTTDYINGIRLYKSTNYLKQTDLNITEIAIKCGFDNNNYFSRLFKKHYDMTPTKYRKLYAGHFSKII

SEQ ID NO: 52133 - protein, 308 aa, Clostridium acetobutylicum
MGKIAFVFSGQGSQYVGMGKDLYDNYQSAKETFDKADEVLGFKISELCFEGKDEELNLTENTQPAVLITSIAALRALEEEKGIKPDVVAGLSLGEYSAHVCSGSFSFEDAVRLVKKRGRYMQEAVPKGIGTMAAIIGLEGDVVRGICAEQSKEGIVEVANYNCPGQIVIAGEVKAVESACTKLKESGARRTVMLSVSGPFHTSMLKSAAEKLEEELKNINIEDMKVPVITNVTGDYVEDKDQIKGLLKKQVMSSVRWEDTIRRMMDDGVDTFIELGPGKTLSSFIKKINRKMTIFNIEKAEDLNKIQL

SEQ ID NO: 52134 - protein, 135 aa, Clostridium acetobutylicum
MNRKKSREVAMKLLFEISINKNSISDTIEHYKENNEIENLDFEYIERILRGIDENMEYIDSKIEESSKKWKISRISKINITILRMAAYEIFFEKDIPCKVSANEAVELAKSYAEENSFSFVNGVIGNLINSSEEK

SEQ ID NO: 52135 - protein, 407 aa, Clostridium acetobutylicum
MNFFKVSSVDETKDIIDEYFHLEVEGEQVDIFNCVNRIAFDYIRADCNIPEFKRSTVDGFAVNSRDVFGATEAIPAILTLKGEILMGKVTDFNIVDGECAYVPTGGMLPEYADSVIMLEYTQKLDEDTILVYSPVASGDNVIQKGEDIQNDNIVIRKGEKIRPYEVGVLASIGIKHVNVCKKIKVGIISTGNELIACEDELTLGKIRDINTYMLWAAIIDDGAEPINYGIVKDDYKLLKHTICRATEECDILVISGGSSVGKKDQTIKAIEDFEDGKILVHGVSVKPGKPTIVAKKGDKIIFGLPGHPLACSIVYIIFIREYINKAMCYKKEVYAVKSIMSINYHKAKGREEYLPVALENDGDRIIAKPIFGKSGLISTFSRAWGYIKIEKDLEGLREGQVVEIYKL

SEQ ID NO: 52136 - protein, 418 aa, Clostridium acetobutylicum
MNKFIIKGGETLNGEVDISCAKNSVLPIIAATILCGEKCTIKNCPMLLDVFVISDLLKSIGAQVDIDLNSGDMKIDTSNVKSIEPDAELVRKMRGSFLIMGPMISRYGRFKISLPGGCNIGTRPIDLHLKGLKALGVNIEIGHGYVEANAAKLLGDRIYLDFPSVGATENIIMASVFAEGETIIENAAQEPEIDDLINFLNKMGSDIKKIETGAIIIRGVKELKGIKYTPIYDRIEAGTFIIAAAITKSKIKINGVEEKSIKPMIAKFCEMGINMEIDGKSLIIDGRNELKPVDIKTMPYPGFPTDMQAQIMSLLCCTEGTSVITETIFENRFMHVPELKRFGANIKIDGRSAVIVGVKELTGCSARATDLRAGAALILAGLVAEGETQISDIYHVDRGYVSIEKKLTKLGAKIERVE

SEQ ID NO: 52137 - protein, 608 aa, Clostridium acetobutylicum
MCGIVGYSGKKEASSILVEGLSKLEYRGYDSAGVAILNDGKINVSKCKGRLVNLENKLEENPIAGNIGIGHTRWATHGEPSDLNAHPHSNKDNTISVVHNGIIENYMQLRTWLKSKGYEFKSETDTEVIPNLVDYFYEGNLLDAVIKAISKVEGSYALGIVSSKEPDKVVAVRKDSPLIVGISEDGNFIASDVPAILNHTRDIYYIKDKEFVVLTSEGVEFYSNEGEKIEKELNHIEWDANAAEKGGYEHFMLKEIYEQPKAIRDTMTSRIIAGQPIKLDDISITKEQIENIDKIYIVACGTAYHAGVVGKYVIEKFARIPVEVDIASEFRYRDPIITKNTLMIVLSQSGETADTLAALREAKSIGARVIAVTNVVGSSVARAADDILYTWAGPEIAVASTKAYTTQLITMYILGLFFAQNKNTLTNEEIEKIKADMLTLPEKAEEVLASKEKVQKFAANTYMHKDMFYLGRGIDYAVAMEGALKLKEISYIHAEAYAGGELKHGTIALIEEGTVVVALGTQSDIYDKMVSNIKEVTTRGAKVLGIAAEGRKGMEEVVDSVIYVPEVNDMLLPVLSVMQLQLLAYYVSVEKGCDVDKPRNLAKSVTVE

SEQ ID NO: 52138 - protein, 714 aa, Clostridium acetobutylicum
MDKNIFNILKKYFGYSSFRRGQENIIQSILDGNDTFAIMPTGGGKSICYQVPALYMKGLTIVITPLISLMKDQVDTLRENGVNASYINSTLSSKETNDILMSALSGHLKILYVAPERLEQDYFRNAIKDLTISMVAIDEAHCVSQWGHDFRVSYKRIVPFINIFDKRPIVAAFTATATDEVKKDIINLLELKEPNCFITGFDRDNLFFSIVKNENKFDFITKYLSKHKELSGIIYAATRKEVDSLHQKLISQGYSVGKYHAGMGDKERSESQDLFLYDETKLMIATNAFGMGIDKSNVRFVIHYNMPKNLESYYQEAGRAGRDGEKSECIILFSGQDIQIQKFLIKQSIPSFDRQRIELKKLNDMINYCMTTSCLRKYILNYFGENYEVENCDNCINCTGNVEIVDITLEAQKIISCIYRMGQNFGVTMIAEVLKGSKNSKVLRFNFDKLSTYGIMKDCTLKQITNLINTLIADGYLYLSDSEYATVKMSQKSIEVLKGYKKVVQKIHIVEELSLSTDNTLFEILKALRLEIARRENVPPYIIFSDSVLSEMCKYYPKDKNSMLQIKGVGEIKYNKYGEIFEEKIREYIKETNLTPEDNNKGTLKVPELLSKKIPTHIETFNLYKKGITIADMAKIRNLSIPTIQEHILKCANEGLNVNLDAYIPAEYKDLIYEKIRILGTSKLRPIKDALPDDVDYMAIKAAICKYTSKNKAI

SEQ ID NO: 52139 - protein, 236 aa, Clostridium acetobutylicum
MQSIKYKRVMLKISGEALAGTNGYGIDFEVANRIAKEIKEIVDLGIEVGAVVGGGNIWRGRNGKGMDRTTADYMGMLATCINALALQDSLENMDVDTRVQTAIEMKQVAEPFIRRRAMRHLEKGRVVIFAGGTGNPYFSTDTTAALRAAEIEADVILLAKKVDGVYDKDPHKYDDAIKFDNLTYMEVLEKNLQVMDSTATSLCMDNNIPIIVFGLDVSGNIRKAVLGEKIGTIVSK

SEQ ID NO: 52140 - protein, 462 aa, Clostridium acetobutylicum
MKDEKTMDKIVSLAKNRGFVFAGSEIYGGLANSWDYGPLGVELKNNVKKLWWKKFVQDNTYNVGLDCAILMNSEVWVASGHLGGFSDPLMDCKECKSRFRADKIVEDYLTEQGAEVASADGWSNEKLENFIKDKHIKCPKCGKENFTSIRKFNLMFKTFQGVTEDASSEIYLRPETAQGIFVNFKNVQRSSRKKVPFGIGQIGKAFRNEITPGNFTFRTREFEQMELEFFCKPGTDLEWFKYWKDYCWSFLLDLGINKENLRFRDHSAEELVFYSKATSDIEYKFPFGWGELWGVADRTDYDLKKHMDHSGEDMNYLDPSTNEKYVPYVIEPSLGADRVALAFLIDAYDEEELEGGDQRIVLHFHPQIAPIKAAVLPLSKKLSEKALDVYSKISSKFNIEYDETGSIGKRYRRQDEIGTPYCITVDFDTLEDEAVTIRDRDSMSQVRVKIEELEKYLEEKIK

SEQ ID NO: 52141 - protein, 129 aa, Clostridium acetobutylicum
MFVWKDEFELGIDKIDNEHRKLFEIANKGYELLKNEFYVDKYDKIMDIIVELKEYAEFHFSEEEDYLASIGYKKLFTHKLEHDSFIKKVESFNIKEIDYDQDKYIQEMLDFVVTWIKEHILEKDREYID

SEQ ID NO: 52142 - protein, 447 aa, Clostridium acetobutylicum
MISKILIANRGEIAVRIIRACREMGIETVAIYSEADKESMHVYLADEAVCVGPAKTQDSYLNIGNIISATVLTKAQAIHPGFGFLSENGKFAKMCSECNIAFIGPDAETIENMGNKAKAREIMIKAGVPVVPGCEGTIDSEDQALKEATRIGYPVMLKASAGGGGRGIRIVREEKDLISSFRNAKSEAKAAFGDDSMYMEKFIEEPRHVEFQILGDSFGNVVYLGERDCSIQRRNQKVLEEAPSPVMTEELRREMGEAAVRAAKAVNYKNAGTIEFLLDKHGNYYFMEMNTRIQVEHGITEMVTGVDLVKEQIKIASGNKLSFNQSDIKIKGHAIECRINAENPEKNFMPSPGEIKYFHVPGGPGVRLDSAAYTGYNIPPNYDSMIGKLIAYGKDRAEAINIMERALGEFIIDGIDTNVDFQYEVINNEKFIKGKYNTSFIEKELKH

SEQ ID NO: 52143 - protein, 355 aa, Clostridium acetobutylicum
MNKKVVIGMSGGVDSSVAAYLLKEQGYDVIGVTMKLTPDDAFYTEQEGGCCSLSAVEDARRVAYRIGIPFYVVNFTDIFKEKVIDYFTEEYLNGKTPNPCIACNKYIKFDALLKKAESLGADYIATGHYCRIVEENGRYVIRKSEDEKKDQTYVMYNMTQDQLKHTLMPCGDYKKDRIREIAREIGLNVFDKKDSEEICFIPDNDHGGFIKRECPKAVKTGNFVDKEGKVLGKHKGIIYYTIGQRKGLGIATGKRVFVTNIDAMKNQVVIGEEEEIFENELISFKNNFIPFDKLTEPMEVDAKIRYNAKASKATIYPVDDENVKVKFEKPQRAITKGQSVVFYDGDLLVGGGIIK

SEQ ID NO: 52144 - protein, 307 aa, Clostridium acetobutylicum
MRDMNKKNRNGLTEKEFLDRYVPGDYERPSNTVDMLLFTVDDVPIEGKDPNKALKILLIKRGDHPYMGCWAVPGGFVNINEGLSSACYRELKEETNVENVYFEQLKTFGDDVNRDPRMRVISVAYMALADKLSITPKAGDDADDAKWFTVKKRFISSKGFGIDKIDTYNILLTSDDGETKIGYLVTEKFEKNGVVTIKVPSYRLLEWSKEELAFDHIEEIDCALERLKNKIEYTPIAFSRLPKYFTLREAQKVFEAILNLEKPLTRANFRRKIKKMVVETEKEKITSGRPATCYTFNEDWQHTFLDE

SEQ ID NO: 52145 - protein, 174 aa, Clostridium acetobutylicum
MIVKEKRKMNIIKGQTEDLSGVIDIISNCIRYMKSQGIYQWDEFYPSSDIIENDIKRKDCYVLKDNERCVAYVAINEQQPPEYSQIDWLTHEKKILVIHRLCVQPEFQGRGIAKKILKFIEDLATKNNYSSIRLDAYSGNNKALKLYSNLDYKKVGQFYLPVRDLPFYCYEKNI

SEQ ID NO: 52146 - protein, 76 aa, Clostridium acetobutylicum
MVKVYSTTSCPWCKKAKSYLASQNIDFIDANVQDDMNARDEMLNLSHQSGVPVINIDGNIVVGFDKDKIDELLNLK

SEQ ID NO: 52147 - protein, 341 aa, Clostridium acetobutylicum
MEKKNIDWANLGFGYVKTDKRFVSNYKDGKWDDGALVSDATIAISECAGVLQYSQACFEGMKAYTTEDGHIVTFRPDLNAQRMEDSCKRLEMPAFPKESFVDAVVKTIEANSEWVPPYGSGATLYIRPFMFASGPVIGVKPADEYQFRVFATPVGPYFKGGVKPLTLRVSDFDRAAPNGTGHIKAGLNYAMSLHAIVTAHEEGFDENMYLDAATRTKVEETGGANFLFVTKDNKVVTPKSNTILPSITRRSLMTVAKDYLGLEIEERTVYLDEVKDFAECGLCGTAAVISPVGKIVDHGKEICFPSGMSDMGPITKKLRDTLTGIQMGHIEAPKGWLKIIK

SEQ ID NO: 52148 - protein, 448 aa, Clostridium acetobutylicum
MNKKDILELKRRFKKDECTFTRMCGCYVDAQKNIVLKINETFLNLRDEEFFKYLEIAKKALSGTVGNNLLELNFPLDGENMDSRQLSLLSLKKSALKDAALLDSFYNLIIDSYDYAGNFLILIFHDAYDVMTKTTDNSKLDESEEIYEYLLCAICPVSLSKAALGYLEDENRIGARNRDWIVGPPDLGFVFPAFTDRSTDIHSIMYYTKNAKDTHPELMEQALGCSSKQTATEQKEAFNTIIRKAIGSDDAKSDHLFMEIQETLNNIVDENSTVNGTDAEPVILTNDNIQDILVESGIPEEITEKIEKSYKEEFADTPPVVENLIDKKALAANEQRKKEKRLEQKVQVLEERLEQTKKEIVEDSDKESVLEEKINIPEEAATDTTLEEDSNSEIAPDNQSDPSYDIVLKVKPEKVPEIKSQIIDGKKCIVIPLEENEQANVNGVDALL

SEQ ID NO: 52149 - protein, 273 aa, Clostridium acetobutylicum
MLKERLENVRGTNPLIHNITNYVTVNDCANILLACGASPIMADDIGEVEEITSICRGLNINIGTLNENTIESMLKAGKMANKLKHPVILDPVGVGASKLRRQTALKLLEEVKFTVIRGNISEIKVLALGQGITKGVDADVNDKVKDDTLDNVINFAKGFSKKTGAVIAITGAIDIIANESKAYVVRNGNPNMSKITGTGCMLSAMTAAYISANVDSPLEATLASVCAMGICGELAYNRLSKRDGNSSYRNYIIDEVFNLDGDKLDDAARYESY

SEQ ID NO: 52150 - protein, 304 aa, Clostridium acetobutylicum
MQVSIEDIIENLDLEVLVKGKDGIKLGLSDINRPGLQFAGFYDYFGNERVQVIGKAEWSFLNAMPPEIREKRIRKYFQFETPCIVLARGLKPQKELLDCSKEYNRWLLRSKAQTTRFINKIMNYLDDKLAPETRIHGVLVDIYGLGILITGESGIGKSETALELIKRGHRLVADDAVDIKEIESVLVGKSPYITSGMLEVRGMGIIDVPALYGLSSVLSEKNINLVIYLEQWKEGRDYDRLGTDDEHIKILNIPVRKMTLPIRPGRNVAVIIEAAAANYRYNLSSKISPVDTINKRIEESTNYD

SEQ ID NO: 52151 - protein, 124 aa, Clostridium acetobutylicum
MIDVVFKKKNNVVVSYVITGHADRMAKDSERHLENYDEETDMLYDNAVCSAVSLLGQVCILGIEEVLHIKVNYSAKEGYIALNLENLDLNDLERAQVLMKTTLLGFENLAESYDEYIKVSVEEV

SEQ ID NO: 52152 - protein, 76 aa, Clostridium acetobutylicum
MKMAANVKNRNVEKSPLKGFVGFFKDLGAETHRITWPSKLDLKKTTIAVLTFCAAYIIVVAIMDYGFNNLFRVIFK

SEQ ID NO: 52153 - protein, 211 aa, Clostridium acetobutylicum
MKVVAFNGSPKKNGNTNEAIKAVAAELEKENIEVEIIHVGNKVIRGCLDCGGCSRNMNERCVMKNDEVNDWIQKMKEADGIILGSPVHYSAIAGTMKSFLDRAFLVTSVNNGMLRHKVGASVVAVRRSGGIPVFNQLNNYINYSEMMMPTSNYWNVIHGTKPGEATQDEEGMQIMRVLGKNMAWLLKTIDSSKNNVKENEIEEKIFTNFIR

SEQ ID NO: 52154 - protein, 281 aa, Clostridium acetobutylicum
MYNKMVECKNVVYQYKNEDESKNTTAVNDVTLEVNEGEFLVILGRNGSGKSTLAKHLNALLVPTDGKVIVEGLDTSNEEDVWTIRSKTGMVFQNPDNQIVATIVEEDVAFGPENLGVKPSEIRERVDNALKSVGMYEYRKHEPHLLSGGQKQRVAIAGVLAMHPKCIVFDESTAMLDPKGREEVVNTIMDLNKNSHITIILITHYMEEAINADRIVVMDKGKVIKSGVPREVFKDVKTMKEIGLDVPQMTELAYELKKEGINVKDDILTIDEMVNELCRLK

SEQ ID NO: 52155 - protein, 219 aa, Clostridium acetobutylicum
MRLMKRIYNYIPEYAIKPLILCVIFNFSVYSGARLFYKDAVFHNLTSYLDNKIPVVPIFTVIYLGSYIFWIINYILISKVNKNVCYRLIMADLLGKLICGIIYIVYPTTNIRPHIVSSGIFVDMLKFLYSVDAANNLFPSIHCLVSWYCFAGIRNCKTIPVWYRYLSLFIAIMICVSTLTTKQHVIIDVFGGVILAELTWQLSYYLQLYKAFKFINQEV

SEQ ID NO: 52156 - protein, 454 aa, Clostridium acetobutylicum
MKRKYKMAKMSDSFMFGLDGKILCNTLYYVINVGHNFNIEAYKKSLKYVVRDLPILSCKFSLGFWRDRWEYISDFDVEQIFQEIYLEEDFSHDKNSFYETAFSKFIELKNNCIDITKEAPFKIKVFCTKQLESKVVVWELHHTVTDGRGMLQIIELAGKYYNSILNGKNADKGESSKKSFKDEFFTTTANVLKVIFYTAKNLLKRNTIPKLEPVLELEEIQAGDDKYGSMSLEKFKIDLDEINKLKSLYGVYKFTINDIILHNILKFNMNYGLNLKKCNTYIKTDVRIDIRKYLKTKGLSIGNYSVPKTIYIKSDDLFNIPQIHNCFKDFKNSCVGLKVFYSYYILGIFPVRFIRHLLSKMTEKFLIDSYAGMSSTNVGKIDEYVKPYGEIIDDIFFIPCGGSYSFPLMCISGYKNKLTISFIRYNDKNKLTQKVKNDFEKILYEDLKKVKKSL

SEQ ID NO: 52157 - protein, 490 aa, Clostridium acetobutylicum
MKRSGKVYIIGAGPGEEELITLKAIRKMKECTAVLYDRLVGQGILKYLNEKCEIYYCGKEPGCHYKTQDEINEMIIKLAKEGHIVGRIKGGDPYIFGRGGEEGLSLLKENIEFEVISGVTSPVAVLNYAGIPVTHRGIARSFHVFTAKTANDDSINFSAAAKIDGTLIFLMGYRQLNDITRKLIENGMDSKMPCAVVMRGTTSLQKKVIGNLSDIKEKCDNANMTSPCIIVVGKVVGFNQQLNWYEKKPLFGRNICITRSKNQSKTMREELLDLGAEVTEVHSIEIENTASNLEEYINKISEYDYIILTSVNAVEVLFDYLASKDYDVRKVRAKFAVIGNATKEALKKRGIVPEIVSRKHNGEGLFDEIRGYLKKDDKIFIPRSENSRKYIKEQLVSLGLSVDECFIYRTVPGKLYDKAAFENADTIVFTSPSTVKNMIALFGEKNIKKKSIIAIGPITGRELGKINAEYSTCSECSVDAIIRECLNSDK

SEQ ID NO: 52158 - protein, 560 aa, Clostridium acetobutylicum
MRKLIALIEKMKPFFEKVSNNPYLRAIRDGFLSCMPVILFSSIFLLIACVPNAWGFYWPNNVNDILMKAYNYSMGILALLMVATIAKSLTDSINGKLPKLRQINNVSVMIVSIICFILIGVQPIKGGFSSDFMGTKGLLSAFVVAFIVPNIYKLFVKNNVTIKLPEEVPHNVAQTFEDLIPLAASVLFFWLFDLVFRQVTGEVFSSWILDVLKPLFTAADGYVGLAVIYGAMAMFWFVGIHGPSIVEPAVTAIYIANVEANLKLHQAGHHATYVLTHGTSYFIATIGGTGATLMLTVMFAFIAKSKQLKAVGRTSIIPVCFAVNEPILFGAPIVLNPIFFVPFILTPILNVWIFKFFIDNLGMNGFIYIIPWTTPAPIGLILGTGFAKLAFILAPLLLVVDFVMYYPFFKVYDRELVLEEAERAKHEFDGELEEKATLKVEQKPTPKVKIESKTDKKQLVLVLCASGATSSMLANAITKGAKQEGVNVESIAMAYGQHKDVIADYDLIILAPQMASMYEELKADCASKGTKSATTTGKEYVKLTRDPVGALKFALDIINE

SEQ ID NO: 52159 - protein, 122 aa, Clostridium acetobutylicum
MSQNQNNSDLCEANVIHVDTVEKVRKQMPEDEELYELSDLFKVFGDSTRIKIICALFKEEMCVCDIAYLLQMKQSAISHQLKILRQSKLVKYRREGKVVYYSLDDEHIKEIFNMGLMHINEK

SEQ ID NO: 52160 - protein, 424 aa, Clostridium acetobutylicum
MIIIKNGYVIDPLTKREGKFDILIDGENVVRISQDIGIDDDIEVIDAEDCIVSPGFIDIHSHFRDPGFTEKEDIITGARAAARGGYTTVICMANTNPVVDNVETLRYIVDKAKTAKIEVLQVGTITKGMQGVELVDMEALKEAGAVGFSDDGKPIMDSRLVLEAMQKARELDVPLSFHEEDPKLVYESGINGGKVAEKLNMMGALEEAETVLTARDAALAVSSGAKTNIQHISSKISLGIIKLAKEMGANIIAEATPQHFSITEEEILNCGTNAKVNPPLRREDDRKAIVAALKDDTIQVIATDHAPHTKDEKAREFKEAPSGMIGLETALSLAVTNLVKTGDLTYRDMISKLTINPARFYNLDRGYIKEGHRADIVIFDPDEKYTVKEEEFQSKASNSPFIGKELFGKVKTTIYNGKIVYEDK

SEQ ID NO: 52161 - protein, 458 aa, Clostridium acetobutylicum
MNDIIKLIKSIIIEMDMEAYIVGGYIRDKLMNPKNSASDLDIAFQGDFEKILDELRKRKIKVSSIKKDSSVYRITVNGYCADISKIKGKNINEDLSKRDFTVNAIALDIKNNKIVDPFDGRVHIKRRILQVIDEKSFEDDAVRILRGIRFYIKYGMHFNGYTEEYIRKHSKNIMKFPRDRVLDEIIHIIHEDENGVFFEVMDQYMILKNILPYMEELKTVGKCKHHLVDAFTHMNTAYHVFKDMKKKYLKVKNINIEEFNKDIGVYNELDYLAFAIFTHDIGKYVSYKKEGQKISFKGHDEKGLEIIEKVCDELKFPNDGKKIVCSVVKNHMYPLMLFKLKEDERKQEEYEFFNKFDQYVPHIIVASFCDVYATTIYIDENNEKDRFTSFISELVVKYREFINLKKIKYIDGNDLIDMGFRGNDIGNILNELNKMLYIEGSKTKKEQQDFVLRMKDKL

SEQ ID NO: 52162 - protein, 424 aa, Clostridium acetobutylicum
MFVDKARIFVKSGDGGDGAVSFRREKYIPLGGPDGGDGGEGGDVILVVDPNMTTLLDFKYKRKYVSERGQNGQGAKCYGRDGKDLYIKVPMGTIIRDVETDKIMADLAHKDDKFVIVKGGRGGKGNVKFCTPTRQAPNFAQPGMPGEERWISLELKLLADVGLIGFPNVGKSTLLSVASKARPKIANYHFTTITPNLGVVDVSGISSFVMADIPGIIEGASEGVGLGFEFLRHIERTRLLVHVVDISGSEGRDPLEDFLKINEELKKYNIKLWDRPQIVAANKADMVYDDDQFNKFREELNKLGYKNVFKISAATRMGVEDLLKECARVLSTIPVTDMEIPEEERFVPEDKHFTYTIRKEGDTYIVEGTFVDRLLASVNVNEPDSFRYFHKVLRNKGVMAELEEMGIKDGDMVRLNDFEFEFLK

SEQ ID NO: 52163 - protein, 1252 aa, Clostridium acetobutylicum
MNVGKTNWTEEQKEAIDTRNCNLLVAAAAGSGKTAVLVERIVKIITNEENPVDIDRLLVVTFTNAAASEMRERIGDAIVNKLCENPNSRVIQKQLALIGKSKITTIHSFCLDVIKNNFHMLDLDPDFRVGDETEIILLKNETLEELFEDKYLQAEYTSKGINKNNNSIEFLKLVESYCGNKNDQVLFNMVMNLYNFSMSNPEPYKWLKKAAERFNVDDDFEFGDSLWAEVLMKNIQIQLLGMKGQLIESINIINSCASIESYRENLEVELSMLEKLIVASNNYEKLYEELKNVQFKTLKRCPKDADKEKQKLVRDLRDGVKKSLSKISEDILSQNSEEIKEEFKVLYPLMKTLSELVIEFDIRYKDKKKKRGIIDFNDFEHMCLSILTKSDESGNIVPSETALKIREKYEEILIDEYQDSNMVQEVILSTISRKDTENPNLFMVGDVKQSIYRFRQANPGIFLEKYNSYKENKDEKNRKVLLYKNFRSRKEVLDSVNFVFKQIMSVNIGELDYDDNEKLNLGANYEEIEENLISHSAELNIIEKSEDNTEIKENNEDEESVDNIMLEARLIGRRIIELKENFKVLDKNTNVYRKAEFKDIVILLRSTKGWANVFSDELKNMGIPVFADANSGYFDAPEVKTMLSLLQVIDNPRQDIPMAAVLKSPVGGFSVEDLIDIKVIEGDTFYDKLKVAADIGDDEFSVRIRTFLNRLYRWRKESLYTPIDEFIWYLYTDTGYYGYVGAVSGGIQRQANLKMLFQRAKIYSETSYKGLFNFINFINKLKLTSGDMGSAKILGENENVVRIMSIHKSKGLEFPIVFVGGLGKNFNLMDMNNPVLFHNYLGFGPEYVDYKKRISHKTLAKEAIKNRIRIETLSEEMRILYVAFTRAKEKLIMVGSVSDIKRSVFKWAVNLRSNQNKISEDYVLKSKSFLDWIASAVIRHKDAENLRDIMDTSKENIDNLVCDPSSWRVNVLSRNDVLSFNQLLLEEEKNINEKLTQFYKRLKEIRSSNYESVYIEEIKSRLEFKYRYEKAAELPSLLSVTELKRNINEDNDEYATKIFTPSLVKKPLFLEEVKKMSPSERGTAVHSVMQHLDFSSISCDMSIKNIRHQIDDMVFRRILTEKQAESVNINRILKFFQSPIGSRVIKAEKVYREFPFQIRVKSTEIYNDLPKIYDDENIIVQGIVDLFFKENDEIVLLDYKNDYINDENLNETVKKYTYQINYYKRALEIVTGLKVKEKYLYLFYTGDTIKIE

SEQ ID NO: 52164 - protein, 184 aa, Clostridium acetobutylicum
MGKENEESKSLGQNVKEYAILLVVALGIAVIFRTFVFARANVDGPSMMPTFKDKDVIFVEKLSLYTHSIKKGEVVTFYSGDAENNIYIKRVIGLAGDVIELKNGKVYVNGKALKEDYLAPDVYTGGGSFLAENTKYKVPDGNIFVLGDNRPVSKDSRYIGPISLKSLYGHVIFRAYPFNSMKRF

SEQ ID NO: 52165 - protein, 210 aa, Clostridium acetobutylicum
MYYNYNDFDDYDYDHGYHGYYDHDYHDHDYDDYDYDHDHDHDYDHDHDYDHDHHREEEFDPMRYEDDVLDAEAECPFVSDCPATRSQMTPPGPGQMGPGYGQMGPGYGQMGPGYGQMGPGHGQMMPPGPPPTYVPQIQSASNGPVIKAVDSGAIRMCRYKYTYIWLNNRRSFWAYLTFVGPRSIAGYRWNGRRWIYFGLDLRQIRSFVCR

SEQ ID NO: 52166 - protein, 421 aa, Clostridium acetobutylicum
MRKKISVLFLLCISVMIFFIKLRSAPIFDCYHVMLSNEAIRVRYYKINMILEIIYTFMGILIPLLIIFSRIHVSLEEFAYKVKKVWLPGICIYSFLFVIVYHIFYLPLDIYSGFINEHIFSVSNQSFGKWVWNWSLNVLTSAVFLAVILWIPYKIAKRSAKRWWIYTWIIFIPVIIFSYIISPIVIDPMYNKFEPLKDKRLESKIQNLAHRAGVYNCQLYQVNKSADTKQINAYMTGVGNTKRIVIWDTAIKNLSEDELEFVVAHEIGHYVLNHTIINCFGTIGGLFIMLYIIHKAVPHTVKKYGKMLKIESIINIRSFPLVILVITICTCVSEPLYNAVSRTMEYNADTFAVELTHNNEAGVNMFKKLSVKNLSVMKPDRWYEIWKYTHPSLQERIDFVKSYKPWEQNKPLKYGRYIKNN

SEQ ID NO: 52167 - protein, 397 aa, Clostridium acetobutylicum
MKFNKKTIEDVDVKGKRVLVRCDFNVPLKDGVITDENRLNGALPTIKYLSEHGGKVILCSHLGKAKGPDPSKTLAPVAKRLSELLGREVKFAADDTVVGENAKKAVAELKEGEIVLLENTRFRPEEGKNDDAFSKDLASLADVYVNDAFGTAHRAHCSTVGVTKFVDTAVCGYLIQKELKFLGSAVENPVRPFVAILGGAKVSDKINVINNLLEKVDTLIIGGGMAYTFLKAQGYTIGTSLLEADKVDYAKEMIEKAEAKGVKLLLPIDNIVGAEFKADTKAVTTEDANIPEGYMGLDIGPKTQKLYADAVKEAKTVVWNGPMGVFEFENFAKGTKDVAKAMAESDATTVIGGGDSAAAVNQLGFGDKMTHISTGGGASLEFLEGKELPGIVALNDK

SEQ ID NO: 52168 - protein, 350 aa, Clostridium acetobutylicum
MKLHAGLIIRMHQRLIQLMKGEKTMPQDKVLLEVKNLKKWFPVKKGFFGKNVSNVKAVDGVSFQIKKGETLGLVGESGCGKTTTGRTILKLYEPTSGQIIYNGKDIAKLSYKEMLPYRRKMQMIFQDPYASLNSRMTVGDIIGESIDIHKLWTGKERKERIEYLLKKVGLNGDHINRYPHEFSGGQRQRIGIARALAVEPEFIVCDEPISALDVSIQAQVVNMLEELQEELGLTYLFIAHDLSMVKHISTKIGVMYLGNLIEVGESSELYNNPLHPYTKALLSAVPVPDPDEAAARQRIILEGEIPSPIDPPRGCKFRGRCRYAKPECKDAAPEFKDIGENHSVACYLYK

SEQ ID NO: 52169 - protein, 333 aa, Clostridium acetobutylicum
MISVIMPVYNCEKYLEESIESILKQTYRDFEFIIVNDGSNDKSIDIINKYANDDNRIVVVSRDNNMGMVYSLNEGIDRAKGSYVARMDADDIALPERFERQIEYLNKNKDVDILACKVEAFGDVSREQKLEREHWYNVDLNNSESIESLFLENCYIAHPSVMMKMSVLKALGGYNLNYKRTEDYNLWLRAIAKGYKIAMLEEKLMKIRLHNDSKIHRDAEGFSSIRDIIQSRLEYVKEKLKLKDFSYVIWGASNGGKIAYEKIKEVFPNAKLNGYIDKFKTGKFEGVDIFYPEDLSKMKVDYVFIATLPGCKEAKGILTKNNFVPIKDFLVLC

SEQ ID NO: 52170 - protein, 123 aa, Clostridium acetobutylicum
MTREEIIEAIKGMSVLELNELVKACEEEFGVSAAAPVAVAGAAGAAGAAAGEEKTEFDVVLAEAGAKKLQVIKVVRELTGLGLKDAKALVDGAPKTIKEGVAKEEAESMKAKIEEAGGKVELK

SEQ ID NO: 52171 - protein, 296 aa, Clostridium acetobutylicum
MIRVKIPATSANMGAGFDTLGMALKLYNEITIEETEGETEIKLLGGELDRNYRNNLTYISIIKVYEFFNKEFKGFKIDMSKTNIPLSRGLGSSAACIVGGIVGANALLNEKMTIKDMLKIAVDIEGHPDNVAPALLGGVIISIKDMENIIYSRINVKSQLKYAVMVPDFKVSTELSRKVLPNEYSREDALFNISRCSMLVSALNNGENEKLRYLFEDKIHQPYRKKLINNIDSIFLKAKEYGSLGEFISGSGSTLIAVLEEADENFILKMKTYLDSLKDGWRIFEVENDNNGAVII

SEQ ID NO: 52172 - protein, 378 aa, Clostridium acetobutylicum
MSKIKVISIFGTRPEAIKMAPLVKKLKENKNFQAKVCVTAQHREMLDQVLSLFNIEPDFDLNIMKNKQSLTTITSSVLHGLSEIFSAERPDIILVHGDTTTTFAASLAAFYEKIAIGHVEAGLRTYDKYFPFPEEVNRKLTGAIADMHFAPTVKSKNNLLREGVKEKNIFITGNTVIDAMKYTVDSNYVFKNDQLNKLDYKHKKIIMVTAHRRENWGKGIENICTALRRIVEENNDVELVYLVHLNPIVKNVVYRNLNNINRVHLLPPLDTKETHNLMNKCFMVMTDSGGLQEEAPHLGKPVLVLRNVTERPEAVEAGTVKLVGTDIKNIVDETCRIINNKDEYEKMSRAINPYGDGRASERIVDYMLDYFHSLVKNH

SEQ ID NO: 52173 - protein, 317 aa, Clostridium botulinum
MHYIRRIHMEFKHISVLLEETIDSLNIKEDGVYVDCTLGGGGHSKEILKKLSHKGKLIGIDQDTSAIKAAKERLKDYENVIYVHNNFYNIDSILEELDIDKVDGIIMDLGVSSYQLDEASRGFSYMKDAPLDMRMNREENLSAYGVINNYEEEELFKILKNYGEEKFSRKIARFIVEKRTENPIETTGELVEIIRKAIPAKFQREGHPAKRTFQAIRIEVNKELQILNKAIEDSVNRLNKDGRLSIITFHSLEDRIVKVKFKELEKPCTCPPSFPICVCGKEPQIKIITKKPIEPSKEEKEINSRSRSAKLRVCRKI

SEQ ID NO: 52174 - protein, 593 aa, Clostridium botulinum
MGEALRGLKRTIMCGESRENNIGQKVTVMGWVQRKRNLGGLIFVDLRDRTGIMQIVFGEEINKEAFEKSDNVKSEYCIAVTGEIVKRQSPNNDMETGAVELKGEDIKILSESETPPIYIKEGLDASENIRLKYRYLDLRRPDMQKIFMIRHKTCKVVRDFLDENGFLEMETPILTKSTPEGARDYLVPSRNYKGMFYALPQSPQIFKQLLMVSGYDKYFQITKCFRDEDLRANRQPEFTQIDMELSFVEEDDVIELNERLLAKVFKEVGGIDVKLPIERMPYKIAMEKYGSDKPDLRFGMEINDLTEAVKNSEFKVFKGAIEAGGSVRAIKAENCATMGRKQIDKLQDFVKTYKAKGLAWIAYKEDEIKSPIAKFLTEEEMKAILEKMDAKAGDLILIVADKNNVVFESLGALRLHIAKELDIINKNEFRFVWITEFPLLAYNEEEGRYQAEHHPFTAIMDEDIELLGTEPGKVRAKAYDIVLNGEELGGGSIRIHDSKFQEKMFSVLGFTKEKAWERFGFLLEAFKFGPPPHGGLAYGLDRMIMFLAGTENIKDVITFPKNQNAFCPLTEAPNVVDENQLEELGIKKIEKED

SEQ ID NO: 52175 - protein, 219 aa, Clostridium botulinum
MVTLKSYLNNGVYFLYDILGNLMLLRRYFIMEKNSKLLKKLMLAMIVAMGIVISPILRIEGMCPMAHFINILCSVILGPWYSLLCATLIGVIRMFFMGIPPLALTGAVFGAFLSGVSYRVSKGKLICAIVGEVIGTGVIGAILSYPIMTFIWGRTGLTWIFYVPSFIMAALIGGTIAFIFLGALSRTGNLTKIQRSLGAKIYDKARINNKQTIANKTEY

SEQ ID NO: 52176 - protein, 320 aa, Clostridium botulinum
MNKLKNKKAIILITIVIALLISLGLYRYNKVEAYNRVVEAANNYMEKGEYDKAIDSFKKSLNYKEDKEIDKKVKEARQLKNSQKVYNDAVNLLEDKKYEEALEKLSSIDENKDKVYILAKDKIDGCIGELINLANEEFKKENYHSANKYLDMVLKYDKDNEKALDVRNNVKTKIEEKKNNEEKLKKQQKIKTLKEKKDNEYDKDKVNNKDKERISNSKEKSKSNSNNNYISEGKARVLVESVKPSDITLNYLGIQTVPYSHITTPYKAFPQELKNKKVYVFEGVYGKSDGSYTVSQYYVDLSGEIYKDTYPSDGKCIRVK

SEQ ID NO: 52177 - protein, 296 aa, Clostridium botulinum
MFKSGFVTIVGRPNVGKSTLLNAIMKEKLSIVSCRPQTTRNNIQTILTEDNYQLVFVDTPGIHKPKHKLGEYMVKSASEAMKDVDLVLFLINPDEKPGRGDLFIIEQLKEVKVPVFLVLNKIDENPQEKVAETLKTYSELMEFEEIIPISALKGKNIDLLKELMFKYIPEGPQYYPEDMIIDQNERFIVAEIVREKALRLLSEEVPHGIAVEILQMKKNEKGTYHIEGNILCEKNSHKPIIIGKGGSKLKKISQYARQDIEAFLQSKVYIRLWVKVKEEWRDNQSLLKELGYKNMK

SEQ ID NO: 52178 - protein, 463 aa, Clostridium botulinum
MEINKIIEELKDDLIDSTAELVKIKSIEDEAKEGKPYGEGVASALEKALEISEKLGFETVNVDGYVGYAEYGEGDEYVGVLGHLDLVPEGDGWKYPPYGAEIHDGKMYGRGTTDDKGPIMAALYGLKAIKESKLPLSKKVRILFGTNEETGSKEIEHYLEKEKPPVLGFTPDAEYPIIYAEKGITIFDVVKKLEIKSSKAIKLKYIKGGEASNMVPDYCEAGIECPDTDMIIRSLEYCANRNGIELTAEEKGGLVVIKSFGLSAHGSTPEIGKNAIMQMFKFLAELPLGHCDELQFIRFFNNNVGNETDGKTFGVELEDEPSGKLSFNVGTISMENNKIRMSLNLRYPVTYKSEDLMEKFNKKIDGTGIKVENFEDQKPLYFDAEHQLIKSLQKVYKEQTGKEPELLAIGGGTYAKEMPNMVAFGPLFPGEPDVIHKKDEYIELENLVLNAKIYGHAIYELAK

SEQ ID NO: 52179 - protein, 439 aa, Clostridium botulinum
MYRKRGGLEMKKFFDWMEEHFVPIAAKIGSQRHLVAIRDGFATITPIIMAGAFAVLFNNLGWKPYQNFMNWLLPANWKNFGDGVWNGTFAIMSLLVVFTISYHLAKSYEKDGLSAGIVSLSALLILYKPTKDGGAVPLEFLGGQGLFVALIVALIATEIFVKLAGNPKLIIKMPEGVPPAVAKSFAALLPSIIVLAITAAVKQIFGAIGIPDIHKALFSALQAPLQGVMGSLGGLLVLVLVQQFLWFFGLHGSNILAPIINAVLLPLTEANVRAFKNGVNPEHIINSQFLDSYVNMGGSGATIALLIAIFIIGRKSKSQKTIANLSIAPGMFNINEPVIFGLPIILNPIYFIPFILAPLASGVIAYVLTFIGFAPKVVVMAHWTTPPILGAIISTNSLRGGITALICMVVSIIIYIPFVRIATKKDQKNTVEVEKTHSI

SEQ ID NO: 52180 - protein, 172 aa, Clostridium botulinum
MSSTYELKLNVKEGRKVPRKGHIAKRDVLPDPLYNSKVVTKLINSIMLDGKRGVAQKICYDAFEIIAEKSGKDAMEVFETAMNNIMPLLEVKARRIGGATYQVPIEVRPERRQTLGIRWMLIAARKRGERSMRERLAGELLDASNNTGAAVKKREDTHKMAEANKAFAHYRY

SEQ ID NO: 52181 - protein, 481 aa, Clostridium botulinum
MNYPIVFKVLGDVIKYEALVMIFPLIASLYYGGKDANSFIITIAIMLCTAVIMSNIRPKNRTFYAKEGFLSVSVCWIVISLFGALPFYISGAIPSFVDCIFETVSGFTTTGATILTEVESLSKGILFWRSFTHWIGGMGILIFTLALMPSIGGTTIHLLKAESPGPTPGKIVPRIKETAKIMYLIYFAMTILQISLLLIAGMEPYDALIHAFGTAGTGGFSNMNSSVGAYNNVYIEVIITVFMLLFGVNFNVYFQLIAGNIKQAFKNEEVKYYIGMVLIAMTIIAFNIKGMYGGSLKEGFRQSSFQVASIVTTTGYATTNFDLWPTLSKSILALLMLTGCCAGSTGGGIKTVRIVLLFKAMKREISKIIHPRMVNSVKLDGKVVEDETISQVGLFVFAYVSIIVIAVLLVSIDGMDMETTLSSVLATIGNIGPGFKVVGPIGNFSSYSSFSKIVFSFCMLAGRLEIYPMLVMLSPSSMRKI

SEQ ID NO: 52182 - protein, 483 aa, Clostridium botulinum
MNLNLILKSLEYSFIKENKKEIEKIEYDSRKVKERDLFVCIEGYATDGHKYAKKAYDNGAKVIVCEKDLEDLSYYKDWTIIKVSDSRKALAIMSSNYYGNPSKHIKIIGITGTNGKTTSTFMMKAILEKAGYKVGLLGTIANYIGNKKIESHRTTPESLELQKLFKDMVDEKVDYCVMEVSSHSLYLDRVYGVEFKEAIFTNLTQDHLDFHKTFENYFNSKLILFKNAQNSVINIDDSYGEKVLKKALGNKITYGVEKNCDLKAENLHMHSRGVEFDTIFKNEKETIALNIPGKYNIYNALGSIGACLLEGIPLKTIKEALEDMPSVPGRCEIVTKNYNLGYDVIVDYAHTPDGLENILNTAREFTKGRLISVYGCGGDRDRTKRPIMGKVGSNLSDIAIITSDNPRTEDPKLIIKDVLEGIERDNYIVVEGRRDAIRKAMEIAKENDVIVVAGKGHEDYQILKDKTIHFDEREVIEELIKEI

SEQ ID NO: 52183 - protein, 70 aa, Clostridium botulinum
MKARELQELRKSSPQELQSKLNDLKAELFNLRFQLATGQLENPMRIREVKKSIAQIKTILREEEIRAYQQ

SEQ ID NO: 52184 - protein, 370 aa, Clostridium botulinum
MMKKLKFAIVGCGRISYKHVEAIINNKEEAELVAVCDVVEEKAIEKKNDYISKSSEEVNVNIYTDYKEMLEKEEIDVVTIATESGYHPEIAINCMDKKKHIICEKPMALSVDDADRMIESAKKNNVKLCVSHQNRFNKPIQQLRKAVEANRFGRLVNGTARILWNRNMGYYHQAPWRGTWELDGGTLMNQCIHNIDLLQWMMGGEIDTVYAQCDTFLRDIEAEDFGAIVIRFKNGAIGIVEGSACVYPKNLEETLSVFGEKGTACIGGLAVNKIETWKFEDGAENEEEDILKAQEGDPDSVYGFGHTPLFKDTIDAVKEDRAPLVSGEEGKKGMAIILAAYKSRLTGMPVKFPFNNFSTMDMVNVEKINK

SEQ ID NO: 52185 - protein, 840 aa, Clostridium botulinum
MRMNNMGILNKIFGTYSERELRRVNPIVNKIEALDEKMQSLKDEDFKLKTEEFKSRLEKGEKLDDILPEAFALVREAAHRTIGLKHYREQLIGGVVLHQGRIGEMKTGEGKTLVATLPAYVNALTGKGVHIVTVNDYLAKRDRDLMAPVYEFLGLKVGVILHNLNNEERQEAYGSDITYGTNSEFGFDYLRDNMVVYKEERVQRKLNFSIVDEVDSILIDEARTPLIISGQGEKSTEFYKVADYFTKSLIAEKDFTIDEKANSAMLTDEGVNKAENFFKVDNYADAENMEIQHHVVQALKANYVMKKDKDYMIKDGEILIVDEFTGRAMEGRRYSDGLHQAIEAKEGVRVERESKTLATITYQNYFRMYNKLSGMTGTAQTEENEFREIYGLDVIVIPTHEPIARIDNADVVYKSEKGKFKAIVDEIVERYKKGQPMLVGTVSIEKSEMLSSMLKKKGVPHQVLNAKYHEKEAEIISHAGEYGMVTIATNMAGRGTDIKLTKEAEEAGGLMIIGTERHESRRIDNQLRGRSGRQGDPGESRFFVSLEDDLMRIFGSERIQGIVDKLGLAEDEAIESKMVSSAIESAQKKVEGNNFDIRKTLLQYDDVINKQREIIYKQRSEVLEGEDLKDQIRDMIRDVVYTAVNSHISGVEEEFQTELQNLVNYLEDICLPKALVKVKDISNLSDEEIKEKLLEAVENIYIRKEKEIGEEQIREIERVILLRVVDTKWMDHIDDMDHLKQGIGLRAYRQQDPVQAYQFEGSEMFEEMIYNIKVDTVRYLFHVEVEKAPEREKVAKETSTNYDEDSVKKQPIKKENRIGRNDMCPCGSGKKYKNCCGRMA

SEQ ID NO: 52186 - protein, 151 aa, Clostridium botulinum
MHTVYVAFGSNIGEKESYIKRALEKIEERGMEIIKVSSIYETEPYGVLDQDSFLNGVVKIETNLTPEDLIGELLNIEKQLNRVRERRWGPRTIDLDIIFYDDLIINEKDLVIPHKDMENREFVLKPLCDIDENFIHPVLKKSVRELYDELK

SEQ ID NO: 52187 - protein, 1178 aa, Clostridium botulinum
MFELNNFDALQIGLASPEKIREWSRGEVKKPETINYRTLKPERDGLFCERIFGPMKDWECHCGKYKRIRYKGIVCDRCGVEVTKAKVRRERMGHIELAAPVSHIWYFKGIPSRMGLILDMSPRALEKVLYFASYVVLDPKETPLLKKQLLNEKEYRESIDKYGDDSFVAAMGAEAVKTLLDEIDLEQSSIELKEELKTSTGQKKIRIIRRLEVVESFRKSGNRPDWMVIDVIPVIPPDLRPMVQLDGGRFATSDLNDLYRRVINRNNRLKKLLDLGAPDIIVRNEKRMLQEAVDALIDNGRRGRPVTGPGNRPLKSLSDMLKGKQGRFRQNLLGKRVDYSGRSVIVVGPELKMYQCGLPKEMALELFKPFVMKKLVQNGLAHNIKSAKRMVERVQPQVWDVLEEVISDHPVLLNRAPTLHRLGIQAFQPVLVEGRAIKLHPLVCTAYNADFDGDQMAVHVPLSVEAQAEARFLMLAAHNILKPSDGKPVSVPTQDMVLGSYYLTMDKDGVKGEGKVFSCPEEVLMAYQCKAVDIHAKIKVRLKKVIDGETIEGIIETTPGKIIFNESIPQDLGYIDRTVPENKLKLEVDFLVSKKTLGGIINRCYMKHGATKTSIMLDKIKAKGYHYSTIGAITISTSDMVVPEAKRELLQNTEKQVEKIQKMYRRGFISEEERYEKVIDLWTKTTEDVANALMASLDSFNPIYMMADSGARGSKSQIKQLAGMRGLMANPSGKIIELPIKASFREGLDVLEYFISTHGARKGNADTALKTADSGYLTRRLVDVSQDVIVRQEDCGTEEGYEVSEIKEGNEVIEPLVERLSGRYPSEDIINPTTGEVIVKRNTYMNEDIAKKVSDAGIKKVKIRSVFTCKSKHGVCARCYGMNMATSQKIHIGEAVGIVAAQSIGEPGTQLTMRTFHTGGVAGADITQGLPRVEELFEARKPKGLAIVSEVSGTVKMEETKKKRTIIVVTDDGEEVSYDIPFGSRIKVKNGDIISAGDEITEGSINPHDILRIKGVDGVKNYLLSEVQKVYRLQGVDINDKHLEVVIRQMTRKIKIEDSGDTELLPGTMIDVFDFEEANREILEKGGEPAVGRIALLGITKAALATDSFLSAASFQETTRVLTDAAIKGKIDPLLGLKENVIIGKLIPAGTGMTRYRSIQINTDDENIEEDSMDSIEV

SEQ ID NO: 52188 - protein, 545 aa, Clostridium botulinum
MKLSKTLVHSLREDPADVEMDSQKLLLKGGLIAKVDSGLYAFTPLGYRFLEDIQKVVENNSKKIGGSQISIPYVNNLEEVSEKNNGFILNFNEETLSFINFLKSSVTSYKQLPLFFYENNTEFSYKGKNNLGIMGGRQILREYFYMVLDGENDKFNKKELIKLYKNIFEIMNLQYNMVEDELDGTIKFIIYNNIGDLHIVACKSCNYGNEVNRASSIPDYQIEKDLKELNKIETPDIKTIEELGEFFKVPYRKFTKTIIYKCNNDSIVAVMVRGDRDIDEFKVIKNLGNIKSLELAGEDIVRQATNAEVGFAGPINLKVDKILIDEEITKMNNFMIGANETGYHYENVNYERDFKGIVGEFRKIHKYSKCILCGDKLEVNEGFVIGEIKKIEENLIKNECATFIDNKGKSKPFTIYKGFMDIYKIISWTIEQNKDELGIVWPMETSAFKVIVTIANVKDEQQFKVGEKIYSSLVNIGIGTILDDRKERAGVKFKDADLWGIPIRITVGKNIKENNVEIKLRNSKEKKEIPIDQLQESIKSLLGIG

SEQ ID NO: 52189 - protein, 511 aa, Clostridium botulinum
MKKQSLIKGTFILGVAGIIAKFLGLFFRWPLQMLIGDEGIGYYQMSYPLYMFFIAAASGIPVAVSKLVSERNAVRDEGGIISVLKEAMIFMFIMGMGFTIILLLFSKDIIRFLKWDTRSYYSLIGISLAPLFISIMSVFRGFFQGMQNMNYTAISQLIEQLGRVIFGVGLAYILLPKGIEYSAGGAAIGAAAGGLLGGIYLFLKYLGVKKEFRVKKVKRNFKIMNTILYTAIPISIGSAVGTIMSLIDSALVPQKLLEAGFTYKQSTILYGQLTGKAFTLVNVPLTLSVSLCAALVPIIAEDYILNRKMAVLKKVELAIKISMVIAVPSCLGLNFMAKPILNLIFPGQEAGYEILKHLALSIPFIVLCQTSTAILQGIGRYIRPIINLCIGCILKIVITLILVPMNNINIYGAVIGTIAGYVISAILNMMSLKRSLNISINYYEIMIKPLIASTIMIIAVVFIYFYAYNYTISSKIACLIAVFLGMIIYFIIIGLIGILDYNYIKRKIIKR

SEQ ID NO: 52190 - protein, 292 aa, Clostridium botulinum
MKVQWSDVNLILKDLLIEGYGVLKKASIGSYQIDAQLLLGKVLKKDRLFILTNPDYHIKEEEKEKYFQLIDLRKNKMPIKYILGTTEFMGLNFNIKKGVLIPRPDTEILVETVLEEIKNKNYKQICDVCCGSGIIGITIGYTLNNTEIICYDIEDIPYNTTKENILKHNLQDRVKALKSDLLTEAIKEKRRFDLIVSNPPYIREDVIETLMDDVKKYEPFEALCGGKDGLFFYEGIIKQSLEVLNDGGTIAFEIGYDQKIQVSHILNEYGFKDVLCIKDLAGKDRVIKARKY

SEQ ID NO: 52191 - protein, 122 aa, Clostridium botulinum
  MISC_FEATURE (19)..(19): X=any amino acid
  MISC_FEATURE (106)..(106): X=any amino acid
MLSAFIQSQHSYPAVPLAXQLVHQRLVHPGPLVLRTAPLKFPTPATDRDRTVSRRSEPSSRAALMGEQPNPWDLLQPQDATSRHRGAKPPRRCGLLGEISLLSPRXLLSVERWPSHEVPPDH

SEQ ID NO: 52192 - protein, 486 aa, Clostridium botulinum
MSKVYLIGAGPGDEELITLKAIRALKKCTAVMYDRLANGELLKYLAPNCEIYYCGKEPGCHYKSQDEINKMLVKLAKEGHIVGRIKGGDPYVFGRGGEEALDILEENIEFEVIPGVTSPVSVLNYAGIPITHRGISRGFHIFTAMTKDKLDIDWKSVVNIGGTLVFLMGLGRLELITKGLIENGMDKEGKVAVVMKGTTSKQKKVIGNLENIVEKVKEAKLESPVIIVVGEVVSFSDKLNWYEKKPLFGRNICITRTKEQAKELKVQLLDLGAEVTEINSIEIKNTEDNLKSYLSKLKEYDYIALTSVNAVKIFFDYLIKENIDIRNINAKFAAIGPATSEAIRIRGIMPSIKSKHFVAESLFEEMRKHIQKGDKILVPRSKDARPFLVDALRKEGCTVDEVHIYGTLCGQCTYTERFEDADTVLFTSPSTVRNMISMVGIDSIKEKSIIAIGPITAAELDKNNIECSICDEYSINGIIDKLLDLN

SEQ ID NO: 52193 - protein, 471 aa, Clostridium botulinum
MGIVYLLTTISYGLTTTFIPIHTENLENGSKKESNKFVNNVLNTFSIGTIILTILMIIFAKYIIYIFAPGFQKDLIVFNTSIKITRIMLLSLIFISLQSVITGVLQSHKQFLEPAAMAMVSNIVYIIYLVFLASNYGMIGFAVAIVLGFFAQFIINIPKYKKMGYKYSTYINLEDNKTRQMFKLTMPVIISTSVIQLNSVINRAFATTIFGGAATILDNANKINTLAYEVFAIGIAMIVYPTLSELAAKNDKKQYKVELGRAINIILVIMVPAAVGIATLREPLINVIFKRGAFSENAASLTARALLLYTPAMIAYGVRDILNKAFYAIKDTKTPMINSFIGIIINVVINSLLIKYLGVSGLTLATSISAFVITIIMLLDLNKKLNGIDIKNIIISFLKVILSALIMGIIVAVINKFTLLSLGNETKGSAISILICMIIGGISYTLSIYLLKVKEIQDIVGPLLKILKLKK

SEQ ID NO: 52194 - protein, 1232 aa, Clostridium botulinum
MVHPVQVGKRTRMSFSRLKEVGQMPNLIEVQLDSYDWFLKEGLQEVFDDINPIQDYTGNLNLEFVGYKLDLDSIKYSVEECKERDSTYAAPLKVKVRLLNKETGEIKEQEVFMGDFPLMTEQGTFIINGAERVIVSQLVRSPGVYYDMTVDKTGSKLFSATVIPNRGAWLEYETDSNNIIYVRIDKTRKLPITILARALGYGTDAEIIEFFGEDERLKATIEKDNTKTREEALLEIYKRLRPGEPPTVDSAESLIESLFFDAKRYDLSRVGRYKFNKKLAIHLRITNQIADQDIVNPQTGEILVQKGEKIDKDKAIEIQNCGINEVYIKIDDKSFKVIGNHFVDIHSLVPFDISDLNIKEYVFYPVLKEILDNYADEESIKEEIRKNIYRLIPKHIIREDIYATINYELALSYDIGYKDDIDHLGNRRLRSVGELLQNQFRIGLSRMERVVKERMTIQDQEVITPQALINIRPVAASIKEFFGSSQLSQFMDQTNPLSELTHKRRLSALGPGGLSRERAGFEVRDVHHSHYGRMCPIETPEGPNIGLINSLATFAKVNEYGFIETPYRRIDPKNKRATNDIVYMTADEEDLYVIARSDEPIDENGYFIDDKVTVRAKEEVLVVPVSEVEYMDISPRQLVSVATAMIPFLENDDASRALMGSNMQRQAVPLLKPQAPIVGTGIEYKAATDSGVLPKAKNAGTVVYVSADEIRVRRDSDGGIDKYKLLKFKRSNQGTCINQRPIVSKGEVVAKETLLADGPSTDLGEIALGKNILMGFITWEGYNYEDAMLISEQLVKEDVFTSIHIEEYEAEARDTKLGPEEITRDIPNVGEEALKDIDERGIIRIGAEVRSGDILVGKVTPKGETELTAEERLLRAIFGEKAREVRDTSLRVPHGEAGIIVDVKIFTRENGDELPPGVNKLVRCYIAQKRKISVGDKMAGRHGNKGVISRVLPEEDMPFLPDGRPLQICLNPLGVPSRMNIGQVLEVHLGLAASKLGWHIATPVFDGAIESDIVDCLRKAGYSEDGKTVLYDGRTGEPFDNRVTVGYMYILKLAHLVDDKIHARSTGPYSLVTQQPLGGKAQFGGQRFGEMEVWALEAYGAAHTLQEILTVKSDDVVGRVKTYEAIVKGENIPEPGVPESFKVLIKELQALCLDVKVLNDDNQEIKLKESVDEDADELEVNIEGTENQPEEKEEKEKEDSDEYDDLREEDVEPDLEELSLDDLDLDDFGDEH

SEQ ID NO: 52195 - protein, 726 aa, Clostridium botulinum
MKRGHSVKNIFKIYNRDLQNIITNWVAIVVMLGLMILPSLYAWFNIKSSWDPYSNTKSISVAVVNKDKAAFFKGQSINVGEELVNKLKINKNIGWKFVDEKEAEKGVKYGKYYASIMIPEDFSYKILSITRDKQEKPTLIYSVNEKSNAVAPKITSKGVTTIQSEVTKTFVKTVNGIIFEMFNKLGIELEKGKPKLKDLMNMIFYVNDKIPEINASIDKLEKGAITLEEFIEKINKDIPLIKDTINSALSAGDKTKLFLSKSKEGINNVAPYIKQDLIIARKINSTAEVLIEEGVDLIGKNSSKARENLLSSKDKLTNVKEILNSILELIDIINKDKKNIIMNDFENNIKNMKERVNNKIENINTVISSIDRGEKVSVEALNRLNNKANGIDSILEKTIEDFNPKIVPAINNVLNDLIVVADNTIQLLKNANENLPGATELLDKGYTGAEKGIKGIKILKSNLPSIEKSIGEVSNKLKTLDDDERLNEIIKLMKSNAKIESDFISNPVEIKENRIYPIPNYGSAMAPFFTTLSLWVGALILVSILSVEVKDIKGAKKLKVHEKYFGRYFTFMTIAIFQALIVSLGDIYLLKVYVSNKSIFILFSIFISIIFSMIIYTLVSVFGNVGKALGVILLVLQISASGGTFPIEVTPGFFQRINPLLPFTYSVSGMREAVGGVIEGILLRDIIILLIYFTLSILLALLLKKKLEKANKNFVKKFKESGLVEE

SEQ ID NO: 52196 - protein, 365 aa, Clostridium botulinum
MNLKIENLTMKFKEVIAVKDLNLDIEEGTIVTLLGPSGCGKSTTLYTIAGLYKPTKGNIYFNDRIIDSLEPEKRNIGMVFQNYALYPHMTVYKNIEFPLKMKKIKSKEANEKVEDIAKLVKIEDLLERKPSQLSGGQQQRVAIARALVKEPEILLLDEPLSNLDARLRIEMREEIRRIQKELNITTIFVTHDQEEAMTMSDKIALLKKGELQQYDKPENLYIKPKNLFAAKFLGNPPINILEGKVDKNSNSLKIFEGKTILPLDDFIKDKNIENGTYKIAIRCEDFILGEKDVSAIKGTIEMIEIIGRDTIIRVKVGNDYIRCIIPYENLNKNEKTVYLNIKKYKVHFFSFQDEKNILIKGEESE

SEQ ID NO: 52197 - protein, 184 aa, Clostridium botulinum
MLSVFGLIFLEVKIINKNYLMNEQIREREVRLVGSEGEQLGVVSSSEAQKLADEKELDLVLIAPTAKPPVCKIMNYGKFLYEQTKKDKEAKKNQKVINIKEVRLSPTIEAHDIEIKANNARKFLNAGNKVKVTVRFRGREADYSFKGNKILKSFYEKVEELSVMEKAPKLEGRNMIMILAPRKA

SEQ ID NO: 52198 - protein, 97 aa, Clostridium botulinum
MNIMRKYETVFILNPTLDEEGYKANVEKFKGVIENAGGTVDNVDLWGKRKLAYEVKKVSEGYYTLMNFTADTELPKELDRVFRITDTVIRHMIITQE

SEQ ID NO: 52199 - protein, 463 aa, Clostridium botulinum
MAFKKTMDKVVALSKNRGFVFPGSDIYGGLANSWDYGPLGVELKNNVKKAWWKKFVQESPYNVGIDAAILMNSQVWAASGHVGGFSDPLMDCKECKARFRADKLVEEHMTEQGVEKASADGWSNEKLKQYIDDNGIECPKCKAKNFTDIRQFNLMFKTFQGVTEDAKSEIYLRPETAQGIFVNFKNVQRTSRKKVPFGIAQIGKSFRNEITPGNFTFRTREFEQMELEFFCKPGTDLEWFNYWKDYCWNFLINLGINKENIRFRDHSQEELSHYSNATSDIEFLFPFGWGELWGVADRTDFDLKKHMEHSGEDLNYLDPATKERYVPYCIEPSLGADRVVLAFLVDAYDEEELEGGDVRNVLHLHPALAPFKAAVLPLSKKLSDKSQEVYSMLSKKFNIDYDEAGSIGKRYRREDEIGTPYCITVDFDTLEDNTVTIRDRDTMNQIRVNINELEKFIEDKLEF

SEQ ID NO: 52200 - protein, 370 aa, Clostridium botulinum
MKKTKTKLGAIDFTLFVTITLLVSIGVIMVYSASSYSAFFNPNIKDSTYFLKKQGAFAIVGIVSMLFIIKIDYHKYKKHTKKLMLITIVLLLMVFIFQPVNGARRWIRLGPLSLQPSEITKYMIVMYMAKSLEYKGEKIKTFTYGIIPYLLVSGFYAGLVFAEKNLSIAAVIMIVTLIILYVAGAKTKHISLVMLMVLLAGVAGIIFEPFRVARFLSFLDPWKDPKNTGYQLIQSLLALGSGGIWGVGIGRSRQKCYYIPEPHNDFIFAIIGEELGLIGCILIIILFSIFIWRGIVIATKAKDTYGTILATGITSIVAVQAIINMAVVTGSMPVTGVPLPFISYGGSSLAINLMAMGILLNISRQTENTI

SEQ ID NO: 52201 - protein, 621 aa, Clostridium botulinum
MNMKKYKTYLYNYWDIILFFILILTKLLTYGNKLQLNNFKYSRILYPSIASILLIIALSFIFKRKGRFIFLILFNILISITIIGDLNYFRYFKDLFSLPVLINSFQLGSVGSSVLELFNLWDLVYILDILILIPFFFVLRKKVVFCENNYKFHYKLIIIPLIIAIPIEFISFYKLSQEQPRLISTMYNKVYIAEKLGVLNYHYIDFYSSSTNFIKRKVPVSANKKEAIQNVLAQKDTSYNSSKYKGIYENKNVILIQVEALQNFVINKEINNKEITPNLNKFLKKSLYFNNYFYQIASGSTSDAEFITNNSLYPASSGAAYFLYAGNHFNSLPSKLKEKGYNTSVFHGYKETFWNRNLMYKNMNIDKFYSEKDYKIDEKIGLGLSDKCFLNETVEKIKKLKEPSFSFIITLTSHFPYDATDKYGEFDVGEYEGTLLGNYMKSIHYADEQLGVFLNKLEKENILDNSIIAIYGDHYAIPRENEKDLSNFLGKDIDELNWIELQKVPLIIHTPDEKLKGVENGYCGQIDLYPTLANLLNIKNNIMFGRDLLNSKDESVIFRNGSFTDGKIFYISPVNSYYDIKTHNKISETEELKAKKNNVVSELNSSDNILKHDLLKNNKLN

SEQ ID NO: 52202 - protein, 726 aa, Clostridium botulinum
MSNSKYRDKVIIRKRMMFIFALLILAFIGLVIKMGTIMIGQSPELKKKAVDQWTSEVKIDAKRGRILDRNGNELAVSANVYRVDLDMNTLRSTMEEKKLSKNDVASKLSKALDMEQKEVEKVLNKKLPSGLPLASATLKRRIEKDKADKVRDLDLRGILVSADTKRYYPNNNFLSHVLGHTNSDGKGLTGVELYYNNILSGKPGVRIAETDNKSKELPYTISEYTKPEDGKDLVLTIDEMIQHFSEKTAEQALKDNKAKAVSVVVMDPRTGEVLAMANKPDYNPNDPWQEGKSYEELQQNWRNRSVNDTFEPGSVFKVFTAATALEENLITSEDKFTCGGSITIGKRTIRCWKSGGHGTQNFIEILKNSCNVGFAQLGHKIGKEKLNSYIQKFGFGKKTGIDLPGEAPGITKKTENISDIDLATISFGQANTLSIVQYLQAFNAVANGGNLIKPHVMKEVGHFDEEKNKEIIEKKNTIESKQILNSQKMATLRSYLEKVVSEGGGKKAYIAGYHIGGKTGTAQKAGKGGYMPGKYVASFAGMAPADNPRITVFVSIDEPDPSNYYAGQIAAPAAQGLFKDIFNYLALKSDAQGEDIAKSLLKDITIPEVRGKSKEEAQKILKDLKLDCEIQSEGEYIVDMNPKPGYTVKEGSKIVLYTGNSQNYNKVVVVPNVKGYTVEQAMSVLNSIGLRGDIQGDGIISHQSIEANKEVKKGTMVNLKAEPIGD

SEQ ID NO: 52203 - protein, 309 aa, Clostridium botulinum
MKKIYKNITELIGNTPLLELEKLKKENKLKANIIAKVEYFNPANSVKDRIAFSMIEEAEKEGLIDKDTVIIEPTSGNTGVGLAFVAAAKGYKLILTMPETMSMERRLILKAYGAELVLTPGKDGMKGAIEKATELSKEYKNSFVPQQFENKFNPAMHKRTTAVEIWNDTDGEVDIFIAGVGTGGTITGVGEYLKEKNKDIKIIAVEPEDSPVLSGGNPGPHKIQGIGAGFVPSTLNTEVLDEIFKVSNEKAFEVTKSIAKTEGLLVGISSGAAIYAAMKIAERQENQGKNIVVLLPDTGQRYLSTGVFE

SEQ ID NO: 52204 - protein, 235 aa, Clostridium botulinum
MEEKMERGRLIVIEGSDGSGKATQTKKLYDKLVRENKKVKKVEFPNYKSESSALIKMYLSGEFGRNPDSVNPYASSTFYAVDRFASYKKDWEEFYLKGGIIIADRYTTSNMIHQAAKIKDVQAKDNFLNWLWDFEFRKFNLPVPDCVIFLDMPPKFSKILMKTRNNKFTGEKEKDIHENNYEYLLESYNNSKYISEKYDWNRIECTNKDKIKSIDQINDDIIKIITQYIDFSEQR

SEQ ID NO: 52205 - protein, 229 aa, Clostridium botulinum
KYIIIAVVIIIICVILGLYIVDKKAKEKLSEASKEARRLKEEAERDAEAKKKEAILEAKEEAHKLRAEVERENRERRNEVQRLERRIIQKEEALDKKSEALENKEEALNKKQQKIEDVETHMEELHEKQRTELERISGLTTEQAKEFLLEQVRKEVKHETAVMIKEIETKAKEEADKRAREVITYAIQRCAADHVAETTVHVVNLPNDEMKGRIIGREGRNIRTLETLT

SEQ ID NO: 52206 - protein, 576 aa, Clostridium botulinum
MALDGIFLFSMINEMKTKILNGRVDKVTQPEKDEIVLSIKNNRKTYKLLISSSAVYPKIHFTDIPKKNPMQPPMFCMVLRKYLNSSKIINIRQLDTDRIVLIDFESADEMGFNSIYTLIIEIMGRHSNITLVRERDNLIMDSIKHVTPEINSVRNLYPSIEYIYPPASLKLNPFNFSLKDFKDYIKDNNVKLNKTMFSNIFTGVAMPFSKEILYRLEKENNLEITLENMDEIYVVTKNIFDSIKNKEFCFNCYLEKDTVKDFYCVNLHSLYNFKNIDYENPSLLIESFYFEKDKSDRLNSKSSDLQKLINVNIERCEKKIKILEGNLKDCNEREKFQICGEILTANIYALKKGMDKVNLLNYYTNEYMDIKLDPNKNPSDNIQKYFKKYNKLKKTEVAAKEQIELTCDELKYLNSVLTSIKNADSYDDIEEIKRELIETGYIKFKKKNNKKFKNTKPLHFISSDGIDIYVGKNNIQNDYLTLKFASNHDIWMHTKNIPGSHIIVKNFQGNVPEKTLEEAATLAAFYSKSKDSTKVPVDYTEVKNVHKPNGAKPGMVIYYTNKTIFIDPKEPNLKQI

SEQ ID NO: 52207 - protein, 601 aa, Clostridium botulinum
MKKFSSATAWIVVLILVIFSSLMLVRTGTNSTAINFSEFQKSWIQNEIKSFQVKDDKMTVVGTLKDGKQYETIVPSERLFQFINEHPKNGEVKEVYVKPASVPIWVQYLPMILIVLMLLGFWFMFMQQAQGGGGNRNVMNFGKSKAKMATPDKKKVTFDDVAGADEEKEELAEIVDFLKSPKRYIDMGARIPKGVLLVGPPGTGKTLLAKAIAGEAGVPFFSISGSDFVEMFVGVGASRVRDLFEQAKKNSPCIIFIDEIDAVGRQRGAGLGGGHDEREQTLNQLLVEMDGFGANEGIIMIAATNRPDILDPALLRPGRFDRQIVVGAPDVKGREAILKVHSKNKHLAEEISLGILAKRTPGFTGADLENLMNESALLAVRKRKELIDMEDLEEAVTRVIAGPEKKSRVIDEEDRKLTAYHEAGHAVVMKLLPHADPVHQISIVPRGMAGGYTMHLPEKDSSYMSKSKLEDEIVGLLGGRVAEKLIIGDISTGAKNDIDRATTIARKMVMDYGMSNTLGPIAFGSGHDEVFLGRDLGKGRNFSEDVAYKIDQEIKKLIDTGYNEAERLLNENISKLHAVAQELLKKEKLEADEFEEIFKNS

SEQ ID NO: 52208 - protein, 291 aa, Clostridium botulinum
MRIVIFRINGGYILMECFNKFFIENEKIKEINLFDENFLKEGKSLYEVIRIIDGAPLFLKSHLNRFYNSAKLEELNLWLDEEVIKEKINRLIKINKVSIGNIKLVFNFNKEKNNKFLCYFLKHNYPEDIEYKNGVRTILYHGERENPNAKVINMDFRKAVGEKIKEEKAYEAILVDKNGYITEGSKSNIFMIKDSKVITSPVEKVLPGITRQNIIDVCKNLNLDIDEEKVHYKDIEKLEGLFISGTSPKVLPIKSVDEMEFKSSENKLILSIMEGYNKAIEKDIKSYKSKE

SEQ ID NO: 52209 - protein, 266 aa, Clostridium botulinum
MEKLLIDKKNGENIRVKVGDIVIGGEEKIIISGPCAVEDEKTVVAIAENLKKLGVHMLRGGAFKPRTSPYSFQGLKFEGLKILKECGKKFNMPIVSEVMDARDLKEAYDYIDMIQIGSRNMYNYTLLREVGKTKKPILLKRGMSATLNEWIYAAEYIMSEGNMNVVLCERGIRTFESYTRNTLDLNTVAVIKDKYRVPIIVDPSHATGFREYVKPMSLASIAGGADGLIIESHINPDNAISDARQTINVKEMKEIIDKVKQMDKIL

SEQ ID NO: 52210 - protein, 408 aa, Clostridium botulinum
MDLFNVVSIKEAKSLIEKNFNVKPIKEEVELLSSMDRVIYEDIVSHINVPNFRRSTVDGYAVNSKDVAGASESMPAMMNYRGEVFMGKIPEVNIDFPGDCVYVPTGGMIPEGSDSVIMVEYTERVHEDTVLINKATAYGEKVVEIGEDIAKEEVIIKKGERLRPYEIGVLSSLGITKVPVCRNPKVAIISTGDEIVDPNKEPNLGEVRDINSYLLQASIIEDGGIPINYGIIRDDFNLLKNTVEKAIEDTDIVLISGGSSVGKKDVTIDVINSLGDPGVFVHGIAIKPGKPTIIGNVKDKIVFGLPGHPLSAAVVYKVIVKYYIDKIAGVKEKVFPIVCKFNINYHSAKGREEYLPVTLNWQENEIIASPIFSKSGLISGFSKAYGFIKMDKNLEGIKKNEKVFVYRF

SEQ ID NO: 52211 - protein, 88 aa, Clostridium botulinum
MANIKSAKKRIKVIETKTLRNKMLKSSLKTTIKNFLTVVEGKNVEEAKAAYKTAARALDMSVSKGIVHKNKAARTKSRLAAKLNALNA

SEQ ID NO: 52212 - protein, 664 aa, Clostridium botulinum
MGGTTKIHSSHVLGRVFLFVNFYLKEDNFMIKITLKDGKVMEFEEGIKISDIAMKISPALYKKALAAKIDGETVDLMTELHKDSSLEILTFEDEMGKWALRHTGSHMLAQAVKRLYPEVKLAIGPAIDTGFYYDFEADFTFTPEMLEKIEAEIKKIIKENHKLERFELPREEAIKLMKEKNEDYKVELIEDLPEGEVISFYKQGDFTDLCAGPHVPSTGKVKSVKLLSLAGAYWRGDENNKMLQRIYGTAFTKKSELDEYLNMIEEAKKRDHRKLGKELDLFSIHEEGPGFPFFHPKGMIVRNILESFWREEHTKAGYQEIRTPLILNEALWHQSGHWDHYKENMYFTNIDDDDYAIKPMNCPGGILVYKNSMHSYRDLPLRLSELGIVHRHELSGALHGLMRVRCFTQDDAHLYMTKEQIKEEVVGIIKLIDKFYKLFGFEYFVELSTRPEDSMGSDEDWEIATNGLREALDSIGKEYRVNEGDGAFYGPKIDFHLKDCIGRTWQCGTIQLDFQMPERFDLSYIGADGEKHRPVMVHRTIYGSVERFIGILIEQYAGAFPTWLAPVQVKLMNITDSQYDYLKKVEEALKENNIRVEIDTRNEKIGYKIREAQLQKVPYMLILGDKEVEAGKVAVRSRKDGDLGAISLEEFIEKIKNEIKNKTN

SEQ ID NO: 52213 - protein, 105 aa, Clostridium botulinum
MSKIHVRKKDTVVVISGKDKSKIGEVLSVLPKKGKVIVKDVNVVTKHQKPNRENMQGGIIHKEAPIFSSKVMLYCDKCKSATRISNKILEDGTKVRVCKKCGETF

SEQ ID NO: 52214 - protein, 223 aa, Clostridium botulinum
MEIEDNINSIKKSLPKDVTLIGVSKTKPVEYIEEAYEAGLRDFGENKVQELIDKIEYFKEKKDIRWHLIGHLQRNKVKYIVGKVYLIHSLDSIRLLEEIEDKYKKQNKIANVLIQINIGKEESKYGIYKEELGNMIDAIEKCENVKAKGLMTIIPKGSDEECAKYFRQMKEIFSALQNKSFKNIEVNYLSMGMTGDYPIAIKEGSNMIRVGQGIFGKRNYDIK

SEQ ID NO: 52215 - protein, 874 aa, Clostridium botulinum
MKPEISVIMPVYNCKQYIFESIKSICNQTFENWELIIINDNSIENIEEEIKKIQDDRIHYHAFVEHEGLFNSLEYGLQQAQGDFITFHDPDDISSPTRFNEQLNYLKSNDDLGMVSCLIRCFTNDTSYRNACTFIEKIQNAYISKEQIENAIINKFSPVIFPTIMMRRSLLDGIEFHKEENELEDYFQIFLYLLKQGRLEKVNSVLYYYRRHKNSYHIQNEKNYSETVQAQLSKSGIQNFIKYRELYKDLKKEQYIVSRSKKDSPLRILMLIDALNIGGTEMYVLELAKSLEKLGAHVVIGTSGGPLVEVFKHYGLKVVKIPFTSDYISNKNIMKLIKLTKKIIDEEKINLLHCHLFASMRLGNDIYRSYKIPYIVTLHGLFYPNDVLFESCINATKIIAVSKPIKKLIESKLGSRIRGEIMVLPNGIDMENFHPQHTVKDFKTQLGIPENSQIITYCSRLDWGKTFAAEAFIFACFTLMAKNKHLHAFVIGDGADKNLITHEVNILNKMLKRDAIHVVGAKFDVLPYYQNADIVVGTARVALEAMSCGKPVIAVGNHGYTGIINPRCMNEQWNMYFGDHDSIKKADPLALEKDLNGLLQDTEACKSLGKWGRRWCEEKFDNRLVAKDIFNLYQEVLSEKEVKNTDKENMPNKIETDIQTKESPLLEKTSSIIIRIPDGIEFTPEISEVVFGSNNALARYCTHCTHCRFDITVPFTIILKDKKDSCKTLTVPDLLNIELNSSNYNNCIDKQDCESGALINLINKCGMRIENEIKNNPIIDENNQNIIFEITTKLYANFCDPDIFDLEAGIYGSSSPIIGEDNLLIKGTGKNEFKKNIADEDSTNMHHEPFYCYEDDKSDYDANSLMRGYPYKRT

SEQ ID NO: 52216 - protein, 212 aa, Clostridium botulinum
MKLSKYIDHTLLKPQATEKDILKLIEEAKTYDFASVCVNPSWVKLAYENLKDTDVKVCTVVGFPLGATSTASKVYETKVAIKDGADEIDMVISVGQLKSGNDEYVKEEIKKIVEASKNKLVKVIIETCLLTEEEKVKACTLSKEAGADYVKTSTGFSTGGAKPEDIKLMRETVGKDMGVKASGGIHTREEMEVMIENGATRIGASCGVELVK

SEQ ID NO: 52217 - protein, 346 aa, Clostridium botulinum
MFTMEDILKLQQKIVPEMLKLLEKRYNILRTIYYKQPIGRRVLANDLEIGERIVRTEINFLKSQSLIDINSSGMTVTKEGEEIIDRLKSFIHEVKGLKEIESILKNKLEIFEVIIVPGNLDEDITVKNELGKAAANYLKNIVQDKDIIALTGGSTVKEVVDNMPKINTLKDAVVVPARGGIGRDVELQANTLVANLASKINANYKLMHVQDNLSEAALKAVMEEKSIKEVLDMIHKVNILIHGIGIAEVMATRRGIPSEEIAYIEEKKAVAEAFGYYFDMKGNIVHSSPTIGIKRESIRNANKLIAVSGGKKKAKAILAAEVRNKNSVLITDEGAAREIINILENE

SEQ ID NO: 52218 - protein, 631 aa, Clostridium botulinum
MEKINSYKELKSYYENYKDLLKSRHTTHEEETAVENKKCERLILVCGGTGCKSADSDKIVENLKEEINKLGLQEEVKVSITGCFGFCEKGPIVKINPDNVFYVKVTPEDAKEIAEKHLLKDEVVERLLYEEPTLKEKVKRQDEMSFYKKQKRIALRNCGLINPEDIKECIGLEGYLALGKVLSEMTPDELIKLITDSGLRGRGGGGFSTGKKWSFGKMYDSDVKYIICNADEGDPGAFMDRSILEGDPHSIIEAMAIAGYAIGASEGRIYIRAEYPLAVNRLKIAMDQAKECGLLGENILGTGFNFNIEIKYGAGAFVCGEETALIHSIEGERGEPTYKPPFPAEAGLWNKPTVVNNVETLANIPAIINRGADWYKSIGTEKSNGTKVFALAGKINNVGLVEVPMGTTLREIIYDIGGGIKNGKKFKAVQTGGPSGGCIPASLLDIPIDYESLTSIGSMMGSGGMIVMDEDNCMVDIAKFYLEFTVDESCGKCTPCRIGNKRLLETLIKITNGKGSEEDLNKLDELSHIIKDTSLCGLGQTAPNPVLSTMRYFMDEYKAHVDEKRCPSGTCKNLLHYEITDKCIGCTKCARGCPVSCIIGKVKEKHFINQEKCIKCGNCYSACPVGAIIKK

SEQ ID NO: 52219 - protein, 80 aa, Clostridium botulinum
MAGREGGRRQRRTKRKVCTFCAEKSEAIDYKDINKLRKFVTERGKILPRRISGNCAKHQRELTRAIKRARNIALLPFTTE

SEQ ID NO: 52220 - protein, 375 aa, Clostridium botulinum
MGVKHMKDLKVTPLRGVYEEYGGKIVDFAGYELPTQFKGFLHEHHTVREKAGLFDVSHMGEAMVTGKDAGKFIQYLMTNDINVLKDNEVLYTFMCNEDGGVIDDLLVYKFAEDEFFLVINASNKDKDVKWIMDHKGDFDVEIVDVSDSIAQLAFQGPLAEEILQKIVDVDLQEIKFFKLKRDVLVNGKKCLVSRTGYTGEDGFEIYCKPEDAKGLWHAILNAGKEEGAQPIGLGARDTLRFEASLLLYGNEMDETITPLEVGMGFFAKLKIEEDFIGKDALIKQKAEGVTRKLVGFELLDKGIPRHGYEVIKDGKVIGHVTTGYKSPTLNKAIGLALVEEQYSKIGTEFNIKVRKKELKAVAIDKRFYTKKTKTK

SEQ ID NO: 52221 - protein, 447 aa, Clostridium botulinum
MKNTKDTNLIVGIDEKISLRYAFFLGLQHVFAMDLYIVPIILAGILSLDAQNTAYFIQMSFIAAGIATLIQTGLCMRLPIMQGPSYIPIGALAAIGSKLGLQAMVGSLIPGSLFLMILGYPLRFLSKIISKFIPHIVGGTVIVIVGISLMPVAMTNIFTAPGNLKINCILALISSALLVGCMMIGRKSNKFGKAVRLTSVMISLIGGTIAASLLGVVDFTPVTKAAWFSFPKLLPFGKPVFDLKAILTMLFIYAVILVETSGTWFAVSAVTGSELTDEGLNRGAVGEGIGCFVGALFGGTPMTGYSTNAGIIAVTGVGSRMAIIAGGIILVALGMLPKLMNVIACIPSAVVSGVFAVVCVIIAMNGFKSIQHEEFDERNMLLIGLPILLALGTTVLPKDILNSLPSLANYIFSSGITVGALAAVILNILLPKAPVEVSKSQEYEEAV

SEQ ID NO: 52222 - protein, 424 aa, Clostridium botulinum
MGNDIKKKKKTRKRKKSRGLKIIIIFFSFIILLGVLGYFYLLGFNHNSKLGDGKINTKKAEAGEPVNILVMGVDIGDPNSKDASDPKRTDTMLVVNYNPKTKKINMVSVPRDTRVTMNGKKIKINSAHAINGVNGSIEAVENLLGIEINNYAKIDYEGFRKVIDAIGGVEMDITRNMNYDDPSQNLHIHFKKGATVHLDGKKAEEFFRWRKNNDGTGFADGDLGRIENQHKFISKVVEKVKSPSIIPKIPNILSTIPDYVETDMSPEEIIKYGYAVTKGDKSGINMVTLQGEAKYIGNISYFIYDREKNRDIVQTLKTGVTSQRDDSTEIDKSEIKIKVLNGTKVNGLAADCERKLKEMGYSNIVTGNGERRELTKVRLKKDSFISTREIENYLNIPNIEKNIQSDENFDIIILLGKDFANNRN

SEQ ID NO: 52223 - protein, 238 aa, Clostridium botulinum
MERLDKILANLGYGTRKEVKALIKKGQVDVDGEVVKDNGMQIDPEKNKIFVFGKELVYKKYIYLMMNKPQGVVSATFDNYDETVIDLLEDEDRIFEPFPVGRLDKNTVGLLLLTNDGELNHRLISPKWHVDKIYYAKINKKVTDEDIKKFKKGIILDDGYECFPAKLEIIKSFNEESEVRVTIHEGKFHQVKRMFESVDKKVIYLKREEFGPLKLDESLEEGQYRELTDEEISILKNL

SEQ ID NO: 52224 - protein, 392 aa, Clostridium botulinum
MNMGRDNLNNIEDNGLNAEPYGEINFKKSRKRRRMKNILFIMIIIIVSALCGGVTASYMIDKKLEKNPYTPTNQSLFEQKSEKNEKENKNEQLPKNSITKVAESVGPAVVGISNKTEGYFGIEDRGSGSGIIFDPNGYIVTNNHVIEGAQKITVKLSTGKVLDASLVGRDVRSDLAVIKVNAKNLPVAKFGDSSKVKVGDVAIAIGNPLGEEFAGTVTAGIVSAVNRKIHYAGALYKLIQTDAAINPGNSGGALCNDAGEIIGINSLKEKAEGIGFAISINEAKDIIKSLMDYGKVSRPYLGVSGETISSEQTRVSGVYVTEVVQGSGAAAAGIKPTDIIVELDGKKVTKWDDLGEIVGSHKIGDTVKVKILRNDKYKEVNIKLSEMKESNR

SEQ ID NO: 52225 - protein, 416 aa, Clostridium botulinum
MRPLADLMRPKKLEDFVGQKHILSENKPLYNLMKNKSICNSIFYGPPGTGKTTLANIMANYVDKKFYRLNATTASIKDIQEITSSINSLLNYSGVVLYIDELQHFTKKQQQALLEFIEDGRVILIASTTENPYFVIHKAILSRCNIFQFKPLNREDIILGLEKAINKLIDKGINIKYTFESLEYISEICQGDYRKAYNILELAVNSHCGFNIEINLDYIESLAQSNIRADATGDEYYNILSAFQKSIRGSDADAAVHYLARLIKSGDMISITRRLSVMAAEDIGLAYPNALTIVNSGIELALKVGFPEAQIILSEITIYLATLPKSNSAYIAIKNATKDLENINFGDVPDHLKDSHYYGAKNLGIGGYKYPHDFNNHYVSQEYLPKELKDKVYYIAQHNKYEENLKKYWENIKKFK

SEQ ID NO: 52226 - protein, 344 aa, Clostridium botulinum
MDTKLYIIGAITAIVLSVILTPIVKKAAFILGVVDIPKDKRKIHKKPIPLLGGIAIYISFVVALILKKGPLTLEEIGIILGSTVIVIGGFIDDKYDMSPIKKILFQLAAAICLIICGLKIQFITNPFDHLNLYVGLHIFAIPITIVWVIGITNALNLIDGLDGLAAGVALISCITMFVIAVLNQRWEAAILTSILGGSILGFLPYNFNPASIFMGDTGSQLLGFLLAAISIEGAIKSATAFAIVVPILALGLPIYDTLFAMIRRKINGKPIMQADRGHLHHRLLDMGLTQRQAVIIMYLISAVLGSFAIIAMQISNQKSYFLLTAIMLALILIAWKCGFFSHKE

SEQ ID NO: 52227 - protein, 89 aa, Clostridium botulinum
MENQKKDAKKDIQTRLRRIEGQVKGIEKMVENECCCRDVLIQIAAIRAAMNKVGGLVLENYAKQCFLGEDKEKDEAIEDLVSTFTMFMK

SEQ ID NO: 52228 - protein, 866 aa, Clostridium botulinum
MNIEKLTLKVQQAINDSQLVAVKYNHQQIDTIHLFSALISQDDGLIPNILGKMGVNIRDINAETNRVLDNMPKVLGEGAQSSSVYPTRRFEEVFVRAEQIAKDFKDSYISVEHVLLAIMDVDRNTVLPILEKFGVKKSEFLKALSAVRGSQRVDNQDPEGTYEALVKYGRNLVEEAKKHKLDPVIGRDEEIRRVVRILSRRTKNNPVLIGEPGVGKTAIVEGLAERIVRGDVQESLKNKIIFSLDMGALIAGAKYRGEFEERLKAVLKEVQNSEGRIILFIDEIHTIVGAGKTEGSMDAGNLIKPMLARGELHCIGATTFDEYRQYIEKDKALERRFQPVITDEPTIEDTVSILRGLKERFEIYHGIRIHDSAIVAAAKLSSRYITDRYLPDKAIDLIDEACAMIRTDIDSMPTEMDSMKRKIFQLEIEKEALSKEKDVASKERLEVLEKELSELKEKDKEMTAKYENEKSHITKIRDLKEKLDDVRGQMEKAEREYDLNKVAELKYGLIPALQREIEEKEKLIKENSNGNAMLKEEVTEQEISEIISKWTGIPVTRLVETERQKLLQLGDQLETRVIGQGEAVKAVTNAVIRARAGLKDPRKPIGSFIFLGPTGVGKTELAKTLARTLFDTEENIIRIDMSEYMEKYSVSRLIGAPPGYVGYEEGGQLTEAVRRKPYSVILFDEIEKAHDDVFNIFLQILDDGRLTDNKGKVIDFKNTIIIMTSNLGSNYLLDNESKEGIDESIRTRVKEALKARFKPEFLNRVDDIIMFKPLTVEDIKRIIDIFLDDIRKRLKDKNIQLKITDSAKDIMAKEGYDPIYGARPLKRYIEDTIETEIAKQIIVGNIYEGTTVGVDLKGESIVIERI

SEQ ID NO: 52229 - protein, 364 aa, Clostridium botulinum
MKICYLADANSTHTKKWCRFFKNKGYDIDVISLNDGDIDGVTVHSFNKDLDKIRKGSSFNKISYIRYFSDIKKIIEKIKPDVVHAHYATSYGLLGALSGFHPYIISVWGSDVYDFPKGSYIKRKMVEYNLSKADIIMSTSKVMAEETNQYTTKNIEITPFGVNIDTFKPCADKYEKKENLVIGTVKTLEPKYGIEYLVRAFAKVKQKHNNIKLEIAGVGDQKDFLLNLCNELNIKDHVKFLGFINQEKVIEAFNRFDVAVFPSTLDSESFGVAAVEAQACGTPVIVSNVGGLPEATAPNNSSILVNKKSVDELAEAIEKLIKDDNLRINMGKTGRKFVEDNFNIEDNFNNVDIIYKSIIDGGDN

SEQ ID NO: 52230 - protein, 154 aa, Clostridium botulinum
MRNIKIFFVFAIVFLLFGCSSNINELKESKNMGVKSDNERLLYFQHKYKDKEVLKCAEKDLNNDNKLDLIVIYKENNDKNSMVVVLSDKEKYKITNEVSAPIENQKIEFKDIDKKPPIEFVVSGSKNGSFGYAIYRIEKGKIINLFGEDMKDCC

SEQ ID NO: 52231 - protein, 569 aa, Clostridium botulinum
MKKKLTLSILIILIFTLTIVSSLFLITINNQYIESSKNRLKNNNSFILKVIRNEDPKNIVNFIKNNYRDNDIRVTLLDHKGNVLVDSKENRVELENHNKREEIVNAKKNGEAYSVRYSNTRKVESLYFASKVNNDYIIRSAIDMKDIKLLEKKYSKYYISIILFSFVLSFLFSSRISMAMIKPIKNLEFVTSRIARGDFDRRVIINSEDEIGRLGRTFNAMADILENSLVEVRDKQNRLEAILKSMDSGVVAIDKEFKVIMINPYANKLFGIKRDIIGENLMDNIRDFELEKVLRDKEPGYKEIGILWPEKRTLRVKTTDIISKYDNIGTVAVVQDITDIKKLENMREQFVANVSHELKTPLTSIKGFSETLKYVDDKKNREKFLQIINDEADRLTRLINDILVLSNIEKQKQELIKEKIDLNELIEKVYCLVKKSAEDKNIKINIVGEKVPLLIGNKDKYNQMIINLVDNAIKYTEPNGYVSIGTRQDKGNIVFWVEDTGVGISEEHLDRIFERFYRVDKARSRVEGGTGLGLAIVKHIVLSINGKIEVKSEPKKGTKFIVKIPLSII

SEQ ID NO: 52232 - protein, 185 aa, Clostridium botulinum
MFIDDYPYLENNQNDENMNMRPMPYMAWGGSPMYNPYMPNVDCSMDNINYDNMDRCNNNITNENEDYIYIDNRLPMTSDPPQTTPTPTPTPTPTPAPAPTPTPAPAPTTQFLPSVQDDILYNQGYLKTQIGKRVKIEFLIGTNMLIDREGTLVGVGISYVLINEVDTNDLIMADMYSIKFVRIFD

SEQ ID NO: 52233 - protein, 308 aa, Clostridium botulinum
MKKSIFSHMVGIKYPIIQGGMAWIADSSLAAAVSNAGGLGIITGNAPVEWVRQEIRKTKELTDKPFGVNIMLLAETADEIAQMVCDEGVKVVTTGAGNPGKYIKKWKEHGIIVIPVVPSVALAKRMEKSGADAIIAEGCESGGHVGELTTMTLIPQVVDAVDIPVIAAGGIGDGRGIAASFMLGADAVQVGTRFLVAKECTVHQNYKNKVMKAKDIDTQVTGRPTGHPVRIIRNRLSRKFQILEKEGAPLEEFEKLGRGALSKAVIEGDIDNGSVMAGQIAGLINKEQTCSEIINEIFDEAYTLLDYK

SEQ ID NO: 52234 - protein, 407 aa, Clostridium botulinum
MSNVYDILKERGYIKQLTHEEEIRELLGKEKISFYIGFDPTADSLHVGHFLQMMVMAHMQKAGHRPIALVGGGTGMIGDPTGKTDMRKMMTKEQIEHNCNCFKKQLAKIIDFSEDKAIMVNNADWLLNLNYIEFLREIGVHFSVNKMLTAECFKSRLEKGLSFLEFNYMLMQGYDFLELNRKYNCVMELGGDDQWSNILAGVDLIRRKESKSAYGMTFTLLTNSEGKKMGKTESGALWLDPEKTSPYEFYQYWRNVADADVEKCLRLITFLPMDEVRRLSSLEGAEINEAKKVLAFEVTKLIHGEEEAQKAKIAAEALFGGNAKDLGNMPTAYIDKNDLNNLLVDLLVKCEILPSKSEARRLIKQGGLYLNDEKVTDMNLVVTEEHVTEDGIMIRRGKKNFNRIVVE

SEQ ID NO: 52235 - protein, 191 aa, Clostridium botulinum
MYKTSKKVLCSSVHEILLGGIKMFKKIKSLLSNDKSDVQQENLNEVFVSPISGEIISLDDVPDEVFSQRMMGDGFAIQPENGDVFSPVDGTITAVFPTKHAISIKSESGVEILIHFGLDTVNLNGEGFQVYVEEGNQVKAGDMLLKVNIEEIKDKVPSLIVPIIFMDLNGKNFSYNTGKVTAKEPNIITLK

SEQ ID NO: 52236 - protein, 143 aa, Clostridium botulinum
MNRRKSREVAMRLLFQTTLNGENLEEALENLKDVRESEEITKEKDYESVDLKDVDIDYVKRIIKGIEENKEEIDEKIKGNLKNWKIERLSKVDLSILRLCTYELKFEEDIPNRVSVNEAIELAKKYSGEKSATFINGVLGKMI

SEQ ID NO: 52237 - protein, 647 aa, Clostridium botulinum
MLRMVKLMVVLSCKNISKAYGVDLILDNLTFNINEHDKVGLIGANGAGKSTLFKILTSSLEQDSGDIFIDKSKSLGYLAQHLSLDSNNTIYEEVLDVFHDLIKMEEKLNKLEKLMNEPYDKNNKEYHDKIIKDYTTYTDLYINRGGYTYKGEIHRVLRGLSFEEEDFNKQINILSGGQKTRVALCKLLLQSPNILLLDEPTNHLDLTAINWLEEYLKAYKGTVLIISHDRYFLDEITNQTFELISGHINCYNGNYSKFIELRKKEYEVKLKAYNLQQAEIKRQEKIIEKYRSFNREKSIKAAESRQKSLDKIEKIDAPDKLPKPVKISFETQIKSGNDILHVENLSKSYGDMTLFENVEMDIKRGEKIALIGDNGRGKTTLFKIIMDEIQSNSGTKYIGKNVFIGYYDQEQSDLNECNTVLDEVWDEFPEMTTTEVRNALAAFLFTGDDVFKEISKLSGGEKCKVNLLKLMLSKSNFLLLDEPTNHLDIMSREALEDSLLNYDGTVLVISHDRYFLNKVIGKIYELNIDGIKEYLGNYDYYIHKKINPNRFDYEAITSENSKTKTQIHQERKKKKEEEKKLKQEKLKMKNLEKEITDLEKVVNSLQEQLCLEEVYSDSTKSEKINKDIINKQKLIEDLYSEWENFME

SEQ ID NO: 52238 - protein, 133 aa, Clostridium botulinum
MAFVDRSEKVLNMICMYLNWRDWNEEVFLMYAVVVTGGKQYKVAEGDILFVEKLTADVDSTVELDNVLLVGKDNGETVVGKPMVEGAKVTAKVLAQGKAKKVVVFKYKPKKDYRKKQGHRQPYTKIQIEKINA

SEQ ID NO: 52239 - protein, 241 aa, Clostridium botulinum
MIKEKSIYKLKKEDIPVFLFTGIVGMVGYHIFFFKASTYTTATNSSLIAASNPIITCILSVIFLKDKLSSKGIIGIILSFTGVLLTITNGAIANILNINFNKGDILMIIAVLCWASYGVFSKKVMPRYSPMTLTFYSFLFCTLFLIPFVIYEKPLSLINKVPYYSYISILYMSIFASVIGYLVQQISIKQIGPSKTSIFVNLVPISSIVLSSMILGEKITIITLLSTALIIAGVYICQKSN

SEQ ID NO: 52240 - protein, 340 aa, Clostridium botulinum
MKESINILAIESSCDETSAAVVVNGREVLSNIIASQISTHEKFGGVVPEVASRKHIEVISAVVQEALDEANFTLDDIDAIGVTYGPGLVGALLVGLQYAKGLAFATGKPLIGVNHIEGHISANFIEYKDLKPPFMCLVVSGGHTFIVYMKDYGEFEVLGETRDDAAGEAFDKVARAIGLGYPGGPKIDKISKEGNEEAIKFPRANFHNDTLDFSFSGIKSAVLNYLNKKEMKGEEINKADVAASFQKSVVDVLVDNTIKACMSKKVDKIAVAGGVASNSCLRETLVRECKKKGIEVLIPPFILCTDNAAMIGSAAYFEYIKGRRTSLDINAVPNLKLGER

SEQ ID NO: 52241 - protein, 763 aa, Clostridium botulinum
MNIKIKKRDGQYEPLQVEKTKKMVKLACEGIEGCDPLELELDSRIQFRDGMTTKEIQRTLIQTAIEKVIQNSKDNNGNNIKKTNANWQYVAARLLCFDLYKEAKISRHYNSFGYGDYYQLVKKLVKIKLYGEYLIQNYSDEEIKELAKYIVPERDELFNYEGLKLLNDRYLIKGNNGEILELPQERFMTIAMHLAIPEGDKKVFYAKKFYDLLSELKVTVATPTLGNAGTPFYQLSSCFISVVGDNLWSIYDVNQKFAQVSKHGGALGIYTGKIRALNSEIRGHKNASGGVVPWIRLYNDTAVAVDQLGKRKGGAAITLDIWHKDIFDFLDLKTNNGDDRRKAHDIFPSVSIPDLFMKRLEKRESWSLFDPYIVEKIMGYKLEDYFDDEDRKEFTNKYLECERNTNIPRDTVPTLDIMKKLMKSAVETGTPFIFFRDTVNKANPNKHKGMIYSSNLCHEIAQNMSESRLLEEEIIDGNGYSEIVQRVKAGDMVTCNLNSINLSKVKKEEFNECIPFQIRMLDNVISLNKLPVKEAKVTSDKYRAIGLGTSGYHHFLANNKIRWESDEHIKVADEIYEEIAYIAIKSSMELAKEKGSYPAFKDSEWETGKYFERRGYNSERWKKLQSNIKKYGMRNGYITAIAPTGSTSNIANTTAGIDPVFKKFFMEEKKGSFTPKTAPDLNEENFWYYKEAHTIDQQWSIKACAVRQKHIDQAQSFNLYITPEIKAKEILNMYIESWKQGVKTIYYVRNKSLEMDECTSCSS

SEQ ID NO: 52242 - protein, 248 aa, Clostridium botulinum
MNILETNNLNVYLDKNHILKNLNLNIEKNKVTAIIGPSGCGKSTLLRTLNGIIKEEINFNIEGDIYFNGENTESIPLEFLRRKIGCVFQSPAPFPFSIYKNFNYVLKYYGIKDKSKVNKIIEEKLKLVGLYDEVQDNLNISALKLSGGQQQRLCIGRALLPEPEILLMDEPCSALDIKNTAIIEKLLLELKKKYTILIVTHNLAQAKRISDSTIFMLNGEVIESGKTEKVFNSPQNEETKNYISGIYG

SEQ ID NO: 52243 - protein, 412 aa, Clostridium botulinum
MKIMRILHTSDWHLGKNLEGFSRMDEQERFIEDFINIVDKNNIDMVIIAGDIYDNGNPPARAEKMFYDCIKKISNKGERLVLIIAGNHDNPERLVAASSLAYDEGIILMGTPKTIVPKGKYGNFKVINSDLACLEIGVKEEKAVIISLPYPSEKRLNEILSKEMDNDEDRRKTYSERIGDIFSNLQEKYYKDNTVNLAISHIFVNGSEETDSERPIQLGGSLSVDVDKLPKKAQYIGLGHLHKPQKVRGIDNAYYSGSPLPYSKSERGYSKGCKIIDVHPGEKAVIEEVYFNNYKPIEVWHCNGIKEAINKCEENKEKDMWLYLHIKTKEYISTEDIKALKEIKKDIVEIVPEIEEKREETFNGNIKEKSMAELFKSFYLNQRGIEASEELMDLFLSIAQEEDEYETEETCD

SEQ ID NO: 52244 - protein, 356 aa, Clostridium botulinum
MVSVLANKVNPEKLKAIEAAMGQIEKQFGKGSIMKLGEDSILNVESISTGSLDLDIALGIGGVPRGRIIEIFGPESSGKTTVALHILAEAQKIGGAAAFIDAEHALDPSYARNLGVDIDNLIVSQPDTGEQALEITEALVRSGAVDVIVVDSVAALVPRAEIEGEMGDSHVGLQARLMSQALRKLAGSINKSKCVAIFINQLREKVGIMFGNPETTPGGRALKFYSSVRLDVRRIDSIKQGDQILGNRTRVKINKNKVAPPFKMAEFDIMYNEGISKVGNILDVGVREELVDKSGSWFSYKDTRLGQGRENAKQFLKDNMNIALEIENTIRKKHDLPVVDAKNLNIENKKEDNKEG

SEQ ID NO: 52245 - protein, 75 aa, Clostridium botulinum
MKALVETIAKALVDSPDQVQVNEILGEQSVILELKVAPEDMGKVIGKQGRIAKAIRTVVKAAAIKENKRVVVEII

SEQ ID NO: 52246 - protein, 137 aa, Clostridium botulinum
MRILGLDIGDRTIGIAISDPLGFTAQGITTIRRKSEAYDLEEIKKICDKYEVDTIVSGLPKNMNGTLGPQSEKVLEFCDLIKEHLNIEIKMWDERLTTVAATRAMLEADLSRSKRKKIVDKVAATYILQGYLDSLSK

SEQ ID NO: 52247 - protein, 59 aa, Clostridium botulinum
MLHMAYKITDACVSCGACAAECPVNAISQGDSIFDIDADTCIDCGNCANVCPVGAPVQD

SEQ ID NO: 52248 - protein, 351 aa, Clostridium botulinum
MILRCVNKGGNVMERILEVRNLRVSYHTYAGEVQSVRNISFHLNKGETLAIVGESGCGKTVTAKAIMRLIQEPPGEIKEGSEIIFNDKNILDMKEQELRQLRGADISMIFQDPMTSLNPTMKVGKQIAESLIIHRGMNKSEAFKEAVNILKLVNIPNAEKRANQYPHEFSGGMRQRAMIAIALSCDPKVLIADEPTTALDVTIQAQIMNLIGDLQKKLNTAVIMITHDLGVVADTAHRIQVMYAGQIIERGITNEIFYESKHPYTWALLQSVPRLDTKHKGELYSLEGTPPDLIKPPKGCPFASRCEYCMKICKEQIPKVTKLTETHEVSCWLQHPMSPKVHSSFLSGGEK

SEQ ID NO: 52249 - protein, 159 aa, Clostridium botulinum
MNISIPQIIAAILNFIILLLIVKHFWFDKITAVVDSRQSEIINKIEDTDKNQKLALELKEKNELELSNAKKQGKTIVEEYKSKAENVYEDIVKEAHEEADRIIKKSRLEAERQKKNAEEEIRAEAVELAVLVSSKTLEKTIDDLEHRRLIKDFISKVGI

SEQ ID NO: 52250 - protein, 252 aa, Clostridium botulinum
MNKEGISDMMKIVSKKNPIPLHYQIKEILQEMIENEELKPGDAVPTERELCEIQGVSRMTVNKAIMSLVNEGLLYREQGKGTFVAKPKENKEIAGLKSFSEIMQDKGLKTETRILFFHIKEATKKTKSVLNLSDNNNKVIEISRLRMCEGEPVAIETVWIPHNLCSDMERQTIEGKSLYETFKNKYNYFPEKAKQTIEPIILNEYECKLLNQDENALALMFRRTTYIKGEIPIEYTKAIYRSDIYKYELVFQ

SEQ ID NO: 52251 - protein, 180 aa, Clostridium botulinum
MSISYINKIKIIKGDITKENVNAIVNAANSSLLGGGGVDGAIHRAGGNKILEECKSIVSKIGQLKTGEAVITSGGNLKAKYVIHTVGPIWHGGKSNEETLLANAYKNSFKLAAEKNIKTIAFPNISTGVYRYPKNQAAKVAYNSVKESLIKYENIEEVRFVCFDEYNYKLYQDLLFADTR

SEQ ID NO: 52252 - protein, 296 aa, Clostridium botulinum
MFVNTGKELIRVCDEKKLKIWEYTLKIEAESKNVSEKEVFETMRKALKVMQHSAEIGREKEVKSVSGLIGGDALKLEKYSKGENTLTGNFMVRAMAMAISTSEVNAAMGRIVASPTAGSAGILPAVVIAAGEKLNKSEDDLVKALFTASGLGILISKNATTAGAEGGCQAECGSAAAMASAAVVEMMGGSVEQALDAGAIVIKNILGLVCDPVAGLVEIPCAKRNIAGTVSALTTADMVMAGVTSHIPFDDSVEAMYRVGKQLPSCLRETALGGVAVTEAGLKLKEKVFGCTGCKK

SEQ ID NO: 52253 - protein, 165 aa, Clostridium botulinum
MRIDPSTLNLKEKVVHINRVAKVVKGGRNFRFSVLVVVGDEAGHVGVGTGKSIEIPEAIRKAIEDAKKNIVEVKTVGTTVPHDIIGKFGKGEVLIMTAKEGTGVIAGGPVRAVLELAGLKDVRAKSKGSNNPTNMVNATIDGLARLRTVEDIAKLRGKTVEEILG

SEQ ID NO: 52254 - protein, 192 aa, Clostridium botulinum
MKRICVYSGSNLGLRSEYKESAKLLGKILAENKIELVYGGSRIGLMGEISSEVLRNNGKVIGVMPKGLFAGEMVHKDLTKLIEVENMHERKQTMAELSDGFIALPGGLGTFEELFEILSWAQLGIHKKPIGILNISNFFDPLLHMIKNTCTEGFMNESNIKLISVSDNPPELIKQMKNYVPPLMENKWRELV

SEQ ID NO: 52255 - protein, 269 aa, Clostridium botulinum
MFKIYAVSDSIGETAEQVANATAYQFGSSVKVERVPYVKTFEDVNNLISIIKNPNEAMIISTIVLVDIREFLVQRCVESGIHISNVLGPCISLVSTILNKTPEYKPGAVWDMDKKYYKKIEAMEFAIRYDDSKDHSGIKHADIVLIGLSRTSKTPLSIYLANKGIKALNIPLMPEVPVPEELFEIDRKKIIGLTIDPMHLIEIRRHRVDNMMKIPTELKYANAERVLDELEFADKIMRKLKCKVIDVTKRAIEDTALIIMESVFSDRII

SEQ ID NO: 52256 - protein, 702 aa, Clostridium botulinum
MSMTAEHAEELKNEHAVVCCRTEEGTILSADNLEDPEIFPDMVDSGLLTIPDNCLKVGEVIGAKLLKTVDSLTPLTSDIVEGAKKIGKEDKEDSTTEEALTEGNEKAVLKYNLKAGDIMKASDLENPMHFPKLVDSLLISLDERVLTREEVVGAKLSVDTPALTPVTADILEGFEEEVNMSVDSKATVSGGTLRIKIAEGRGIDIEVPLNGNVGAGKSAKVPTVKAEKGEVVAAPAVEANKEVKLEEKVIRSLTRKHYKIDKIEFGSETKIEGTTLYIREGISQDAKNVSSLVKDVKIDIITPDKYNTYSETIMDVQPIATKEGDNKLGTGVTRVLDGVIVMVTGTDENGVQIGEFGSSEGILEENIMFNRPGSPDKGEIFIKTQVTIKEKTNMERPGPMAAHKATDFITQEIREAMKALEDESLVVNTETFEQKRRPGKKKVVVVKEIMGQGAMHDNLILPVEPVGYLGGKPNVDLGNVPVMLSPLEVLDGGIHALTCIGPASKECSRHYWREPLVMECMKDEELDLCGVIFVGSPQINSEKFYVSERMGMMVEALDVDGAFVTTEGFGNNHIDFASHVEQIGMRGIPCVAFSFCAVQGALVVGNKYMKYMIDNNKSEGGIENEVLECNTLCPEDAIRGVEMLKAAMTGEDVKKPERAWNANVKENNLELIEKAENAKIERVLNETSIPMSEKRKEKYSTK

SEQ ID NO: 52257 - protein, 358 aa, Clostridium botulinum
MLERLNFIENKYEELSNKISDPSVMANQKEWQKLCKEHADLEIIVNTYREYKKAQEDLESDKEMLKEESDKELREMAQEEIKELTLKLEDLERELTILLLPKDPNDDKDVFIEIRAGAGGEEAALFASNLLRMYTRYAERKNWKVETISLNATDIGGFKEVTVAVKGKGAYSRLKYESGVHRVQRVPDTESSGRIHTSTATVAVLPEVDDVDININANDLRIDVYRASGHGGQCVNTTDSAVRITHLPTGLVVTCQDEKSQLKNKEKAMKVLKARLFEAAEAERAASIAEDRKSQVGTGDRSERIRTYNYPQGRITDHRIGLTLYKLETFLDGDIDEAIEALVTEDQAEKMKDLGRVN

SEQ ID NO: 52258 - protein, 196 aa, Clostridium botulinum
MKNLNDMNSEELGKYIKDTENQIHNLLDEYINRVNNKIDKNKNAKTLKEKAYALSKLYKYVEWVNDGIEMNNNVKNRIRIVPKRGEVWTCELGQNIGSEENKIRPVIIIQNDTGNQNGPTTIVVPISNRPKKIAVHISIRNGDFELAKGEKMEITGTVLAEQIRIVSKARLGRHVATLSDKFMQLLDSKIKISLDL

SEQ ID NO: 52259 - protein, 468 aa, Clostridium botulinum
MKDVVINTIKKYNMIEANDKIIVGVSGGPDSMCLLHMLCLLKNQLRIKDIYVAHINHGVRGAESDADEKYVENFCYTNNLGFFSKTINMDKIAKEKGISSESAGREARYDFFNYLRKELGAQKIATAHNANDQAETVLMRIMRGTGLQGLIGINPIRDDLYIRPLINVLREDIENYCDKYELNPRIDKTNLQSIYTRNRIRLELIPYIKDNFNEDIVNTLCRFSNIVSKDNNYLEEVSKDKFERYCTKKLQRVIIDKRAFLEHESISTRILREAILYINQNLYNLEMRNIYDVLELSLNTTGKFVNLPSNIKAENIYGDIHLYKEDNFIKKVNNVQCELKIGFNQVEDLNINLKIYSIKDHNYNINDNKYIQYFDYDKVSNEKIYLRNRKNGDKFTPLGMKGSKKLKDFFIDSKIPREQRDKLKLVCFGEEIAWIIGCRTGNNFKIDKNTKNVLEITVERGEANGFDK

SEQ ID NO: 52260 - protein, 226 aa, Clostridium botulinum
MEKFSPLFYINLFGYKFGITSSLVIQWVIIAIVALLSIILTRNLKKVPDKRQTVMEMMLDLVRNLVNENMGEEFKSFIPFIGTLMIYLLLMNLVGLLGLKPPTLDYSVVLGMALISFVVIQGYAIRKTGLKSYFLGYGKPYLFLLPLNVIERVMLPVSLSLRLFGNITAAVLIMDLVYSALASISWFAQLVVPIPLHIYFDLFDGTIQMVIFVMLTMINIKVIAEH

SEQ ID NO: 52261 - protein, 223 aa, Clostridium botulinum
MGQKVHPHGLRVGVIKEWDAKWYADKKNFADNLVEDHKIRNFVKKNSYAAGVSRIEIERAAKRIKLNIYTAKPGMIIGKGGQGIESLKNKLQKIVSNKNILINIVEVKRPEADAQLIAENIAQQLEKRIAFRRAMKQSIQRAMRSGVKGIKTACSGRLAGAEIARTEHYNEGTIPLQTLRADIDYGFAEADTTYGKIGVKVWVYKGEVLPARKNINEKEEANA

SEQ ID NO: 52262 - protein, 271 aa, Clostridium botulinum
MKKFLSILIIGTLSLGLFGCANGKVEEKKEDTSSKKESKENLDITVSAAASLTEALTEIQKKYEKETGAKVSITFDASGTIQKQIEQGAPTDLFISASKKNMDKLQEEKLIDNDTRKDLLGNKLVLIVSEENKDKKIEKVSDLKNIDSKLAIGEPEAVPAGKYAKEAIEYYKLWDVLKDKIVYGKSVKQVAKYVESGEAAAGIVYNNDAKVLKKSYIRYTFDEKSHKPIVYPMAVVKNSKNKEGSKKFAEYIQTKEAQDIFIKYGFDYIAK

SEQ ID NO: 52263 - protein, 318 aa, Clostridium botulinum
MSNIIKYKKKILNGDLLTKEEVEELLEEDITDLAATANEIRESLCGNKFDLCTIINGKSGRCQENCKYCAQSAHFDTDIIEYNILNSDRIINSAISNYNKGVHRFSVVTSGRALNNNEVDTLCKTYSKLKETCSIRLCASHGLLKYEDLKRLKDSGVTRYHNNLETSRKFFTKICTTHKYDDKIETIKNAKKAGIEICSGGIIGLGETMEDRIDMAFTLRELSVESVPVNILNPIKGTPLENQEILSYEEIIKTLALFRFILPTVQIRLAGGRTIISDKGKKALESGVNGAISGDMLTTLGIETSEDIKMIKNLGFEV

SEQ ID NO: 52264 - protein, 257 aa, Clostridium botulinum
MIDIHSHIIPSVDDGANDLDYSLKMLKMAEESGTKKIVATPHYYMGRYEEKYFNIKKYLEQLNEIAKKNNINIEIFLGQEVLIHKKTIEFYEMGYIGTINNTSYMLVEFPMTTWENYYMDVLYELKVRGINPIIAHPERYKFIHENICNINKFIEEEYLVQINTGSIEGIFGKDVQKISKEFIKNRICNFIGSDAHSLNTRKPDMNKGAEIIKTMDKSLYDEIIINSNNLLENKEIIRSYSKIERKKNIFSFLKNMI

SEQ ID NO: 52265 - protein, 612 aa, Clostridium botulinum
MVWKTIKKLRKKEIIMKLKTHDDRLTLTNGSYHALVNARKPKGIEDKKAYLIGTGIGALAAGCFLIRDAHMDGSKITFLEQLDIPGGSLDGEVRQNMDYVARGGREMGHHFEVLWGLFSSLPSTEDPNMTVLDHFYYTNYDDPNFSNCRITKNQGERYDNGKFNLGQDLAKELAAFVNVTDEELEDKSIEDVLSEELLNTDFWTYWRTMFAFENWHSALEMKLYMNRFIHHVGGLPNLSALQFSRHDQYTSFVKPMVKYLEDHGAKFEYGVTVNNVEFSISDDKKVAKRIDATDKAGKDISIDLTENDLVFITNGSMTEGSGYGDDNTPAPFNREPEGCWKLWRNIAAQSDEFGKPDKFCTDTERSNWESCTVTCHDERVPEYIEKITKRSPYGGRTVTGGIVTALDSSWLMSWTINRQEQYYGQPEKDVVVWVYGLFSDVPGDYIKKPMRDCTGKEITKEWLYHIGVPTDKIEELAESCSAVPVMMPFITSQFMPRAAGDRPYVVPKNGVNFAFLGQFAETLDDPGRDTVFTIEYSGRTAMEAVYVLTGVEKGVPEVFSSRYDIRYLLNAGVCLLDGEKPKLDLPPMAKRKVLKQVAGTDIEKLLKEYGII

SEQ ID NO: 52266 - protein, 613 aa, Clostridium botulinum
MKSNKGLLSKIYATLVYVFLYLPIFVLVVFSFNKSKLNATFTGFTLDWYKNLINNVQILEALKNSLIIAFISTFFAVIIGTLAAIGMYRYKFKGKRAMEGLLYIPVVIPEIVMGISMLAFFSSLNLPAGLITLILAHITFCISYVIIVVRARLDGFDAALEEAAQDLGATPWQTLTKVTLPVISPGIISGALLAFTLSLDDVIISFFAAGPDSNTLPLKIFSMVKFGVTPEINALSTVMMVFTLSMVVIAEGIRRNMLKNKKVKKTLSFIVILLMVTGVGFTIFGNTAKTEKQVLNIFNWSEFLPQSVIEQFEKEYNVKVNYSTFSSNEEMLAKLMGGNVPYDLVVTSDYAIEIMTKQKLIQPIDKNNVPNLANIDKNVLDLAFDPKNTYSLPYMWGGNNIVIDKTKITKKITSFDDLWDSEFKNSMVILDDPRVMIGLALQKNGYSINSKNPKELQKAKEDLIKLMPNVKAFDSESPKTLLINGEASIGYVWGTEAYLAKLENPNLEVVLTKEGVIPQYDNFVIPKKAKNKKLAEEFINFIYKPEISAQVSEEFPYANPNKAAYPLMDKDKLNDIAVYPPREAVEGNELIKDVGETTKLYDDIWTEIKNSKR

SEQ ID NO: 52267 - protein, 217 aa, Clostridium botulinum
MISLKNIEGAIFDLDGTLIDSMKIWEKIDYDFLNKRNLKVPQDLKDKIETLTFEEGANFFKKNFKLKESQEEILKEWHNMVVKEYSHNIKLKNNVRDFLIKLKNKGVKLAIATSNTPELTKLVLENNKILDLFDSITTISEVNRNKTFPDIYLLCAEKLKLPAEKCAVFEDILPAIKSAKTAKMKTIGIYDDSSKDDENKIKEIADYYIYDYKELII

SEQ ID NO: 52268 - protein, 204 aa, Clostridium botulinum
MDKIYNLNELIKSIPLIIGFMVPGYIFLEIKNFYTKSKREKDDNIILKSLIISFVINSITNIFISENNYLSNIISIILAIVVSVLYVKFIYSSHMEKTTHKFKLYKTFRKDAFDDVVDLELGIWMYIYLNDENIIYSGKLIYYENTTEDNHRYIQLSNYSCYSYDGEEICNYVDDNCRTVLLNIKDVKRIELVYDDNSTKIKSS

SEQ ID NO: 52269 - protein, 315 aa, Clostridium botulinum
MLEIEKPKIECVENAEDGSYGKFVIEPLERGYGITLGNALRRILLSSLPGVAADHIKIDSVLHEFSTVQGVKEDVTELILNIKCLALTMNGEGPKTIYIDEVGPKEVTAADIKTDGDVEVINKDLHIATLDENGKMYMEINVNRGRGYVTQNKNKTKDMPIGSIAVDSIYTPVKRVNFSVENTRVGQITDYDKLTIEVWTNGTIRPEEAVSLSAKILIEHFKLFMTLTDHADDMEIMVEKEEDKKEKVLEMTIEELDLSVRSYNCLKRAGINTVQELCERSMDDMMKVRNLGKKSLEEVEQKLEALGLGLRKSED

SEQ ID NO: 52270 - protein, 1194 aa, Clostridium botulinum
MSDKKFTHLHLHTGYSLLDGAGKINNIIASAKELGMDSIAITDHGAMYGCVDFYKAAKNAGLKAIIGCEVYIVPKSMSIKNSDPNNKIYHLVLLVKNEIGYKNLIKIVSKASIDGFYYKPRTDHQFLKDHSEGLIALSACLGGEIQSNLLNENKEKAKEIALFYKSIFKDGFYLELQYHGNDAERKVNDMNIRLARELKIPLVATNDVHYIEQKDSKFHDILLCIQTGKTVNKENRLRYPSDQFYLKSADEMWEMFSHVPEALKNTEKIAEQCNFHYDFHTSKLPKFLLPEGTDPFEYMKKFCFKGLIKRCDLFRDLLTKSFNINEIIALGKENEEAKIYIDRLQYELSVIDHMGYVDYFLIVSDFIKFANEKKIPTGPGRGSGAGSLVAYTLGITKIDPIKYGLIFERFLNPERISMPDIDSDFCYERRGEIIDYVVEKYGKENVSQIITFGTMAARVCIRDVGRAMNYSYVEVDKIAKMIPIVPGIIITIDKALALNPELKNEYENNLRVKELIDVSMNLEGLPRHSSTHAAGIIISSSPIGDYVPLQKNEHNIVSQFDMTTLDELGFLKMDFLGLKTLTVLKDAVDMIMQNHNVDIDLDKIDINDKEVYKMIGEGKTIGIFQLESTGMTSFMKELKPDSLEDIIAGISLYRPGPIDEIPKYIENKKNPDKITYLTPQLEPILKITYGCLVYQEQVMEIVRKLAGYSMGRSDLVRRAMSKKKHKVMEEERKNFIYGIVKEDGEIEVPGCIRNEVSEKIGNELFDSMMDFASYAFNKSHAVAYALVAYQTAYLMKYYPAEYIAAKLNSVMGDNGKVAYYINYAESLGIQVLPPDINESFSKFIVEDNTIRFGLDAIKNVGIGAAKIIVKSRKKNGNFKSLIDFASKIDLTTINKRAIESLIKAGAFDCFKVFRSRLLAVYEKVLDSISNQRKRNIDGQVSLFNADNTIVNIPIIKYPEIKEFDKKYLLAMEKEMLGIYITGHPLDEYAQSLKIQTSIRIEKILCSHNKVLNDDSIIEISSDNNIIRGDINDGERVVIGGIITKVSRKITRNNTIMAFLKLEDLSGIIEVIVFPKTLENVNPLINEDSLVVIRGRVSLAEDELPKLICEKIHPLEKLNLSKVYIRVKDNKKVRTANKFLKTILKSHKGDTPIYIFSEKEKQNFRLSKNLLISLDEDILSTLRSYFGDENIKVVD

SEQ ID NO: 52271 - protein, 700 aa, Clostridium botulinum
MSNLKRWEEKQLANKEYPLAKFRNIGIMAHIDAGKTTATERILFYTGKTHKIGETHEGAATMDWMEQEQERGITITSAATTCFWKDHQVNIIDTPGHVDFTVEVERSLRVLDGAVTILDAKSGVEPQTETVWRQADNYKVPRMVFINKMDKLGADFLMSVGTLRERLHANAVPLQLPIGAEDSFSGIIDLVKNDAVIYKDDLGTVMDETEIPEDMKEIAEEYRTMLLEAVAEVDEDIMMKYLEGEEISVEEIKTALRKGVLANKIVPVLCGSAYKNKGVQLLLDAIIEFMPSPLDIEDVKGTEPTTGEEMTRPADAKAPLAALAFKIATDPFIGKLAFTRIYSGTMKSGTYVFNSNKGKRERIGRLVKMHANHREDVEELKAGELGAIVGLKDTTTGDTLCDDADPIILENMEFPEPVIDVSIEPKTKAGQEKMGIALAKLAEEDPTFRTYTNQETGQTIIAGMGELHLEIIVDRLIREFKVECNVGQPQVAYKETIKKHVKAEGKFIRQSGGRGQYGHCWIEMMPTEGEYEFQNAVVGGSIPKEYIPAIDNGIQEASQSGIIAGYPVINFKVKLFDGSYHDVDSSEMAFKIAGSMAFKNAMSKADAVLLEPSMKVEVVVPEEYMGDVIGDINSRRGRIEGMTPRAGAEVIRAFVPLSEMFGYATTLRSKTQGRGNYVMQFDHYEEVPKSIQDKVIGERK

SEQ ID NO: 52272 - protein, 294 aa, Clostridium botulinum
MSKVKFIYNPYSGEKAIISQIDKVIRIHQKYGYEVVPYRISLEYDLDDAFKSIDESYKYILVAGGDGTVDNVVNHLKKFSIDLPIAILPTGTANDFAKFIGMPTNVGEACEQILKSSVKKIDLGKINDKYFINVASTGLFTDVSQKTDVNLKNTMGKLAYYVKGLEQLPNFRRLKVNVRSEEVNFDGDMYLMMVFNGQTAGNLHMAYKAEVDDGMLDVIIIKACAIKDMIGLFIKMIRGDHLEDVNALIYFKTNKLEIESNEEIVTDIDGERGPDFPLQIECVKEGLDILGILD

SEQ ID NO: 52273 - protein, 330 aa, Clostridium botulinum
MIKFKVLNILFFGGAFMKIVLALGGNALQSDPKDKTPESQLKTCKDTAKSIVDLIEEGHTVSVVHGNGPQVGQILASVEAGYKANNSNVLFPFDVCGAFSQGYIGYHLQNAIEEELNKRNINKPVGTVVTQVLVKADDQGFQNPTKPIGSFYSEEEAKKLEAEKGYVMKEDAGRGYRRVVASPKPVDVIEKAMIKQLVEAGNVVISCGGGGIPVVNDNGIIKGVPAVIDKDFAAEKLAEIIDADMLLILTAVDQVAINFNKPNQESLAKMTLEEVDKYIAEGQFAPGSMLPKVEACKKFVQSSENKIALIASLAKAKDAINGTSGTRVVR

SEQ ID NO: 52274 - protein, 353 aa, Clostridium botulinum
MSKGIVALAMSGGVDSSVSAYILKERGYDVIGIYMDLWRDERKGYCNKSAAEDARRVAEKLDIPFHVINIEKKFKDNVIDYFIDEYLSGRTPNPCVACNKTIKFEAFFNAAKEFGADFMATGHYCKIEERNGRKVIVKAEDDKKDQTYMMYNLKQYQLERTIMPCGEYKKDHIREIAENIGLDVYNKKDSQEICFIPDNDHGGFIKRNYKSKIKQGNFVDKAGKIIGKHKGIIYYTIGQRKGLGIALGKPAYVIDINPITNEVVIGDEEDIFRTELIAKDVNFIPFDKLEKSMELEAKVRYSAKPSKATIIPLENNKVKVVFQNKQRAITKGQSVVFYDKDMLVGGGIIEEIV

SEQ ID NO: 52275 - protein, 1253 aa, Clostridium botulinum
MGNEIKTLFVEKKPQFRVESKKILNDFRLSLNMKNIEDIRILNRYNISGVSDEEYNLAKYTIFSEKTVDDLYEEKFPYDSEDKIFGVEYLPGQYDQRADSAAQCIQILTQREGVIVKYSKIFVIKGNIAKEELERIKEYCINKVDSREAQLEKPNSLQDIQLEVQSVEILHGFIDLSGKKLKEFLEDRNLAMTSEDLKFCQEYFRDKEKRNPTITEIKVIDTYWSDHCRHTTFMTEIEDIKIEEGLYSNAIKESYETYKNIKRHIYAKERATCLMDIATIAAKELRKKGLMEDLDVSPEINACSIVVDAEINGKTEKWIVMFKNETHNHPTEIEPFGGAATCVGGAIRDPLSGRVYVYQAMRVTGSADPRQNIEDTLEGKLPQKKITTEAAHGYSSYGNQIGLATGQVAEIYDEGYVAKRMEIGAVIGAAPMENVIRKEPKPSDIVILLGGRTGRDGIGGATGSSKKHTESSIENCGSEVQKGNAPTERKIQRFFRNKEVSTMIKRCNDFGAGGVAVAIGELTEGLYIDLNKVPKKYDGLDGTELSISESQERMAVVISKEDRERFIKLSAEENLEATVVAEVKEEKRLKMLWKDSIIVDLDREFLNTNGVVQKTKAYINTPEKESYFQEITIGSKENIKDKWIENIKDLNVCSQKGLVEMFDSTVGAGTVVMPLGGKYQKTPQEGMAAKLPVLEGDTTTATVMTYGFNPKISKWSPFHGAMYAVIESVTKAVAMGIDYKKIRLTFQEYFEKLENKEEKWGKPLAALLGALKAQREFSIAAIGGKDSMSGTFKEMNVPPTLVSFAVGVTNVNRIISSEFKEAGSIILYIKAKRNKEEIPDFNILKENYEKVYEAIETGNVLATSTIKSGGISEAISKMCFGNNIGAKLKNLEREELFSRDYGSIILEVNKNFDLNLLKEINYKIIGDTTERASIEILGEEILLDKCYEEFESTLEDVFISKVEKEYKKDLDISLYRNKNKKSPSVKVPKPKVLIPVFPGTNCEYDSKRAFEKAGGEVELVVFNNMSSHNIKESIDNLSSKIKQSNIIMLPGGFSAGDEPEGSGKFIATIFRNEKIKDSVMELLKARDGLMLGICNGFQALIKLGLVPFGEIRDINENCPTLTYNDIGRHQSKIAYTKVASNLSPWFNNVEVGDIHAIPISHGEGKFYAKDNVMKRLIDNGQIVTQYVDVNGNVTSDIRYNPNGSISSVEGICSPDGRILGKMAHSERIGYGTLKNVPGNKDQKIFDAGIKYFK

SEQ ID NO: 52276 - protein, 72 aa, Clostridium botulinum
MLVITRKKGESLLIGDDIEITVVKLDDGSVKLAIDAPKNLTILRKELYNEVQEENKKATNFNPSILKNIKSK

SEQ ID NO: 52277 - protein, 398 aa, Clostridium botulinum
MDFLAIKNKEARKVDKIKTITIFGTRPEAIKMAPLVKELEKREEIENRVCVTAQHREMLDQVLELFNIKPDFDLNIMKSKQSLTGITTRVLEGLEEIFDKEKPNLILVHGDTTTTFAGALAGFYKQIKVGHVEAGLRTFDKYFPFPEEMNRKLTGSIADLNFAPTVGSKNNLLREAIDEESIFVTGNTVIDAMEFTIEQDYIFENEDLNMIDYENKKVIMVTAHRRENWGEGIENICNALKTIVEKYKDVEIVYLVHLNPVVRDTVYSILGDLERVHLLDPLDTKETHNLMNKCYMLMTDSGGLQEEAPHLGKPVLVLRDVTERPEAVKVGTVRLVGTDKEVITKEVFDLIENKQKYDIMSKAINPYGDGKASIRIVDSILYYFDKIEKRPQEFHANK

SEQ ID NO: 52278 - protein, 473 aa, Clostridium botulinum
MKLNLNEDDILMLLNDITINENEFSDVDLNEIEKKKICENIISKVQPKKSKSKRNFIAAAVILLISIPLLISPKNVLANMLEKLTVISGIGEVNVSSDKPRILKNSLKKGNITLANMYVDNNKIIVTLTIEPEELTPSYYTVRDEHGNSYELHRSDNLAMMPDNHIGSYRAEYYGEVKKANKYTLNIIDNDKKLTKATFKLKNSHFKEAPESKILYTATNGITTLNVTSLRKEGNILKVDYYFTDTLPDFKWKRIDTLNYGTFQEGKQWGLKEPINTKSINNNPTEAPNIMISDEYNNAVYGHNNTNYLDQENESLFDLSKLTGKKLKLTVLNVNYSFGNDYVDKNNSFKLDNDFKLELDVPKSGKRILNKTGEYKGFKYNIISIERLSNNSVELIYNYINDSNAKFQIHNISFDSITPWENGSSSTKPYNNNIKHILKKKSKIGDKLQLNNIRCSFYSVGPFEIDLDPSTIK

SEQ ID NO: 52279 - protein, 122 aa, Clostridium botulinum
MIQQQTRLKVADNSGAKEIMCIRVLGGSHRKWGNIGDVIVASVKSATPGGVVKKGEVVKAVIVRSVKGLRRADGSYIKFDENAAVIIKDDKNPKGTRIFGPVARELRDKEFNKILSLAPEVL

SEQ ID NO: 52280 - protein, 538 aa, Clostridium botulinum
MNVFAMLTGLIGGLGLFIYGMNLMGDGLQNVAGERVKVFFEKVTSNPIKGVLTGVVVTGVIQSSSATTVMVVGFVNAGLMTLTQAAGVIMGANIGTTVTGQLVAFNVTAGAPLFVGVGTAIVLFAKKKKTKEIGNIILGFGILFMGMEIMKEAMAPLGQSEAFKSLALSLSHNVFLGIVVGMGMTAIVQSSSATIGILIALSSNGVLPLSAALPILFGDNIGTCVTALLASIGASKNARKAALFHLTFNVIGTVIFAFILVPLTPFVRIITNLTPGDVGRQIANAHTLFNLINTFIQIWFIKYIVAFVNKMIPGSDPYEKMAPKYIDERLLENPTIAINQTIKEVVRMANKAKENLQLSIDAFEKNDLELVSKVYENEKLINILNKSITTYLVKLNNLKLSDKQLNLVGSMFHVVNDIERIGDHAENIIDLTSEKIEKRIQFSDDAAYDIKHLFNYTLDSLTRTIEGFESNDVERSQSVMYIEEKIDNLEEQLRETNIKRLNKGTCNANASAIFLDIINNFERVGDHCTNIAQTVINR

SEQ ID NO: 52281 - protein, 758 aa, Clostridium botulinum
MAKKRTKSNKTEKKNNDITGIILISMGIFVLFSVFSPSASGIVGSFIKKVLIAVLGLGSLVFPILIIFTGCCFIGKKNKINLNSKFYGIVLFSINTLLFLQMILLKSYGTEDIMLGISKFYREDTMIHGGIISYLIDVPLYKLFGTIGCYILFICVYIISFILIFQVSLGTILQTLQVKRSIKNKKVKEKSIEDKEDIDGIEKELAPDLEKDEGLTRNIKDKIKILDFMKNSEIKEGPLNIVDNSVSENIEKSKEDTGEEAIKEELSKNINEGGNNVKIEYNYPTLELLKQNIQSKLNKQDKKELINNANKLEETLSSFGVEAKVMQVSRGPSVTRFELQPNAGVKVSKIVNLADDIALNLAASGVRIEAPIPGKSAVGIEVPNKSLTPVYLREVIEGDEFQKFDDGLAFALGKDISGSCVVSDLSKMPHLLIAGATGSGKSVCINTLIISILYKYSPENVKLLMVDPKVVELSIYNGIPHLLIPVVTDPKKAAGALHWAVNEMTKRYSLFAENSVRNIEGYNNLYDQGKIENKLPYVVIIIDELADLMMVCPNDIEDYISRLAQMARAAGMHLVIATQRPSVDVITGIIKANIPSRISFAVSSSIDSRTILDMSGAEKLLGKGDMLFYPTGSPKPTRIQGAFISESEVEKVVSCIKDEQGEAEYREEIIDQIDTAVNVEAGDEDELLEEAIRICIQLGEVSTSLIQRKLRIGYNRAARIIEQLEAKGIISGRDGNKPRQVIIDKNNETYGKYFRGNM

SEQ ID NO: 52282 - protein, 349 aa, Clostridium botulinum
MEGKMKAVALHAIKDLRYEEVDIPTIGENDVLVRVKYVGICGSDMPRAMVSGAYHYPTITGHEFSGEVVEIGNNVDDIKVGERIAVAPLIPCGECEFCKKGNFALCETYEFLGSRNDGGFAEYVRVPKENVLILPEDLDYETAAGIEPASISYQAMSKTGIKVGDTVAVVGCGPIGQFAIQWAKIFGASKVIAVDVLEDKLNLAKELGADIIINSKECNAVEKVLEITNGGVEAVVETAGMKITEEQSVLMCRKLGKVVFLGISHDELRFSEKTFDRIMRGEITLQGSWNSYAAPFPGIAWRTTLDFMEKGQIVFKPMVSHKIKLEELPGYFHKMFNKEINYNKVLVEI

SEQ ID NO: 52283 - protein, 45 aa, Clostridium botulinum
MVMPGDHIDMAVELITPVAMHENLRFAIREGGRTVGSGVVTTISE

SEQ ID NO: 52284 - protein, 881 aa, Clostridium botulinum
MSETREMAKTYDPKEFEERLYKNWEEKSYFTPEVDENKKPYTIVLPPPNITGKLHLGHALDDTLQDILMRTKRMQGYSTLWLPGQDHASIATEVKVENELLKEGIVKKEIGREAFLEKVWEWTDEYRNKIRNQIKKLGCSLDFTRERFTMDEQLDKAVKHFFVKLYNEGLIYQGNRITNWCPKCKTALSDAEIEYSEHEGHFWHVKYPVVGSDEYLEIATTRPETMLGDTAVAVNPKDERYAHLVGKTLMLPLVNREIPIVADDYVDMEFGTGAVKITPAHDPNDYQVGKRHNLPEINVMFDDGRINYKETRYHEMDRYEARKAIVEDLKNEGFLVKIKEHNHNVSCHDRCNTVIEPIISKQWFVKMEELAKPAIDVVKNKKVKFVPERFDKTYFNWMENIQDWCISRQLWWGHRIPVWYCKDCGEVIVVTEEPKKCPKCNSEKLQQDNDVLDTWFSSALWPFSTLGWPDKTPDLKYFYPNNTLVTGYDIIFFWVARMVFSGLYCMDDIPFDTVLIHGIVRDSEGKKMSKSLGNGVDPIEVIDEYGADALRFTLVTGNAPGNDIRYYPERVEAARNFANKIWNASRFVLMNLDKDLMDKYKDNKNYTIADKWILSRLNTVVKEVTENIEKFELGIASQKIYDFIWGEFCDWYIELVKPVLYGEDEQSKGIAFNVLHKVLETSLQLLHPIMPFITEEIYTHLYTEYESIVISKWPEYDEILKDEKSEKDMEYIIEAIKSIRNVRTEMNVPPSRKAKLMIYLTEKEAERSFKEGEVYFQKLASASEVSFLENKETSDKNVSVVTRGAEIFIPLLELVDIEKELERLNKEKEKLEKEIDRVEKKLANEKFVSKAPESVVNEEREKGEKYKAMLKSVLESLESLK

SEQ ID NO: 52285 - protein, 450 aa, Clostridium botulinum
MINKNIKIQISKGVEYIINTLQENGYEAYIVGGAVRDSLLERKVNDWDITTSANPQEVVNIFENLGYKIIPTGLKHGTVTILINSIGYEVTTFRVDGEYEDNRHPKEVKFTSNLREDLKRRDLTINAMAYNDKIGLVDYFYGLEDLNNKIIRCVGNSKDRFNEDSLRMLRCIRFASQLNFCMEESIKLNIRKLSRNIANVSMERIRDELCKILVSSQPVYGIRNIVELNLMDYIIPELKACVGFEQHNIHHDKDVYGHILSVVENVPNKLELRLAALLHDIGKPRCFSIGDNGQGHFYGHQKISADMTKDILKRLKFDNKTIDKVDKLVYNHMTRYNKLRTPNIKKFINKVGIDNLDDLFELQIADIKGSAKEYHSFDNVLNLKIKCEKILSEKQPLTIKDLDINGYDLMKLGINQGKEIGIMLNKLLDIILENPNLNNKEDLIKIVESI

SEQ ID NO: 52286 - protein, 397 aa, Clostridium botulinum
MGVWKMKNVVIASAVRTPIGKFGGTLKSVSAIELGSIVIKEALKRANVKPEDVDEVIMGNVLQAGLGQNSTRQSAVAAGIPVEVPSFTINKVCGSGLRAVSLATQLIKLGDDDIVVAGGTENMSAAPYLLEKARWGQRMGDGKIVDEMIRDGLWESFNDYHMGITAENIAEQWGITREEQDEFSAKSQQKAEKAVKEGRFKEEIVPVVIKSRKGEVVFDTDEFPRFGATKESLSKLKPAFKKDGTVTAGNASGINDGAAALVIMSEEKANELGIKPLAKIVAYGTSGVDPKIMGYGPFYATKKTLEKANLKIADMDLIEANEAFAAQSLAVAKDLGFDMDKVNVNGGAIALGHPIGCSGARILTTLLYEMEKRNSKHGLATLCIGGGMGTAIIVERY

SEQ ID NO: 52287 - protein, 342 aa, Clostridium botulinum
MLKKMIFNEKGQRGTESMINGNTTNLREWNRIKYSWASDFYRTMLNNFWIPEEISLNEDIKQFPYLTDGERNAFDKIISFLNFLDSVQSENLPNISRYITAAEVSSLLNIQTFQEEIHAQSYSYILDTVTNPITRDKIYDQWREDEHLLERNKFIAGIYEKFNKEPEIHNFLRAIMANYILEGIYFYSGFSFFYTLARQGKMTATSTIFKYINRDEVTHLVLFQNIIKELKNENLHIFTEELEEEFRQMMRMGVEHEIQWGQYVTNNEILGLNDELIEKYIKYLSNLRLVAIGLKPLYPEINKHPMEWIDSFSKLNSTKTDFFEAKVTNYTKAAAFDFDDLD

SEQ ID NO: 52288 - protein, 317 aa, Clostridium botulinum
MNRIVYAVLLAFLISILGGPILIPLLHKFKFGQNIREEGPESHRKKAGTPTMGGVIFILSSIITMALTIRRPGDEAMVALYAFIAFGIIGALDDGLKIIHKNNLGLRAYQKMLLILVVSGIFGYYSANNPNIGTSIIMPFTRKSLDLGAFYIPGIIIYFAATTNAVNLTDGLDGLATSVTLLVMTFFALVSFGMGHYTLAIFCAVVAGALLGFLRYNAFPAQVFMGDTGSLALGGAVAAVAMILKLEILVIIVGGIYVLETLSVIIQVLSFKLTGKRVFKMSPIHHHFELSGWHETKVVSVFSIITVILCLVAFLAL

SEQ ID NO: 52289 - protein, 289 aa, Clostridium botulinum
MDGVINVLKPKGITSFDVVRDIRKIAKIKKVGHTGTLDPLASGVLPVCIGKATKIVDYIMEGTKTYRVEMKLGTTTDTYDREGTVLEEKEIDLTPIEVEETIKKYIGDIDQVPPMYSALKINGQKLYDLARKGIEVEREARKIHIYDICILSIDLPYVIFDVKCSKGTYIRSLCFDIGKDLDSGAVMWNLQRLEASPFNIKEAIKLEDLNEENIKQYITPIDEALKDYEKLSLDKKFEKLVLNGVILKDRRVLDNIEENKLYRTYIEDDNFIGLGMKNAYGFKIHKLLT

SEQ ID NO: 52290 - protein, 74 aa, Clostridium botulinum
MVFEKVKNIIVEQLGLDEGEVKLETSFEDLGVDSLDLFQIIIEIEEAFDIQVEEAEKIKTVEEAVKYVESKIEK

SEQ ID NO: 52291 - protein, 433 aa, Clostridium botulinum
MYNLFTLDNGLRVVLENIDYVKSVSVGLWIENGSRNENLKNNGISHFIEHMMFKGTENRSALQIAECIEDVGGQINAFTGKEATCYYIKILNSHIELALEVLSDMLFNSKFKEEDIEKEKGVIIEEISMTEDSPEDVLSDLHCKAIWGDDSISYPILGTVETVKSFKRKDIVDYINKYYIPENSVISICGNFDINELEKLINKYFGNWNSGENKNITVYSKPKIENNHLFKNKNIEQLHISLGFEGLELGNDDAYPLILLSNVLGGGASSILFQKIREEKGLCYSIYSYMSSFNKTGAVSIYTGLNPAYTEDTITLIKKVVNDFSKEGINKEKLIKSKEQLKGSYILGLESTSTRMFNNGKSVLFLNRINDPEIIMKKIDKITEDKLQEIMDRTFGAGIKNSAFVGEKLNLENVKNILDRNQRAFKEAKSKLI

SEQ ID NO: 52292 - protein, 632 aa, Clostridium botulinum
MLDDLVYVIPKEMHSEEQLKEFLVSHPEIKFVSLVCIDLAGNDTDEKIPIKLFLEDMSKFIKGCVQTDGSSVVLPGIATLNNAKVDMIVDMDVNWFIDYNYELIDCKTEKPTGTLRIPCFLYHENKPVDSRYILKKSIEYFKTTLLNLIKTNPESISSFNIKYEDIEKVDVTCATELEFWVKTPNDNAEVDELCTSQVLHEQYWNRTKGSVRTALEESLLLMEYHGLEPEMGHKEVGGVKAKLTSSGGFTHIMEQLEVDWKYSTALQAGDNELLVKSIIKETFRNNKLDVTFFAKPIDEVAGSGKHVHLGVALKLKNGKRINLFSTDKNHYLSSFGYASIMGILKNYEVINPFVSSTNDSLKRLKPGFEAPVCIVTSLGHTVQLPSRNRTILVGVIRDLDNSLATRFELRSPNPRSNTYLTVASLCMSMIDGIKYAIENNKCEDDLLKELSKAAEEDTSYLEKGRQYRSEEDVFEYYSEEERSKIFGTAPSTVYENICSLDKYMDKIEVLKAGEVFTSKIVNSYKLAVIERWLVEITNRIIPNYVEEIRSFSQLHEVNKASDLDIHNWSKINELRQCLMKDTYSDKSLFGQIREAKENNDYETISNLQLEIDKKMKLLRKLYSDYKKNLLDI

SEQ ID NO: 52293 - protein, 453 aa, Clostridium botulinum
MKFKKLTALITAFTLTFGLAACGSNKEDVSKKEESKATIATEIKEPVTIEFWHAMNGDNEAALKEITEEFNKKNKDKITVKLVYQGQYKELFSKLDGAAKSKKLPALTMIYPNRLTAYVMNDLVENLNPYIENEKIGFKKDVWDDIPEFVRDNGMWNDKHYSLPFNKGTYLLFYNEDLLKKYNVKVPNNWNELKEASKKLTVDTNGDGKNDIYGLGLNSSVGIDSSFWVEQAGGHLIDEANDKLLFNSKEGAEAFDFLSELVKSGNAKISTEEKYMTGAFSRGEAAMGISSISALPDIIKACKGNNINFKTAVLPEGKKKAALFSGTDVAIFNTPSPEEKLAAFEYLKFFMEKESQTKWATKSGYLPLRKSVIDSKEFKDYVEKENPAKGEAVKEFDYGYCDPKVLNGYAIHDNMAKALDQIIAGKKDSKQALSDAEKKARQELDEAKKAFGK

SEQ ID NO: 52294 - protein, 638 aa, Clostridium botulinum
MNNSQYYIRVSTACPVTNVADIDFNIDNIKKCIDICIEKKSKLIVFPELCITSYTCGELFSQSLLISKALDGIHNICKYSIDKDVLIAIGSPLLYKNSLYNCAVVIFGGKILGIVPKSYLPNYSEFYEKRWFTEGYKIKSERINLPFQENIPFGVNLIFSDKIFKFAFEVCEDLWVTIPPSSYLALMGANIIGNLSASNEIVSKSDYRRNLVASQSGRCLASYVYSSSGVYESSTDLVFSGHLLIGENGSILKENKRFQRENEVITSIIDIDKINSERLKNVSFTDNSMNMNLELEEITFQFAINDVGDFDRPIDRYPFVPSNEEKRAVRCKEIFNIQTSALAKRLDHTNMKKAVIGISGGLDSTLALLVIAKTFDKLNIPRENIITITMPGFGTTDRTYNNAVSLCKHLNTTLKEINIVDAALQHFKDIGHDKDIHDVTYENVQARERTQILMDIANKEGGLVIGTGDLSELALGWCTYNGDHMSMYSVNCSIPKTLVRYLVRYVAENEVAKEISEILIDILDTPVSPELLPKDKEGNIVQKTEDIVGPYELHDFFLYYFIRQGATPDKIKQLAKIAFKDSYDKETIDKWFSYFIRRFFTQQFKRSAVPDGPKVGTISLSPRGDWRMPSDASFNLWK

SEQ ID NO: 52295 - protein, 563 aa, Clostridium botulinum
MDYKNLVAERIKENTELEVDLIEKLIEIPPKKEMGDYAFPCFQLAKTFRKAPNLIAEELKEKINKEGFEKVVTVGPYLNFFVDKTILIKDVLEKVLSEKEKYGSSKVGEGKNVVVEYSSPNIAKPFHIGHLFTTAIGNALYKILSFEGYNCIGINHLGDWGTQFGKLISAYRRWVDEEALEKDAIGELLRIYVKFHGEAEKDPELEKEARLNFKRLEEGSEEETELWNRFKDLSLKEFNKVYDMLGIKFDSLAGESFYSDKMDAVVQEIDDKGLLVDSNGAKVVMLDEYNMPPCMIKKSDGATIYATRDLAAAIYRKKTYDFHKCIYVVGTPQALHFKQVFTTLKLMGHDWADDCKHVGFGLVKLANKKLSTRNGDVVFLEDLLNQSVEETLKIINEKNPNLKNKGDVAKKLGIGAVVFTYLKNNRERDIVFDWKEILSFDGETGPYVEYSYARGKSILRKAGELTGEADYSKLSSKEEFELAKLLGGFNDAIMNAIDKLEPAMVTRYVIEVAKAFNKFYNAHGILNAEDNDVKLARVKLVEATCQVIKNALNLLGIDVVEEM

SEQ ID NO: 52296 - protein, 200 aa, Clostridium botulinum
MTFVMGWEEFYMSSASLTAIVREKSGKKCRKEGFAPGIIYGAEMKESIKVKFEVPSLLRYLNKAGINSRLWLNIGNKKEYVLIKEIQKEPTTGEILNIDMQAVSHDEVIKNSIPVKFEGKEQLEHKGFLLEEFTPYIEVAGKVGILPEIIVVSVGENEPGDNIKVSDIKLDEDIKLYTDPEELLATVSYNGKGTVEETVS

SEQ ID NO: 52297 - protein, 531 aa, Clostridium botulinum
MKTISKKSMLLVFTMLIAISFLFTGCKGGKKEAEATNANNKSEKKDVNIKLEGGDWGEPNPYKTYPRGPGMSKTNLIYDSLIEKDEKRIIPWLAEKWEVKSNGKEYLFKIREGVKWQDGKDFTPEDVKFTFDYYKKHPPVSKNIYIGKKCFIDKVEVLKDNYIKITVNTVNAASLENLGTTRIIPKHIWEKVEDPKKFDGKEAFIGCGPYMLEDYNKERGSYKFTAFEDYWGPKQNVKTIEFIPVSDSILAFEKGDIDLVGSVKPDIAKKYENNKEYKLIKGHNFFGYRLCLNMNKNPEFKDKNVRQAIAYAIDEKEIIDKVMRGIGTEGSAAYLPKEHIWYNKDIKKYDYNVEKAKELLKGKNITFQIIVSNKKDNLRMAELLKLQLEKTGMKVNVKSIDMKSRDAAVKSRDYEAIITEHGGWGKDADVLRELYKSNNDKNGGSVINGIPGYKNEEIDKLCIKQMQEMDPDKRKEIVFQLQEKIAEEIPMIPIINTSSISVHKTDKYDGYMNMYDHFVVSHSKLTYLQRK

SEQ ID NO: 52298 - protein, 385 aa, Clostridium botulinum
MERKKLLIIFRYIAILFLIFGIASFEKENITTNAVILILLFIINNQIRFFVLNKNKNLVLISIILECILAYIGYINYSGILFFYFFTDILDSALFLKDGISYLACSIILIIVVFLGWNLNLSEILSIVTSFIMLFILATYIKEENSGKLRAQKLYDKLRISEEKLKKANKDLESYANSIEELTVLRERNRISREIHDSVGHSLSTMIIQLGAIEKIAEKDKKLTSEMARNLGEFAKNSLAEVRCAVRALKPREFEKYEGILAVEELTKNFEKLTGVKVKLGFSKEKWTLNSDQCFVLYRVVQEFLSNSLKHGKATRVDIFMGFNEENLIITLKDNGQGADKIEKGVGLKSIWERVNELGGTVAYNSKKEEGFLLKVVLYPKINET

SEQ ID NO: 52299 - protein, 358 aa, Clostridium botulinum
MKINLLEEYIERRRCNFMKYYSNKNILIIGGTGTIGKGLVKEIIKQNPKVIRILSRDEYKQFIMENEIDSRLRRKFRFLIGDVRDYDRVERAMKGIDIVFNLAAMKHVPSCEYNPTEAIKTNINGMENVIKAAIFNNVECVLFTSSDKAINPTNSYGATKLLAEKLVQAANYSKGPVKTKFVAVRFGNVMGSRGSVIPLFKKQILEKGKITVTEPNMSRFMMTLKDAVNLVMKSCEISKGGELFVLKMPIIKLKDLSEVIIEEVCKKNNLDKDKIETKIIGFRAGERIYEELMTLQESHHAKDLGNMYVVFPTGYYNDWYESYYNKYEDCKIGNYSSHNIGPISKEEVRKVLINEKLI

SEQ ID NO: 52300 - protein, 602 aa, Clostridium botulinum
MSIKKERIKVYDMTCTSCENRVEKAIKKLEGVLHAKASYMGEFVEIEYDDKLCNQNKIKSAIKNAGYSTQSSNDYNFMGVLIIAAVIILLGLKTSGFDMEEKLTNASYIVLFVVGVLTSIHCVGMCGGIMLSQSLSSESNNKFEAMKPAVLYNLGRVLSYTLLGGIVGTLGSVFSLSITTKAALQIFAGLFMIMMGFNMAGFNIFRKFHIKLPHFACTVKNKSGSPFIVGLLNGFMPCGPLQTMQLFALGTGSGVQGSLSMFMFSLGTVPLMLTFGALSGLLSKGHTKKLLKFSGVLIIVLGLIMGNRGLTLAGININPITALASNTKSSDDFSNTNVAKATLENGVQVIKMTANNNGYTPNAFYVQKGIPVKWIINGEQLNSCNNSIIAQSIMEKEFKIKKGENIINFTPGDKDINFSCWMGMISGVIKVVDNLDAVDTSKTDPSLPPASTGPSCCAVPVDESDQSEQSSIYGNNMALVPTEKLINKALPSGEYQSATFKGIGSELQPLIAVTGNGSKTKLTFNLNDFDNAEGKYIILDLETRNDIFSFTAKKGVNEVEFSPKKAGSYGILKDNVILGIIEVVDDLESADMEKIREKHVDE

SEQ ID NO: 52301 - protein, 476 aa, Clostridium botulinum
MDFEAVIGLEVHAELSTNTKIYCGCTTEFGGQPNTHVCPICLGLPGSLPQLNKRVVEYGIKAGLALNCSINKVCRMDRKNYFYPDCPKNYQITQDEVPICRDGYIEIELENGEKKKIGIERIHMEEDAGKLLHTNAGTLVDYNRAGVPLIEIVSRPDIRTPEEATKYLEKLKSILSSIEVSDCKMEQGSLRCDGNISVMPKGSEKFGVRSEIKNMNSFKALEKALSYEYDRHVEAVTKGEILEQETRRWDEANSVTVLMRSKEKANDYRYFPEGDLVTLNISDEWIEEVRKTIPELPHEKAERFVNEFGIPKYDAMVLTLTMDMAKFFEETALKSEDAKAASNWLMGDISRLMNEKAIEVKDLKFNPEQLAQLIKLINAGTISNNIGKKVLDDMFKSGKNPKDIVEEKGLVQNNDEGAILEVVKNIIENNPQSIEDFKNGKKRALGFLVGLVMKETKGKANPQIVNKLVSEEANKM

SEQ ID NO: 52302 - protein, 213 aa, Clostridium botulinum
MLQDMLFKALKETLYMVSISTILSISLGFIPSIILIITDEKGLKPNKVIYKSLDFVVNLLRSFPFIILMVAILPFTKAIVGKTIGTTAAIVPLTIAAIPFATRVLESAMKEVDEGVIEAAKSLGASDIQIIFKVIIKESMPSMIVAITLTIISVVAYSAMAGAIGGGGLGDVAIKYGYYRFKTDIMIYTVVILIILVQVIQSLGNILYKRLDK

SEQ ID NO: 52303 - protein, 315 aa, Clostridium botulinum
MNEFLKKYPVPIVGLMLGLAAAGNLVQSYGEIYRSIFGIISAILLILMIVKIVKYPKGVAESLDNPVVASVFPTLSMGIMLLSTYCTPYAASFAYIMWIIGIALHIILILWFTKKFVFNFKIKQVFPSWFIVYVGIVVTSVTAPVYKMANAGKAAFWFGFVTYLILLPIVIYRVLKVKGMPEQTLPTIAIFAAPASLLLAGYMKSFQAKNMTMVWFLMVLSIIMYIAVIIMLFKLLKLKFYPSYSGFTFPLVISGISIKLTNGFLTKSGQAIPLLKYLVKLQEVVAVIITLYVLIRYIQFLLPEKHDCISINKAN

SEQ ID NO: 52304 - protein, 251 aa, Clostridium botulinum
MKNFPLNIAHRGASSLAPENTLESFKKAIELRCDGIELDIHMTRDNQLIVIHDEFLDRTTNGTGSVRNLTLNEIKKLDAGSHFSNKFKYSKIPTFKEALDLIVPSNILLDVEIKQWAPEIEKNVITMIQNYNYEKKTIITSFNPMSVLKCKEISKDIKTGLLVFFLQTNPLDMKKKLKIDYLCMDVNYIKLLSQNNIDTLKKNNLKILTFTVDRKDDMSYMIKHKVNGIITNKPQLLNSFKYNPFNFIKFK

SEQ ID NO: 52305 - protein, 686 aa, Clostridium botulinum
MLNYVIIFRGISIMFTKENLKKLSFKKKIVITSLLIFLISMSLLTGFTFKMVSSKFKNQVREDGLNLANQVSYQITSSQKATKEIDKVLADKVLSISKMVIENKNISNEYLTSVAVKCNIQEINITDKNGKIIYSNMPENINYVYPLDYSGQDILKGKKDEIIEEIRQNKVNHNYYKYCALAMPNGGLIQTGINANEIHNINKSVDPQIILEKLTKDSNIKFALVMDNKLKVTHHSDKKRIGKILTDTGSKTAIDTGKNYTSTYDYEGEKVYDIIMPLKDESGKLLGSMDIGVSLATQETALRNILITSILISLITFVLAGLVILYIIKLSLKPLDNLSSIAQKVSKGDLTEKVEIVNEDEIGKLSKIFNTMIDSLREITRNINNFSIQLAGSSQEILSSAEQTSAVSEEISSATEEIASGAENQVKASNESSLLMNDVMGNMYTLKEEFDEIISFSNNTNTLASKGQENMSNMVQQMATIKNSVVNSSNIMYDLQKNSEEIGNIVEIINTIADQTNLLALNASIEAARAGEAGKGFAVVADEVRKLAEESINSANNIKNLIMNTQDKTKTALNSIKDGASQSEKGESIVAEVKESLGEILNSFSNVNHKFASVDSMITASNDSITAMASKLYDIETISNTASANTEEVAASTEEQSATIEEITESIEKLVSMVENLKESVSIFKL

SEQ ID NO: 52306 - protein, 122 aa, Clostridium botulinum
MKPMFKKNDRSQSRTRRHMRVRKKIFGTAERPRLSVYRSEKHIYAQLIDDVEGKTLVAASSSEKGFDGVGSNKEGAKLVGKMVAEKALEKGLKKVVFDRGGFIYHGRIKELAEGAREAGLDF

SEQ ID NO: 52307 - protein, 325 aa, Clostridium botulinum
MQNPNFWNDIKEAQKITSEEKYLKDKLTKYNHLRNTIEDIISLCEMLSEEDDDMKKEIISEYKNIKEETDRFKIETLLSGEYDRNNVIMTLHSEVGGTDAQDWTDMLFRMYTRWAEKEGFAVKIMDLLEAEDAGIKSVTLKITGEFVYGYLKSEKGIHRLVRISPFNANGKRQTSFASIEVLPELTDDQEIEIRSEDLKIDTYRAGGAGGQHVNKTESAVRITHMPTGIIVQCQNERSQHTNKETAMKVLKSKLVELKERSHKEKIEDLTGELKDMGWGSQIRSYVFHPYNLVKDHRTGAETSNVDSVMNGDINIFITQYLKGNF

SEQ ID NO: 52308 - protein, 324 aa, Clostridium botulinum
MKVIYQRTTKFNIKFVLFLYVERGILMKVKKAIIPAAGLGTRFLPATKAQPKEMLPIVDKPTIQYIIEEAVKSGIEQILIITGRNKRAIEDHFDKSVELEKELEEKGKAEMLSMVKDISNMAEIYYIRQKEPKGLGHAISCAKTFVGNEPFAVMLGDDVVYSDKPCLKQLIKCYNEYQTTIVGVQEVPEEDVHKYGIVKGMFIEDRIYKIKDLVEKPPKEEAPSNMAILGRYIISPAIFDILENTKPGKGGEIQLTDALRTLINKEAMYAYNFEGRRYDVGDKLGFLQATVEYALRREKLNTNFVKYLQQLKNNEEFTALFKTE

SEQ ID NO: 52309 - protein, 156 aa, Clostridium botulinum
MNNAYCYETQIGKIVIVENGTSITQLCFGEDIPKDVTILETDLLKEANKELEEYFRGKREKFDLSFDPQGTEFQKKVWKALQEIPYGKTYSYKNVAVNIGNEKACRAVGMANNKNPIPIFIPCHRVIGANGSLVGYAGGLDVKEKLLKIEKENSKG

SEQ ID NO: 52310 - protein, 722 aa, Clostridium botulinum
MNRFKNIIKVYKRDIKSLNKNFIAIIIILGVCVLPSLYAWVNIKACWDPYENTSTVPIAVINNDKGTDFGGKELNVGNEMVKKLKSNDKIGWKFTNKKEADMGVIDGTYYASIEIPKDFSADIVSVLSDNPKHPEIIYKVDTKENPVAAKITGMAKNTLINEITTTFITTVNKTVFSSINEIGRNLEKNKNEIIKLKESIISMNRNMDLILAGLESVNTNSKNLNEYLSVVRTTFPEITKGLENINSKSSNTNETINQTNNIFNNSLNNINVILKQAISTNNRVQSVLDNLIVLNNESSSNEANSSIANLIMDIDSANKNIDSMVEFLEKINNTKPNTEVSKFIVSLNNVKGALNEEKQKLLKIQEIASNSSKVNENSINELKRNISNTNKQIESVMNVFNSNTRQELSTIINNFKNSIQDASKLIKAGNGLNTQIENLLATSTKGADLSAKLSKELIDKLTEYKGIIGQLSKKLELVSNDDLIQIISVLQNNPMLMSQTAAYPFNIKEEAVYTIPNYGSAMTPVYSVLALWVGTLILVSLLKTEVVDFEGSENITIRQKYFGKMLTFITLAAMQGFIVAVGNKAILGVYTVSFPLMLAFSVVSSIVFAIITYTLVAIFGKFGNAIAIVFMILQLAGSGGTYPIQVDPLIFRILQPFFPFTYSIGGFREAIGGPLVSSVILDFIMLILMGGIFVLIGFFLKSPLHHKISKFDEDFKASGISE

SEQ ID NO: 52311 - protein, 228 aa, Clostridium botulinum
MKAMYIRKEGVSLFTGIVEEVGRILKIEEGKDFLHITIEGSKVLNPLNLGESVAVNGVCLTVTSFNSNSFTADVMTETLNKSSLGTLSKGSLVNLERAVTLNKPLGGHIVSGHIDGTGEIINMKKEGIATLLEIKAKENLLKYMIPKGSVALDGVSLTLVDIKEKSFTVSLIPHTKEETILVNKNIGDIINIECDVLGKYIYKFMHFKKEEALKNNISLDFLSKTGFL

SEQ ID NO: 52312 - protein, 329 aa, Clostridium botulinum
MLILTAEDIKKVFTMRDAIEADKEAFRLYSTNKAEVPLRTNINIPKYNGTSLFMPGYVEELDTAGIKIVSVFPENVKLGKPAVPAKMILLDGKTGEVSAIMDGTYLTQLRTGASAGAATDILAKEDAKIGALIGTGGQALCQLEALLAARNLEIVKVYSRNFEKVKAFVEEAKKNLSKYGTEIIGVNSSDEAIENADVITVVTTATSPVFDGRKVKEGAHINGVGSYMKHMQEIDEYIISRADKIYLDSKEAVLSEAGDFIIPLQKGIIKKDKITGELGQVISKAIDGRTTENEITLFKSVGISVQDVVTAYKIYEKALENKVGKEIEI

SEQ ID NO: 52313 - protein, 236 aa, Clostridium botulinum
MEERLQKYMASCGVASRRKCEDIILEGRVEVNGIKIKELGTKIISGKDIIKVDGNIIEPEENKIYILLNKPKGYVCTAKDEKDRKTILDLVKVKERIYPIGRLDMDTSGIIILTNDGEIYNKIIHPKFEKIKTYKAKVKGTIKKDHIELFKKGIDIGDYLTAPATLEILKINKDTSEIIIKIHEGKNRQVRRMCKSIGHAVIDLDRISIGNITKSDLKLGEWRYLTNKEIDYITKI

SEQ ID NO: 52314 - protein, 429 aa, Clostridium botulinum
MSKLDEKKQLKCSFCGKTQDQVRRLIAGPGVYICDECIELCSEIINDEFEDDIQVDLTSLPKPTEIKTYLDQYVIGQEDAKKSLSVAVYNHYKRINSNTNNDDVELQKSNILLLGPTGSGKTLLAQTLAKFLNVPFAIADATTLTEAGYVGEDVENILLKLIQNADYDIEKAEKGIVYIDEIDKIARKSENPSITRDVSGEGVQQALLKILEGTVAAVPPQGGRKHPHQEFIQINTTNILFICGGAFDGVDKIIERRTRTSSLGFGAEIQSKKEKDLGKLLKDIMPGDLLKFGLIPEFIGRLPIVVTLDKLDREALIKILTEPKNALVKQYKKLFELDDVELEFNQEALKEIADEAINRNTGARGLRAIIEDMMREIMFDIPSQENIGKVIVNEDCIKTKKPELIEAEGGKRLPIKPKKGKKRKDSETA

SEQ ID NO: 52315 - protein, 72 aa, Clostridium botulinum
MSKDDVIEMQGTVLESLPNAMFEVELESGHKIIAHISGKLRMNFIRILPGDKVTVELSPYDLTRGRITWRAK

SEQ ID NO: 52316 - protein, 72 aa, Clostridium botulinum
  MISC_FEATURE (19)..(19): X=any amino acid
MLSAFIQSQHSYPAVPLAXQLVHQRLVHPGPLVLRTAPLKFPTPATDRDRTVSRRSEPSSRAALMGEQPNPW

SEQ ID NO: 52317 - protein, 311 aa, Clostridium botulinum
MSKDIGKRLIILLSIGVTILVITYAYIYTKPNAYEVLVNNNPVAYVKNKEDFNKIYKEVENNIKKRFNLDMRNNINFENIKVKGDILTSNDFIKKSILENSNIKVTAFKVKFQDEFIGILSNKKEIQDLSKIISKKYSVNIINHIKIKEETISVEEINTIDELAINISKSQKLQNFMNSKRLSRGDINEEIALAMPTNGCITSKFGKRWGKFHKGLDIGAPNGTDIYSSLDGKVIYSGWEEGYGKVIKIQHSSELITIYAHCSNLYVKVGQYVKKGEKIGEVGSTGRSTGPHVHFELRKNNEPCNPLTYIK

SEQ ID NO: 52318 - protein, 319 aa, Clostridium botulinum
MITHGKGIKIFSGNSHPKLAQDIASILGTTVGDSQVGTFSDGEISVNINETVRGTDLFIVQSTNEPVNDNLMELLIMIDAFKRASAGRITAVVPYYGYARQDRKAKARDPITAKLVADLLTAAGADRVLTMDLHASQIQGYFNIPLDHLLGSPILAKYFVQKGFADRNDIVVVSPDLGSVTRARKFADKLQCPIAIIDKRRPKANVSEVMNIIGDIKDKTVILVDDMIDTAGTITNGANALIEMGAKEVYACCTHAVLSGPAIERIEKSVIKELVMLNTIDLPEEKNLDKFKVLSVAPVFAEAIKRIYEDTSVSKIFED

SEQ ID NO: 52319 - protein, 453 aa, Clostridium botulinum
MMNYMGRMFGTDGVRGIANKELTADLAYKLGKAGAFILTEGTHRSKILVGMDTRISGDMLESALVAGILSVGAEAICVGVIPTPAIAYLTRKYNADAGVVISASHNPVEYNGIKFFNKNGYKLSDELEDSIQALIRDDFKDVPVLTGENIGRKIEEDGEAIRDYIDFAKSTIKGDLKGLKVALDCANGASYITSVEAFKELGAEVHVINNKPDGININRNSGSTHPEDLMEYVVKNNCHMGLAFDGDADRCLAIDEKGNLINGDFILAICGKELKKQGRLKKNTIVVTVMSNLGLDIAMKKEEINTIKTKVGDRYVLEEMLKNDYAIGGEQSGHIIFSDYNTTGDGLVTALQLAHIVKESGKTFSELCSIMKELPQVLVNAKVPNDQKDIYLKDEEIKSEIDTITKNLDGSGRVLIRPSGTEPLVRVMLEGENQKEIDKLAHGLAKLIENKVK

SEQ ID NO: 52320 - protein, 513 aa, Clostridium botulinum
MRWKNMSQNSRTTKKLTLIPLILMIFTSVFGFANMPRSFYLMGYGAIPWYILSGVTFFIPYAFMMAEYGAAFKDEKGGIYSWMEKSVGAKYAFVGTFMWYASYIIWMVNICSTLWIPISNAIFGKDTTSTWAFLGLNSTQVLGVLGIIWIILVTFTASKGLEKITKVTSIGGTAVALLNIVLLVSAIIILIANGGQLAEPITSVKSIVQSPNPAYQNPISVLAFIVFAIFGYGGIEVVGGLVDQTENAEVTFPKGITIAAIIIAVGYSIGIFLCGIVTNWDSVLASKDVNIGNIAYALMHNLGYQLGHSFGISEASSILMGDWIARFVGFSMFLALTGAFFTLSYAPLKQLIEGTPNKLWPGKMAKIENGMPLNAMRVQCIIVMVFIALVSFGGDAAAKFFGKLILMTNVAMTIPYMFLSSAFISFKKKTEIKKPFEVYKTRKSTVIAAVVVTFTIAFANFFTIIEPATKGNISDTIFSIIGPIFFSIVAILMYNSYEKKYVIKSEKGKTKNL

SEQ ID NO: 52321 - protein, 648 aa, Clostridium botulinum
MKILSNMDFLPISKEDLKKRNIDVLDFIIVTGDAYVDHPSFGTAIIGRVLEREGFTVGIIAQPNWNNIEDFKKLGKPKYGFLVNSGNIDSMVNHYTASKKKRHDDFYSPGGKSGYRPDRAVIVYCNKIKEAFKDSPIIIGGIEASLRRFAHYDYWDNSVRRSILEDSSADLLIYGMGEKPIVQVSNLLRYGMKIDSIKNVRGTTYIEKDISSLKDYIEIPSFEEVSTNKKSYAEAYKIQYYEQDSIRGKTLVQKHKERYVVQNPPQPPLSQEEMDEVYALPYARTYHPMYEAEGGIPAIKEVKFSITSHRGCYGSCSFCALTFHQGRVIQNRSQDSILKEANMMTNMKDFKGYIHDVGGPTANFRHRACKVQEKHGTCKNKQCVFPKACKNLIVDHKEYLSLLRKIRKIPNVKKVFIRSGIRFDYLMYDKNDEFFKELCEHHISGQLKVAPEHISDKVLNLMGKPTRNVYDSFVKKYYDINKKIHKNQFLVPYLMSSHPGSDLKAAIELAQYIKKMGYTPEQVQDFYPTPGSLSTTMYYTGINPLTEEKVYIPKDQKEKRMQRALLQFSIHDNYDLVKEALIKAHREDLIGNGPDCLIPYNKPYKKSHKKNNAKNNNNHYNKNNNYNKNKDISKKNKKNSLSKHKKRK

SEQ ID NO: 52322 - protein, 200 aa, Clostridium botulinum
MLIIFFGEGQNMWTEEQIDTYLKENLKEDRYNHVISVKETAVKLAEKYSVDVYKAKIAALCHDCAKNMSDNELLNMIKEHNINLDWISLKNLQITHGLVATIIMREKMGIEDIDILNAVKYHTTGRNNMSMLEKIIYLADIIEPLRGFNGVERLRKLALIDIDKAMIESLNSTIQYVVSKGELLHIDTVIARNCLVNDKL

SEQ ID NO: 52323 - protein, 111 aa, Clostridium botulinum
MEAKAIVRYVRMSPSKIGVVLDLVRGKDVNEAFAILKYTPKDAAEVIYKALKSAVANAENNLNLDVNSLYISEVHVGQGPTLKRYQPHAQGRAFRIRKRTSHLTLVVKERV

SEQ ID NO: 52324 - protein, 527 aa, Clostridium botulinum
KSFVQREKGIADLWKDRGVIEKSFNLNEDGEYFTFYDGPPTANGKPHVGHILTRVMKDLIPRYKVMKGYKVLRKAGWDTHGLPVELEIEKKLGISGKPQIEEYGIEKFVTECKDSVFKYTSLWKQMSEQLGFWVDMDDPYITYDNNYIESVWWALKQMWKKELLYKGHRVTPYCPRCGTALSSHEVAQGYKDVKEATAFVKFKIKGKENKYFLAWTTTPWTLPSNVTLAINKSYDYVEILNNDEHYILAKELLGKVIEGEYEVVKEFKGEEIVGVEYEQLFKFEVPEKKAFYVVHADYVTLTDGTGIVHTAPAYGDDDSKTGKKYDLPLINLVDSEGKFVDSVEPWKGMFVKKADPKILEYLKENGMLYKSEKFTHSYPHCWRCNTPLLYYPKDSWFVRMTSLRDDLVKNNNTINWYPDNIRTGRFGKFVENVIDWGISRDRYWGTPLPIWECDCGHRECIGSVEELKEKGINVPENIELHKPYIDAVKLNCPHCGKEMTRTNEVIDCWFDSGSMPFAQHHYPFENK

SEQ ID NO: 52325 - protein, 180 aa, Clostridium botulinum
MNMEKLFIQKRNCKNSNKVRRDGKVPGIIYGKNLNNLMFEVGEIELNNMISQVGEHGVTDINYEGTDYKVLIKEVQKDPVKKNVIHIDLENVTNSSNLINAEIPILFSGDDLIMKKGGIVQKEKNSVKVRCPEEKLPNNIMVDLSQYDIGKTFRISDLELGEDITFMENLDSTIVSIFFG

SEQ ID NO: 52326 - protein, 238 aa, Clostridium botulinum
MLREKGSLSMSKNSVIIVAAGKGKRMNSSISKQFLQIKNKPILYYTLSKFSTHESIDEIVLVTLEDKIEVCSDIIDKYNINKVSKIVPGGKERQDSVYNGLKGVSKDCEVVLIHDAARPFVTSDIIENGIRYTNQYGAAACGVIPKDTIKIKNEKGFAIDTPNREDLFIVQTPQCFNYNIILSCHEKLKKHNKKVTDDTMVLENYGKSVYLYEGSYSNIKITTPEDLILGEQILEKLT

SEQ ID NO: 52327 - protein, 197 aa, Clostridium botulinum
MFIMNLANKLTILRIFLVPIFLIFISVKNIPYGTVIATAVFVIASATDKLDGYIARSRNQVTRFGKIMDPLADKMLVTAALISLVDFQIVPGWACIIIIAREFAVTGLRSVASAEGVVIAASKWGKAKTVIQIVAIIFALVNLNYKEGIYILGNWAVNYINIIANITNITMALAIIITIVSGVDYFVKNKDVMSHDK

SEQ ID NO: 52328 - protein, 903 aa, Clostridium botulinum
MKNNNLKSFIIFIIIFQLLQEEERENNIYNLINLSNLNKRERLIKEEKENQVSKEHNQLKNEKSKRLPIVNVELRNEKSKQIYKEHNELKEEKNKEVSNESIQLKNEKSKQLPKINVELKEEKSKQIIKEHNESENKKNKQIPKVNIELRNEKSKHIIKEHNELKKEKDKYVSNESIELKNEKSKQLPKINVELKEEKSKQIIKEHNELKNEKSKSIPKESIKLKEEKDKQVFKEHNESENEENKQISKVNVELKNERSKQLPKINVELKEEKNKQSIKEHNELREETKKKLPKVNIELKEETKKQVPNKSLELDEEKDKQVFKEHNELRNEKSKQIIEEHNESKDEKSKQVSKGNIELKKEKSKQIIKEHNESKNEKNKQIPKVNVELRNEKSKQIFSEHNELNKEKDKYVSNESIESKDGKSKQISNRNTQLKNEKNKQTSKVNIELRNEKSKQIIKEHNELKEEKKKQPPKVNIELNKEKVKQVFNESIKSKNEKSKQVLNRNTQLKNEKSKQLPKINVELKEEKNKQIIKEHNELEKGKGKQPDKVNIELNKEKVKQVFNESIESKNEKSKQVVNRNTQLKNEKSKQLPKINVELKEEKSKQISKEHNELRKEKRKKIPKANVELKEEKSKQIIKEHNELKNEKSKQTPKVNVELNKEKAKHVFNESIKSKNEKSKQISKENTNIELNEEKKKQVIKEDIQLKNKIIKKSHTKKEHKKIRKNIISKVPIVIASFETEITDSVFTKIESTFVDIKEVKNNIFIEEANLIKLNSNKAKLFINGYIRSYIGYITLDKINKSSIETKNQGIISHKDFSKAINIDLLFFDNMKEGEAFFVDFNNDIKDKKALLGKIERLDIKSSNIYKDVQDVHLGREKSYLMLQQNLFIRAKIDVLQKNIISL

SEQ ID NO: 52329 - protein, 198 aa, Clostridium botulinum
MTLFMVLSVFIGALCGYFFIPESFIPNIEFISTIALNLLILFVGIDVGSNKNLIKDLKRNGLKVLLIPLSIIIGSLTGGIITAIFFKLSIKSALSIAAGFGWYSLSAVMLTSLESAKIGTIAFLTNVFREIIAVITIPFLAKKLNHFTAIAPAGATSMDTTLPIISKNTSPEVAIASFINGVILSSLVPMLISFIYTM

SEQ ID NO: 52330 - protein, 75 aa, Clostridium botulinum
MIKVYTAEGCPWCTKAKTYLKTKGIAFQELNIEKDEKARDEMVQKSSQRGVPVLDIDGSIIIGFNKPAIDEAINL

SEQ ID NO: 52331 - protein, 251 aa, Clostridium botulinum
MARVILNGSNGKMGKVICNLAENYSNLEIVAGIDKGEATSSFPVFTDINKCNIEADVILDFSRPDALNDLLNFATSKNMPIIICTTGFSENQIKLIEETAKKIPVFRSANMSIGINIVNNILKNISAFMYKNFDIEIIEKHHNQKVDAPSGTAILLGDTIRDSIKEDTKYTYGREGSSKRTHDEIGMHAIRGGTIVGEHDVIFAGSGETIEIKHTALSREVFAVGALNACLFMSGKEAGLYNMDNVIQAAL

SEQ ID NO: 52332 - protein, 940 aa, Clostridium botulinum
MKDKIIIKGAKVNNLKNINLQLPRDKYIVFTGLSGSGKSSLAFDTLYAEGQRRYVESLSAYARQFLGQMDKPEVDYIEGLSPAISIDQKTTNRNPRSTVGTVTEIYDYLRLLYAKIGKPHCPKCGKEITQQTVDQMVDKIMTMEERTKIQVLSPIINGRKGEHIKTIENIIKSGYVRARIDGNIVDLEEEEIKLEKNKKHTIEAVVDRLVVKEGIESRLADSMETALKLSEGIVIINVVGQEDMLFSEKFACVDCNISIGEIAPRMFSFNSPYGKCDKCDGLGTLMEIDEDLVIPNKSKSIVEGAIIPLGSGSLKEDSWTFSILKALSKEYKFDLNTPIEKLDPKIVKIILYGLDGKRIKVNYKKENRIMELNHAYEGVINNLRRRYIETNSDYIKRDIERYMSDNPCPKCKGARLHDEALSVTVADKNIFEFCNMSIKKELDFIESLELSKKEEIISNQILKEIRSRLKFLIDVGLDYLTLSRNASTLSGGESQRIRLATQIGSSLVGVLYILDEPSIGLHQRDNDRLIKTLKNLRDLGNTLVVVEHDEDTIREADYIVDIGPGAGEHGGEVVAAGTLEDIMNTEKSITGQYIKGVRTISVPKERRKCEGNYISIKGARENNLKNVSAKFPIGLFTCVTGVSGSGKSTLVNEILYKGIHKKLNNSKDNPGKHKEITGIENVDKVINIDQSPIGRTPRSNPATYTGVFDIIREVFSNTQEAKMRGYKPGRFSFNVKGGRCEACTGDGIIKIEMQFLSDVYVPCEVCKGKRYNRETLEVKYKGKNISDVLNMTVEEALDFFENIPRIKSKLQTLMDVGLSYIRLGQSSTQLSGGEAQRIKLAYELSKRSTGKTLYILDEPTTGLHMEDVNKLISILQRLTNSGNTVVVIEHNLDVIKNADYLIDLGPEGGEKGGTIIAEGTPEKISRASNSYTGQYLKKML

SEQ ID NO: 52333 - protein, 209 aa, Clostridium botulinum
MSKVTQIAHPLILHKLALIRDKNTGSKDFRELVEEVAMLMAYEVTRDLQLKEVEIETPICKTKCKMLSGKKVAIVPILRAGLGMVGGMTSLIPAAKVGHIGLYRDEETLKPVEYFCKLPQDIGDRDVIVTDPMLATGGSAKDAITLLKQKGAKHIRLMCLVAAPEGIKEVMDEHPDVDIYVASVDEKLNEKGYVVPGLGDAGDRLYGTK

SEQ ID NO: 52334 - protein, 418 aa, Clostridium botulinum
MDKIVVNGGSQLKGDVNISTAKNSVLPIIAGSILSGNKCVIDNAPMLEDVFVIGEILKSISAKVNIDEVNNRVIIDSKPVDNLEPDSDLVKKMRASFLLMGPMMSRFGRFKISLPGGCNIGTRPIDLHLKGFTALGAKVNIGHGYVEAVADKLIGNKIYLDFPSVGATENIMMASVMAEGETVIENAAEEPEIEDLGRFLNSIGANIIGAGTDTVRIIGVNELKGTTHRPIYDRIEAGTFMIAAAITKSRIKINGVIEEHLKPIIAKLTEMGVDIKIKGETAIVDGRKILNPVDIKTMPYPGFPTDMQAQMMALLATIKGTSIITETIFENRFMHVSEMKRMGADVKIDGRSAVIEGVNKLTGTEVKATDLRAGAALILCALAAEGKTEITDVYHIDRGYVKIEEKLNKLGANIRRVH

SEQ ID NO: 52335 - protein, 813 aa, Clostridium botulinum
MGNYSTKIDEKWQKKWEENSLYKFNNKNLDKKLYVLEMFSYPSGSKLHAGHWFNYGPVDSWARFKRMQGYNVFQPMGFDAFGLPAENYAIKTGIHPKDSTFKNIETMETQLKAMGAMFNWENEVITCSPDYYKWTQWLFLKLYEKGLAYKKKAPVNWCPSCNTVLANEQVLDGKCERCDSNVDKKNLEQWFLKITDYADELLEKLDELDWPEKTKAMQKHWIGKSVGAEVTFNVADSDLSFNVFTTRVDTLFGVTYVVLAPENDLVDKLTTPENKAEVESYKTQAKNQSDIERQSITREKTGVFSGSYAINPINGKKVPIWIGDYVLNTYGTGCVMAVPAHDERDFAFATKYNLPIERVIEGGDSLPYTEYGGMVNSGEFDGLLGNEAKEAVISKLESMNLGRKKINYRLRDWLVSRQRYWGAPIPIIYCEKCGTVEVPIEQLPVELPYNVEFSPDGKSPLGKCDDFINTTCPKCGGPAKREADTLDTFVCSSWYYLRYPDNNNEKDAFNPELINKMLPVDKYVGGPEHACMHLLYARFITKALRDMGYLNFDEPFLSLTHQGLILGPDGLKMSKSKGNTISPDDYIKEFGADVFRMYLMFGFDYTEGGAWSDDAIKSIGKFVDRVERILENAREEIKNSKDNKSTMDKDEKELNYVRHHSIKSITEDIDKMQFNTSIARLMEFTNALSKYLGIDAIKNALFLRESIIDFITLLAPFAPHFAEEQWKLIGINSSIFNEKWPEFDPKALIKDEVEIAVQVNGKIRAKINISTSSSEDEIKESALNNEDIKNSIGDKEIKKVIVIKNRLVNIVAK

SEQ ID NO: 52336 - protein, 59 aa, Clostridium botulinum
MAKVKITLVKSLIGRKKDQIATVNALGLKKIGNIVEHEETPQISGMIKKVSYLLKVEEA

SEQ ID NO: 52337 - protein, 408 aa, Clostridium botulinum
MKILFLTQYCPPEVGAPQNRIFEFAKQLKKFGHEVTILTAMPNYPKGEIFDGYKGKKIVKEELDGINIVRTSIYATKDKSFVKRLRNYLSFTFSSVFTGSKYIDNQDAIITESPPLFLGWSGYILSKRKKAKFIFNVSDLWPESAVKLDVLHNKFLIKASTWLEEFCYKKAAAVTGQTKGIVDNIVSRGFDKNKVHLITNGVDTEFFKKENRDESLREEWGLKDKFAVCYAGIHGLAQGLEVVINAAELLKEERDIQFVFIGDGPEKSELMTMVKEKKLTNVSFQPMQLKPNMPRIIASMDATVVPLKKLDLFKGALPSKMFEALASELPIVLAVEGEAEKLINEANAGITVEPENAKEVSQAVLKLYKNKDIKEKLGQNGRNYVIKNYSRESITRKLENILLKLKNS

SEQ ID NO: 52338 - protein, 296 aa, Clostridium botulinum
MKDKLVKAIAKDGQVRIIGAITTELVNEGVRLHNCAPTAAAALGRMLTAGALMGTTLKSEKDTLTLQIHGGGIAKGVVITSYADGHVKGYIGNPTADIEPNSKGKLDVSGIIGKNGNLLVIRDMGLKEPYIGQVPIYTGEIGEDLAYYYTVSEQTPSAVGLGVLVDKDLSIKSAGGFIIQMMPGADEMLADLISYRLEEIPSITEMISKGMTIEEILEYIFEDMDLKILESIVPEYRCDCSREKVERALASIGQKDLKEIYDEGKEEELKCHFCNKAYVFSHDEVGDILENYYSEK

SEQ ID NO: 52339 - protein, 357 aa, Clostridium botulinum
MANCKLIIEVMDKIKAIDTSPLKIMEVCGSHTEVIGRLGLRDILYPKVNLVSGPGCPVCVTDESYIDAALKLLNRENILITTFGDLMKVKGTTNSLMDEKPNHNNIKVIYSPLEALKIAKENKSLEVIFLAVGFETTIPLIALSIKQAKNEKIKNISFLLGLKTMKPILEHIFKDKNHNIDGVICPGHVASVKGANYFRFIRDAYNIPAVISGFEPLDILSSIYFIINSNIKNKKTFINLYKTCVKEDGNKIANELIDEVFCQNDSNWRGIGLIKNSGLDLKNIYSDYDALKKFNVKIEKHEKSTRCICGEVILGKKSPKECDLFSKECNPGHSKGPCMVSKEGACSIFYRYNKFKL

SEQ ID NO: 52340 - protein, 266 aa, Clostridium botulinum
MKNIKKISSIFIVFSLFTSILVGCANSKSTEAVKKEETKVESLVVFSGAGLKRPMEEIGKMFEKENNIKIEYIFAGSTQLISQMELGNKGDVFIVGSVKTYDIAKDKNLVNQYKKVAHHTPAIAVQKGNPKNIKSLEDMANPGMKIILGDEKANAIGITAQKIIKKNDLPNINKNVISKAATVNEIVAQLTTGKADAAIVTADSIFENKDVEAIQIPKDKNIDQIIPVCSLKNSKNKELAEKFVDLVASDKGKKIFAKHGFHPVEK

SEQ ID NO: 52341 - protein, 117 aa, Clostridium botulinum
MAKKIYSTELKLEIVKKYLSDNVSFGVLAQECNINKQDIQKCFVVYREHGEAVLSTVNGTYYTGDFKINVVDHMHNCSARSTAAYFDIPIRGDYLDNSIMKNFFELLKFELLYIRRI

SEQ ID NO: 52342 - protein, 471 aa, Clostridium botulinum
MGKIITIDPITRISGFLEIKVKVEDNIIVDGETSGLLFRGFEKMLEGRPPLDSIYFTERICGICSTAHATASTLALENALNITPSINDIYIRDMMHGFEFIQNHLRQFYCFTVPSYVNLPNIRPIYPQEYSDFRLPKKLNERISSHYEEGIKYSRLAHEALAVLGGKAPHSHGIFVGGVTVNIDSYKLTKIQSILKAIKKFVNIYMLEDMNIIAQYYPEYFNLGNTYGNFMSFGVFDKYKDKNISYVKPGVIINNKLENFDRDKITENIRYAWYVSDTIIENPIMNNEYTVDLKKEGAYSFVKAPRYADLPMEVGPLARLKIAGEYTGGNSSMDRNIARVLETKKIINILYNISEKIQLLSNNQSAYNIPEGAFGEGLIDTTRGALSHFIKIENKTIKYYNIITPTAWNISPKDSKGTRGVGEKSLIGSKIDNIEKPVEIGRIIRSFDPCISCATHLVSNNNEPVKVEVLV

SEQ ID NO: 52343 - protein, 207 aa, Clostridium botulinum
MKRELIDTVYEKFEYRKAKPIGNFKRSSVMILLNKVGTNINIIFEVRALTLKNQPGDVCLPGGKMEKGERPLEAALRETVEELNIDKEKIKVIGQMDYFISPYNFVIYPFVAIVEDIDIAPDKEEVDHVFEVPIEFFLENLPTCYEIDIVPSITGDFPFSLIRNGKNYKFSKGTIPEYFYEYEGNVIWGFTALIVKNFIDIIKDKKN

SEQ ID NO: 52344 - protein, 310 aa, Clostridium botulinum
MNIVEIKNLEKKFKNNTAVNNINLTVKEGQVFGFLGPNGAGKSTTINMICGLLTPTKGEIFILGKKMDNKAKDLKNNIGIVPQDIAIYEDLTAYENVAFFGGLYGVRGQELKERAKETLEFVGLLDRAKDFPYKFSGGMKRRLNIACALVHQPKLIIMDEPTVGIDPQSRNHILESIKKLNERGCTIIYTSHYIEEVEQLCTDIAIIDKGTIIAKGKKDELVEKYSDLNMVVINIKDSTKVNIKALKSIEGVVEVNIKENTIEITNKSSDNLDDIIMYFLNNKIKIKNIENKHSDLETIFLKLTGKKLRD

SEQ ID NO: 52345 - protein, 123 aa, Clostridium botulinum
MKKEEIIQAIKEMTVLELNELVEACEEEFGVSAAAPVAVAGAGAAAGAGAAEEKTEFDVVLADAGSEKIKVIKAVREVTGLGLKEAKALVDGAPKTLKEAASKEDGEAIKAKLEEVGAKVELK

SEQ ID NO: 52346 - protein, 260 aa, Clostridium botulinum
MEKSLIIDDYNKMIDKEEFMIETKNIKKTFGNLMVFEDLNLKIKKGEVVVIIGSSGSGKSTFLRCLNALEEINDGIIEIEGKILNSKDKKSMKELCSKMGMVFQNFNLFPHMTALDNVMIGPLVSKKENKEKVLKIAKNLLKKVGLEDKMDYYPSKLSGGQKQRIAIARALAMNPDIMLFDEPTSALDPELVGEVLSVMKKLAEEGITMVVVTHEMGFAKEVADRVIFMDGGKFVEEASPDVFFTCPKEERTKEFLKKVL

SEQ ID NO: 52347 - protein, 65 aa, Clostridium botulinum
MNGTVKWFNGEKGFGFITGEDGNDVFAHFSQINSEGYKSLEEGQKVSYDVVKGPKGPQAENITII

SEQ ID NO: 52348 - protein, 1430 aa, Clostridium botulinum
MKEILKMGLDVGSTTVKIVILDKNYNILYSVYERHFSDIKNTIGKLIKNTFNKFKDHSVSIMVTGSGGLSVSKWFDIPFIQEVVACTNTIKKFATNTDVAIELGGEDAKITFFDDGIDQRMNGTCAGGTGAFIDQMASLLQTDAKGLNELAKNYKVIHPIAARCGVFAKTDVQPLINEGATSEDIAASIFQAVVNQTIGGLACGKTIKGNVAFLGGPLYFLSELRKRFIETLKLTKNQVVFPENSQLFVAMGAALTAKDSKIVTLKYLLDKLDELENTRLESVATLRPLFANEEEYIEFKNRHEKHKAVEKSLEDFKGNCYLGIDAGSTTTKVTLIDEKGQLLFSSYGSNEGNPLKSVINILKDLYSKLPKEAQILNSVVTGYGEKLIKAALDIDIGEVETISHYKAAEFFSPGVDFILDIGGQDMKCLIIKDGVIESIMLNEACSSGCGSFIETFAHSLKMSVQDFAKEALTSKNPVDLGSRCTVFMNSKVKQAQKEGATIGDISAGLSYSVIKNALLKVIKIRDPKEMGKKIIVQGGTFYNEAVLRAFELISQREAIRPNIAGLMGAFGAALIAKERYEKDYKTTLATMEQLEKFSVETEMKRCGKCQNNCLLTINKFYDGTQFVSGNRCERGEGKEKIENKIPDLYEYKYKRIFNYMPLKKEEAERGIVGIPRVLNMYENYPFWFTFFTKLGFRVELSPRSTKKIYDLGIDTIPSESACYPAKIVHGHIRSLVDRGINFIFYPAIAFEQKEQKEANNHYNCPMVISYSEVIKNNMDIIREKNIKYMNPFLSLDNKKKLAKRLYEEFKDIFNISLYDIKRAVEAAYEEDQRVKLDIRKKGEEVIDYLKRTGKKGIVLSGRPYHIDPEINHGITNIITSLDMAVLTEDSIAHLGMVERPLRVVDQWVYHSRLYSAASFVAKENNLELVQLNSFGCGLDAVTTDQVEEILKRTGKIYTLIKIDEGSNLGAVRIRLRSLKAAIYERKKKNFKPAKLYDMSERPVFTKKMKENHTILCPQMSPIHFQFIETAFKASGYNLEVLPSVDKKAIDEGLKYVNNDACYPSIIVVGQMIEALKSGKYDVNNTSVIITQTGGGCRATNYIGFLRKALKEAGYLNVPVISLNVVGLEKNPGFKITPSLGNKSMMALVYGDLFMRVLYKVRPYEKIPGSANLLYKKWIEKCKKSILNGDLKEFKQNINDIVRDFDTLEIKKITKPKVGVVGEILVKFHPTANNDVVSIIEKEGGEAVVPDLIDFFLYCAYSENFVYRYLSGKKRKAVLNNIGIKAIEFYRKEMKEVLRNSKRFSPPKEIQELAKLAKPIVSIGNQTGEGWFLTAEMIELIESGTKNIICMQPFACLPNHVTGKGMIKELKRNFKGTNIAAIDYDPGASEVNQLNRIKLMMSAAFENLELEEVKKAKEEIAVSKKDDIIGE

SEQ ID NO: 52349 - protein, 88 aa, Clostridium botulinum
MDKMLERELTVNSSTGLHARPATLLVKKASSFKSDLSIEFNGKKANIKSLIGVLSLGVTSGAKIKLIASGDDETLAIEEISKLINTLE

SEQ ID NO: 52350 - protein, 437 aa, Clostridium botulinum
MQNLLQYYIHYWEVINMAKENLNPFENAQKQVKTACDKLGMEPAVYELLKEPQRVIEVSIPVKMDDGSVKVFKGYRSQHNDAVGPTKGGVRFHPNVSLDEVKALSIWMTFKCSVTGIPYGGGKGGIIVDPKTLSKGELERLSRGYIDGIHKLIGEKVDVPAPDVNTNGQIMAWMVDEYNKLVGRSAIGVITGKPVEFGGSLGRNAATGFGVAVTAREAAAKLGIDMKKAKLAIQGIGNVGSHTVLNCEKLGGTVVALAEWCKEEGTYAIYNENGLDGKAMIEYVKENGNLLGYPGAKKISLDEFWALNVDILIPAALENAITHENASSINAKLVCEAANGPITPDADAILKEKGITVTPDILTNAGGVTVSYFEWVQNLYGYYWTEAEVEAKEEEAMVKAFESIWAIKEEYSVTMREAAYMHSIKKVAGAMKLRGWY

SEQ ID NO: 52351 - protein, 177 aa, Clostridium botulinum
MDFMLKELIEVVKSIIVAVIAAFLIITFVFETVSVEGHSMDPTLNNRDRLIVEKVSYYFRKPKDGDIVVIKYPSDTREKFIKRVIAVPGDTVSIHDNKVYVNGKAKEENYILEKYMEDFNEVKVPENSVFVMGDNRNHSRDSRFPDVGFVNYKLVVGRAAIRIYPFNKFGSLYSKNK

SEQ ID NO: 52352 - protein, 308 aa, Clostridium botulinum
MALVTTKEMFKKAYEGKYAIGAFNINNMEILQGVVNSAKAANSAVILQVSAGALKYAGPKYLKAMVDAAIADTGIDVALHLDHGASLDVVKLAVESGFTSVMFDGSHYDYEENVAKTKEVVEYAHSHGVVVEAELGVLAGVEDDVQSDVHIYTDPEQAVDFVNRTGVDSLAIAIGTSHGAYKFAGEAQLRFDILEEIQSKLPGYPIVLHGASSVDPESVDTCNKYGGEIKGAKGVPADMLRKASSMAVCKINMDTDLRLAMTAGIRKVLSEDPKQFDPRKYLGEGRARIEKIVEDKIKNVLGSADSLK

SEQ ID NO: 52353 - protein, 277 aa, Clostridium botulinum
MEVLFMDRLLFGISGLPIGDGTTKFNYKSGITYLNNIGLDAMELPFVRSVNVTDKNKEGILEEKNNNNFYLSAHGSYFINLNADEIEKQEKSMERIIKGAEGLKQVQGRSLIFHPGFYLKDSKEETFKTILENLKKLPDLGVDYRLETTGKGTQFGSLEENVALCKEVDTCKLCIDFSHIHARSNGGLKSYKDFYNILSYVEKNLGRSALDDMHIHLSGIHYSEKGERNHLPFEESDFNYIACLKAFKDFDIKGCVICESPILEKDALLLKNSYYEL

SEQ ID NO: 52354 - protein, 147 aa, Clostridium botulinum
MKVILLKDVKSLGKKGDLVNASDGYARNYLIPKKLAEQATENNVHILNNKKEAERRQKLKELEEAQKLAKSLMGKEIKFKVKIGENGRLFGSITSKDISEKLKEQYNMNIDKKKIVAETIRQTGVYEAEIKIYPEVSTKVKVSVLEE

SEQ ID NO: 52355 - protein, 295 aa, Clostridium botulinum
MYKIIEKKELAPKIYSIEIEAKRVAKSAKPGQFIIVRIDEKGERIPLTVADYNKEKGTVTIVVQAVGSSTNRMVQLEVGDYFMDFVGPLGKPSEFVEEDLESLKNMKLIFVAGGVGAAPVYPQVKWLCERGIKPEVIIGGKSKEFILLEKEMIDLGAKVYPCTDDGSYGFYGLVTNKLKELIDSGENYDRVITIGPMIMMYFVTKLTKEYKLPTIASLNTLMVDGTGMCGACRVTVGGETKFTCVDGPEFDAHLVDFDEAMKRQALYKTEEGKRLHKIEEEKEGHVCHIGAGENA

SEQ ID NO: 52356 - protein, 358 aa, Clostridium botulinum
MGKGISIFLGMDNSIDKILELIKIAKNNGYDRIFTSLHIPEANYSVIVEEFKLVLDMAKKMNMKIIADISPKGFEYLQIKDMDLNKIKSIGIDVLRLDFGFTEEQIAKFTNNNLDINIELNASTITKDFLNKLNKYNVNYKNIQACHNYYPRKDTGISESLFLKKNSMLKEIGVEVSAFVPSLIGKRGPIYEGLPTIEKHRFMNPYLSAKHLFAMGVDNVFFGDAMPSKEEIMEVGMIKEDIIELEVDLEDNSLITCNYLNQDFYTNRVDVAENVIRAAEGRLIVNNSVIEPFNTVDRKVGYVTLDNKGYLRYMGELQILLTDLEKDDRVNVIAKVKKDELFLLKYINEGRKFRFKIE

SEQ ID NO: 52357 - protein, 139 aa, Clostridium botulinum
MKFSRGEFMFIKIVIVIGLAWLLQTVLGFLQFKNFNKNFKELRQKGRVVIGKNRGRVKRGSVILIAIDDNCSILESRIMKGITILARFKPMEILNNQNLHSINPNILESLDQQAALAVQDGIKNYNEYYKTKEEIDSNL

SEQ ID NO: 52358 - protein, 450 aa, Clostridium botulinum
MKKSKYNKIIKLEDGKTIAFNSVTCALAEVDQDFLAVLANIENIDIENLDEKKRELVENMSKGNYIVHDDMDELKLLKYRNYNGKFSSGALGLVIAPTLACNFACPYCYETPKAGLMDKKVQDSLIEMIEENAKNKNNISITWYGGEPLLAKEMIFDFSQRAIEICERENVKYSAYIVTNGYLIDEETIENMKKAKITGAQITVDGPPSIHNKRRILKNSDEETFTTIMANVKKLIEGGIKNIAIRINVDKTNVDHVEELLDILEENGLKDVVVNLGHVTAYTDSCNGIANNCLNTKEYAKSDTKYQKVLFERGYKVAGAYPFYPSVKANYCCADNVGAYVIDSEGYMYKCWNDVGNVDRAVGNVTTIKDKVDEKMYARNMEYILWSPFEYEECKECSILPICMGGCPYKGTMNEKPECEKWIYNLEETIIATYNQKNEAECSQQGCCCE

SEQ ID NO: 52359 - protein, 233 aa, Clostridium botulinum
MRKLSQEEFKEILKNRNPKERLVLKEIELFDMDFTSWNLSNIDFSLSAFHRVKFDEANLEYSSVFNVLFDECTVRKANFRHANLECAVLRYVDMTGCNIEGANLYAAVLEYAKLDDIIFDEDTKWFHLHCPEKGAFLAYKKCFNNRLVQLLIPADAKRTSATLPSCRCNKAKVLTIKSFDYKESYMEAWSLVDENFVYRVGEWVEVKDFNEDRWMDSTTGIHFWMTREEAKNY

SEQ ID NO: 52360 - protein, 216 aa, Clostridium botulinum
MLRRCKEMKKAILGKKLGMTQIFNENGKVIPVTVIEAGPCTVIQKKTVEKDGYEAIQVAFGDIREKLRNKPIKGHFAKAGVSVKRHIKEFKLEDSNSLEIGQEIKADVFEAGERVDISGVSKGKGFQGTIRRWNAHRGPMSHGSKFHRAVGSMGASSDPSRTFKNKRMPGHMGNVNTTVLNLEVVRIIPEKNLILIKGGVPGPNKGLVQIRNTVKA

SEQ ID NO: 52361 - protein, 664 aa, Clostridium botulinum
MDNKLEKMKELVEELNQYAYEYYVLDNPSISDKEYDLKYDELVILEKKTEVTLPYSPTQRVGDKILGEFSKYTHKGRLWSLDKAQNMEQLIEWHNRNLKVIEQYNSMSEDKLPELRYIVTKKFDGLTVNCTYDENGILIKSATRGTGIIGEDITAQIKTIKTVPLKIKNNHVIEVHGEAIMTKTAFEEYNKAAQVPLKNLRNGAAGALRNLDIKETARRNLSAFFYDVGYNEGPEFKSYREMMNFIKNMGLPQDKYIKECTNMEEVEKEIEYIESIRGELDYDIDGAVIVVDDIKTREILGYTIKFPKWAIAYKFEAKEITTKLLDVEWNVGRSGRVTPTALLEPVELGGVTVKRATLNNMDDIKRKNVKLGAKVLVRRSNDVIPEIMGVVEESLEESKEIQAPDRCPYCNSHLVQNGVHYYCENTLSCKPQMVKSIVHFASREAMNIAGFSEKTAEQLFEKLDIKSIADLYKIKKEELLTLEKFKDKKSQNLIDAIQNSKNCDLASFIYALGIPNVGKKTANDLVMKFKTLESIKNTTIEQLVEVPDVGEIVAKSIYDFFEDEKVISNIEELLNLGVKPYYEEERIDENPFMDKTIVVTGSLNNYSRGEIKDKLQSLGAKVSSSVSKNTDYVLVGEKPGSKYEKAIELGVKVINEEEFSNKIK

SEQ ID NO: 52362 - protein, 154 aa, Clostridium botulinum
MKIYEGRLTAEGLKVGIIVSRFNEFITSKLLAGSIDCLKRHGAKEDNIEVCWVPGAFEIPVIAKKMASKGKYDAVICLGAVIRGATPHFDYVSSEVSKGVAHVSLDKEVPVIFGVLTTDTIEQAIERAGTKAGNKGYDAAMSAIEMSNLMKVLD

SEQ ID NO: 52363 - protein, 398 aa, Clostridium botulinum
MFKIIIELNKNSFPEEFNKIEVHEGSMNIFMNKNNITPLKIFNVLAPAANIIKQEILALGGDCAVNKYCINCKVETSDIILLGTKRQYKKLLQKLKCMTFFRIEEIVGELENYIKNNGAVKTVLKDEREINYENLKVMGIINCTPDSFYEGSRKDSTEEALKTAEKMLKEGAEILDIGGESTRPGSDPVDEEEEIKRVVPVIREIKNKFKDVIISIDTYRANTAKSAIEAGADIVNDISAMKYDENMVKVVKEYNVPVILMHVKGKPKDMQIDPVYENLMKEIHLYFNERIEYCKSHGITEDKIILDPGIGFGKTVEHNLKIMNRIEELKSFNLPVLLAASRKATIGKVLGNLPTEERLEGTIALSCLAVDVGIQMVRVHDVKENIRAIRMLEAVRKI

SEQ ID NO: 52364 - protein, 315 aa, Clostridium botulinum
MSFSLKVKNEVCKHVEVNKQEAIAELSAIMKVSGTLLFTNKQFNFKITTENAAIARLVFKILKEHFGIHTEIMIKKNNSLKKNNIYIILISEEEGVKSLLKEVGIIKETINVFSLDYNIPKSIIECDECRRAYIRGAFLGGGSISNPEKTYHLEFVTHNEEYAKDLSNLINSYNLNSKVIKRKNSYIIYLKEGEQIVDLLNIIGAHASLLELENVRIMKEMRNNVNRLVNCETANLSKTVNAAVRQVESIKFIEREIGLGRLPKNLRDVAELRIKYPDESLRELGKMLNPPVGKSGVNHRLRRIEKIADELKQGI

SEQ ID NO: 52365 - protein, 773 aa, Clostridium botulinum
MKENLEVLPLIPLRGIIIFPYMILHFDVGREKSILALEEAMENGQKIFLSAQKEAETEEPIVEDIYDIGTICEIKQILKLPGDTVRVLVEGKTRGRIVNYLEEEPFLKVEIEEIEDNQYEDDKEVDALIRLVKTNFDEYIKLSGDSSSDLTVGVEDLEEPGRIADVIGSYININQEEKQELIGIIDSKERLERILIIINEEIEILKIERKIGIKVKNKIDKVQKEYYLKEQLKAIQEELGEDEEDKKEINLYKEKINKAKLPKEVKEKAIYELDRLKNSGNFSAEGGVIRTYLDWILSLPWNKDTKDNLDIKKAREILDKEHYGLKDVKDRIIEYLAVRKVSKTLKGPILCLVGPPGVGKTSIAKSIAHSLNRNFVRMSLGGVRDEAEIRGHRKTYVGAIPGRVIYGMKQAKSKNPLFLLDEIDKMSNDFRGDPADALLEVLDAEQNATFRDHYLELDFDLSKVLFITTANTLSTIPGPLLDRMEVIEVSGYTSEEKFYIAKNHLIPKKLKEHNMEDGKITFSNSSIYYIIDNYTRESGVRGLERKISSIIRKSITEMIEKNKDTTNVTINHVKKYLGPEVFSYEKADKEDKIGVVTGLAWTAYGGDTLPIEVTAMDGNGKLQLTGKLGEVMVESAKAGYSYVRSNASKYEIDTDFYKNKDIHIHVPEGAVPKDGPSAGVTMITALISALGGKRVKHNVAMTGEITLTGRVLPIGGLKEKSLAAYRAGIDTIIIPKANEKDLRNIPKTVKNKIDFIVADRIEKVLDNALIKEQ

SEQ ID NO: 52366 - protein, 532 aa, Clostridium botulinum
MKVKKLLAMILVASTTLVATACGNSNSSSGSTAKETSAKENIKDGGNLVFSIRGEPEILNPIYAYDRDTMTMDNALFAPLFYINGDKIDYTLAEEVKHSDDFLTYTVKLKKDLKWHDGKPLTADDLVFTMKQIMDEKQDSPFRSAFVINDKPVEVKKVDDLTIEFKLPTVQMPFMNSLGQVSPIPKHVFEGEKDIKKSIKNEKPIGSGAFRFKESKKGESITLERFDNYVGGKPHLDTITYRIIADPNSSKVALENGEVSANYIDISGISKFEKNEKLKVVAYDEGMVDNLVLNCKTKGLDKKEVRQAIAYALNKDDLINAAYESEKYAPKAYSPLPKNALYYTEDVTKYGLNKDKAKELLKKSGAENLKLKLVYRNDKKTLENQALVVKENLKDIGIDVELKGLEANAFFKQIDDPSKADFDLIFNAYLMGNEPDAYKEVFMTNGAFNASRYNNKKLDDLWNKAAVETDKTKREEIYKTIQKELIEDMPVYPICYSNATIAVNKNVGGIKEAKTAPIYMFQDLSKLYIIEE

SEQ ID NO: 52367 - protein, 470 aa, Clostridium botulinum
MSYRSGGECVMDRMKKVSVREQDPKVRATNFEEVCLGYNEEEAVKEASRCLNCKKPMCVTKCPVSIGIPEFIQHVKDKEFEEAAKTIAKYSALPAVCGRVCPQESQCEGKCVLGIKGEPVAIGKLERFVADWSREHNVDLSEREESKNKKVAVIGSGPAGLTCAGDLAKKGYDVTIFEALHEPGGVLVYGIPEFRLPKETVVKHEIENVKKLGVKIETNVIIGRTVTIDELIEEEKFDAVFIGSGAGLPRFMGIPGENANGVFSANEFLTRNNLMKAFKDEYDTPIKVGQKVAVVGGGNVAMDAARTALRLGAEVHIVYRRSEEELPARVEEVHHAKEEGIIFNLLTNPVEILEDEKGWVKGMKCIKMELGEPDESGRRRPVEIKDSEFVMDVDTVIMSLGTSPNPLISSTTKGLEINKRKCLVAEEETGLTTREGVYAGGDAVTGAATVILAMGAGKQAATAIDEYLSK

SEQ ID NO: 52368 - protein, 722 aa, Clostridium botulinum
MEVKMNNINSILSKELNISIKYIDAVIDLLDQGNTVPFIARYRKEVTGGMSDETLRELFERLTYLRNLSSKKEDVIRLIEEQGKLTEELKTSIINCKTVTEVEDLYRPYRPKRRTRATIAEEKGLKPLAEIILEGNFKEDIKVYASEFINEEKEVKTIEEALQGAMDIISEVISDEAEYRKWIRNFVFNEGVIETKGESMEPTPYEMYYDYKENVKNIPPHRILAINRGEKEKILTAKVTCNEDKIIDYLKSRSLKGNKETDVYIEESVKDSLKRLIYPSIEREIRSELTEKGEEGAIKIFKENLKALLMQAPIKDKVVLGYDPGFRTGCKIAVLDETGKLLDTATVYATAPQNDVEGSIKVLKKLIYKYDVDVISLGNGTASRESEEVISKMLKEIKEEKGKDIYYVIVSEAGASVYSASKLATEEYPDINVSLRGAISICRRLQDPLAELVKIDPKSIGVGQYQHDVSQKKLDESLKGVVEDCVNAVGVDLNTATPSLLSYISGINSSIAKNIVAYREEIGKFKNRKELLKVKRLGQKAFEQCAGFLRVMESKEPLDNTGVHPESYEGTKKFLSLLQYDIKDVKNNKLQDIDDRVNNIGLDDICNKIDIGKPTLLDIIKEIKKPGRDPREDLPKPILKTGIVDITQLKPDMVLMGTVRNVADFGAFVDIGVHQDGLVHISQLSDRFVKHPLDIVKVGDIVEVRILEVDKKRNRISLSMKK

SEQ ID NO: 52369 - protein, 461 aa, Clostridium botulinum
MKEFDTIAAVATPVGEGGISIIRISGDKSLDIVSSIFKGKNDRTLDDIKPYSMRYGFIIEKESKEMIDEVLVSYMKGPRSFTAEDTLEINCHGGVIPTKKILKELIKSGARLAEPGEFTKRAFLNGRIDLSQAEAVIDIIRSKTDLSMKSALKQAEGTLSKEINSIRNRMIKIIAHIEATVDYPEDDLEEITGQKIKVDLKEIINKIDNLISASEEGKILREGLNTVIVGKPNVGKSSLLNALINENKAIVTEIPGTTRDVIEEYINIDGIPIKIVDTAGIRETEDVVEKIGVEKSKEKIDEADLVIFMLDLSRKIDEEDIEIMDFIKNKKYIVLLNKLDLNKDLNEENHFIKELDSKYIIKTSVKNNSGLNELKECIKNLFFSGEIKSDELIVTNARHQEALIRSRESCIQAIETLSDEISIDLASIDIRNAWKYLGEITGDTLDENIIDKIFSEFCLGK

SEQ ID NO: 52370 - protein, 148 aa, Clostridium botulinum
MSLKETLQDHWKQALKAKEKEKASTISMVKAAILLAEKNSGKTLEDSEIIDILSKEIKQRKEALEDFKKGNRQDLVDATNFEIEVLLKYLPQQLTEEEITEIIEKAVNETGANSMKHMKNVMSIVIPKTKGRADGKLVSEKVKNILSK

SEQ ID NO: 52371 - protein, 252 aa, Clostridium botulinum
MKNFFSSNKKASTDTNLDMNNIPKHIAIIMDGNGRWAKERSLPRTMGHKAGVETIREIVKECNNLGVKYLTLYAFSTENWKRPKDEVSALMTLLVQYLRKEVKELNENNVIVNAIGNIEKLPEVCIKELEKAYEETKDNTGLVLNLALNYGGRDEIIRAVKYMYEDIKVGKIKEEDINEENLSDYLYTKGMLDPDLIIRPSGEKRISNFLLWQCAYSEFWYSDIKWPDFKKEHLHKAIYDYQNRDRRFGTVK

SEQ ID NO: 52372 - protein, 181 aa, Clostridium botulinum
MIKEVIVVEGRDDITAVKRAVDAEMIAVGGFGINSKVIKKIREAQKRQGVIVLTDPDYAGEKIRKYICNRVKGVKHAYISQEEGTKEDDIGVENAAPEAIIRALNLAKCEVKQERKEFDMNDMIFFKLTANEESKERREKLGMALGIGYCNTNQFIKRLNNFGITKEEFIKAIKDLDKGNE

SEQ ID NO: 52373 - protein, 214 aa, Clostridium botulinum
MFMLNEFYTKGEEIANAITHGIGALLSIAALVILIVFSAKYGDAWYVTSYSIFGSCLFILYLESTLYHSLQGSKVKKIFRIFDHSSIFLLIAGTYTPFILTSLRDPLGWTIFGIEWGLTLIGIILKVFTTGKYEKLSTAIYIFMGWLIMLHAKKLVLVIPRISLIYLIVGGVIYTVGAFLFMLDDIPYNHPIWHLFVIGGSVFHFFSLFYMIPR

SEQ ID NO: 52374 - protein, 148 aa, Clostridium botulinum
MKLSTKGRYGVKAMVDLAINYGGQPVSIKNISERQHISEYYLEQLFSPLRKAKLIKSIRGAQGGYILNRHPKDITVADIMEVLEGPIEISSCLEGEDSCSNMDCCATRLLWAKIKESLDNIMESTTLQDMVEDYKKINSPIKRSENNE

SEQ ID NO: 52375 - protein, 261 aa, Clostridium botulinum
MNSITTTNLVIAYEDKLIVDGLNMNIPKGKITTIIGPNGCGKSTVLKTIGRILKPKEGLVYLNGDDIRNLSTKEVAQKMAILPQSPQAQGGLTVGELVSYGRFPHKNGFGKLSPEDKKVIEWALDITKLTELEITMVDNLSGGQRQRVWIAMALAQQTDLILLDEPTTYLDMAYQLEVLELLYNLNRKQSCTIVMVLHDLNLAARFADYMIAIRDGSIIKCGTPKEIMTKEVLKDTFNIDAEIVWGSKTGRPTCISYELIK

SEQ ID NO: 52376 - protein, 861 aa, Clostridium botulinum
MIHKYMGVINVYEFILNERNVSVSEDINLLEYLRDNEDLTSVKNGCAEGACGACMILVNGKALRACICTTAKVNGKDVKTVEGLTEFEKDVFTWAFSKAGAVQCGYCIPGMIISAKALLDKNLNPNKKEIKTAIRGNVCRCTGYVKIIKAIEMAAGAFRNGKLPFAKEYKGKIGENIPRIDAKDKILGIGKYVDDMKIEGMVYGSALRSKYPRALVKSIDISVALKHPEVEAILTAEDVPGNRLIGHIVKDWPAMIAVGEGTRYVGDAVALVAAKSKKALKEILNLIKVEYEELEPISNPNIAIAEDAPKIHPKGNILTVEKVNRGDVDEAIANSKYVVTNHYSTPFTEHAFLEPESALAMPDGDGVIIYTGSQGIYDEQREISELLGLPKEKVRTISKYVGGGFGGKEDMSVQHHAALLAWTIKKPVKITLSRKESIKIHPKRHAMEMTITTACDEKGNLTAFKADIISDTGAYASLGGPVLQRACTHAAGPYKCPNVKIKGTAVYTNNPPGGAFRGFGVTQSVFGSECNLNLLAEKVGISPWEIRFKNAVEPGDALPNGQIADKGTAIKETILAVKDVYKKSKCAGIACCMKNSGVGVGIPDIGRCNLIVIDGKVHIRTSAACIGQGLGTILTQIICETIGLLPEQIILDLPDTKFAPDSGTTTASRQTVFTGEATRMASLKLKEKLLTTSLEECEGEEFYGEYQSITDPINSDKKNPVSHVAYGYATQVVILDDDGKVERVVAAHDVGKAINLTNVEGQIEGGIVMGLGYAFTEDYPLNKSIPTAKFGTLGLFRATDIPEIETTIIEKNTNDLAYGAKGIGEITTIPTAPAAQGAYYKFDGNFRKKLPLEDTAYRRKK

SEQ ID NO: 52377 - protein, 375 aa, Clostridium botulinum
MLIKEANFMKITCQKNILLEGISIVQKAVTGKSTLPILSGILIRANKNELVLTGSDMDLSIETKVKANILEEGTIVLDARLFGEIIRKLPNDLIEINTLEDNSIEIICQNSRFNLIYMNPGEFPNPPIINENMIFSIGESKLKNMIKGTIFATAQDETRPILTGVLFQIKDKMLNLVALDGYRLALRSEVVDNDNTINAVIPGKTLNEVSKILEEDNENVNITFTPNHILFSIGETKIISRLLEGEFISYKSIIPEEFNLKIIAKRSELLNSIERASLMAKEGNTNLVKFDFSDDKIVITSNSQLGMVREELKVVLQGEDLQIAFNSKYLLDVLKTMEDNEVVLEFSSSVSPCIIKNTEINNCTYLVLPVRLNNN

SEQ ID NO: 52378 - protein, 790 aa, Clostridium botulinum
MNMRKIELLAPAGSVESLYAAVQAGADAVYMGGSKFSARAYANNFDDEQLKEAINYCHLYGVKVYITVNTLIKEGEIKEAIKYIRFLYSIGVDALIIQDTGIAKLIKENLPDFEIHASTQMTVHNGEGAIFLKELGFKRIVLSRELSLKEIEYISKDLDIETEIFVHGALCICYSGQCLMSSILGGRSGNRGRCAQPCRLPYTLINEKNDKETKGYLLSPKDICNIENMEDLIKAGATSFKIEGRMKRPEYVAGVIRSYRKAIDAAINKENFEEEQNKKELMQLFNREGFSKAYLYGNKGKDMMAYSFPKNTGLLLGEVNKDKSIKLEENLKIKDGIRNADKGFIVSSIIKDNKEVEKAYKGDLVKIKPSNYKFKDKLYKTSDTELLQSLGKIYEDKFNKKIYLEANVEFKVGEKIKLSCRYNGEEYFAEGKEIEKALKKPLSMEKIEENLMKSGETPFKINKIKFDSYEEGFLPVSEINNCRRILINSIEEKIIQNNPHCGKIKRVNVDNIYSNINGIKENDLPKYIFSIYTYEQLKAVADNGFKNIIVDLFTRNPLNLHKIKGLYQDLNIYLKAPNIIKSEFDYVEKIIEENLYNIKGIVTANLGIVNKFNNRTKIIGDYKLNIFNSFAGDFYKDFIKGSCLSIELNKKEVKSITKHMNLDSQMLIYGKIENMVSEYCPIGSTFGGKNSYSTCNKACEKGIYTLKDRMSAKFPVKTDIFCRSHIYNNSDINLIGNIEELRTFGINSFRLDFLEENYEEIEYILKSLKEENWKRDFKNYTRGHYKRGVE

SEQ ID NO: 52379 - protein, 408 aa, Clostridium botulinum
MKDVLERFLGYIKVDTQSSEESDTVPTTKTQLEFAKKLGEELKAIGLKDVSVDENGYVMATLESNIDKKVPTIGFIAHMDTSPDLSGTNINPRIVEKYDGQDIVLNKEKNIVLKINEFPEILEYKGQDIVVTDGNTLLGADDKAGIAEIITAMEYLINHPEIKHGTIKVGFTPDEEVGKGADHFDVKKFGADLAYTLDGGGIGELECETFNAAKAKVIIEGRNVHPGSAKNKMTNAVLVANKFINMLPENEVPERTEGYEGFFHLLSVKSEVETAELNYIIRDFDRKKFEERKEQIKEVGKKINEEYNKEIVCVKVEDQYYNMKEKIDEVKYVVDIAYDAMKAIDIEPILVPIRGGTDGSRLSFMGLPTPNLFAGGHNFHGRFEFVPVLSMEKAAELVVKIAELYANR

SEQ ID NO: 52380 - protein, 258 aa, Clostridium botulinum
MYTTGLIGKNINYSESPEIHNNYYKKNNIPFFYKIFNLKQDQIDDFIKNLHKNNIKGFNVTIPYKETILQYLNDIVYPADKIGAVNTVAVQEDKLIGYNTDYIGFIKSLQYYNIQVKNFKCLIIGSGGSAKCIYYALKELNARDICIVSRNPEKARLKFEKKVKILNIKDENKLDRYDLIVNCTPIGGPNLKEQKPIELKEIKKNCVVYDLNYTPKRSKLLKEAKENGAFIINGEKMLIFQAYSAIGLWCLNGIKGGR

SEQ ID NO: 52381 - protein, 300 aa, Clostridium botulinum
MKIGVIMGGISTEREVSLNSGREVIKYLELLEHEIIPIIIDKKEDVMEKAKGIDFAFLALHGKFGEDGTVQSVLQTLDIPYSGCGPLTSAICMDKDMTKKILKYANINTADWVNVSSVENIDYEAIEKIGYPVFVKPNSGGSSVATNLVKDKEGIKEAVELALKYDKEVMIENYTKGEEITCCMLNGKMLPVLAIRPHAEFFDYTAKYADGGSDEVVIELEENLHKKVEEMALACWKELKCEVYVRVDMIVKDGIPYVLELNTLPGMTKNSLFPKSANAVGISFAELLNSIVKYSLEVER

SEQ ID NO: 52382 - protein, 184 aa, Clostridium botulinum
MIKEILKKADEKMGKTIVALKKELASMKAGRANPAMLDRIEAEYYGSMTPLNQLGNISVPEARVLLIQPWDKGALSAIEKAILKSDLGLNPSNDGTVIRLVIPELTEETRKNIVKTVKKTGEEAKVAIRSIRRDCNDDVKNLKKDDVSEDDIKKAEDDIQKKTDKYIKEIDSIISAKEKEILSI

SEQ ID NO: 52383 - protein, 328 aa, Clostridium botulinum
MVKIMKFKNFHEAYIKNLNDVYYNPEFINQPRGNVSKERLNYFMILENPRERICYTKSRKTNIIFNFAEALWYLSGSNDLDYISYYASNMKKYSMDGKTLTGTAYGPKIFSYGYNKINQWNRIIKLFKEDPDTKRGFIEIFDANEDLSLKNIDVSCTIGFQFFIREHKLYMTTFMRANDAYRGIISDVFSFTFIQEFLATELNLDIGQYSHQVATTHIYEPDFKLAEKVLCESKSAKKELSFPRMPKKDNWEDLKIVLQYEKELRKQSIHLTKKDIDELEIDKYWKQIICLFVLYQEIYYGDNLDYEIYESLEPLYQYLFSNKWNQYF

SEQ ID NO: 52384 - protein, 277 aa, Clostridium botulinum
MAVKGFRPTTPTRREMTMCTFEEITTSTPEKSLLVSLKKSGGRNANGKITVRHIGGGAKRKYRIIDFKRNKDNIPAKVVSIEYDPNRTAFIALVVYADGEKRYIIAPVGLKVGDTVVSGPESDIKVGNCLPIRNIPVGTVIHNIELAAGKGAQLVRSAGNSAQLMAKEGDYSQVRLPSGEVRYIRVECRATIGVVSNQTSEIVNIGKAGRKRHMGVRPTVRGSVMNPNDHPHGGGEGRSPIGHPSPRTPWGKPALGYKTRKNKKYSDRFIVKRRHDK

SEQ ID NO: 52385 - protein, 540 aa, Clostridium botulinum
MRKAMKLQTKITLLIITVVFLSIAIIISFVVSWMTGNIENKAKTNIMNVAEMVAHSTQIVDALEEKDPNGKIGPYINMQLKNLQQIQYIIVADNDGIRYSHPNPKMIKKKFEGGDEYKVVKEGETYISEATGTLGKSMRAFAPIYDRENKKEIGFVSVGTLNENIETAKHIAILYIILIGFGGLMAGTIGAILLSNNIKNILLGLEPEEITNLYNEKMGILDTIHEGLVAVDYMGRITLINNSALKILNLQHKVDKDEVIGKNIENIIENTGMINILQTGESEFEREQKINNTTIMTNRIPIMKREKIVGAIASFRDKTEVTRMAEELTGAKKMAWSLRAQNHEFMNKLHTISGLIQLEEYDEALQFISDMAKSRNSISNILSHNIKNPSISALLLSKYNKAEECRVSLKIDENCKLTKLPQHMTSEEIVSIIGNLIENSLDEVKNDGTGLIYIKIVENKNYLNIIVKDNGSGIPVEYREKIYHQGFSTKEAQRGYGMYIVKKIIDETKGTIRLDVDNGVIWNITIPMTRGDKIDSGNDS

SEQ ID NO: 52386 - protein, 78 aa, Clostridium botulinum
MSEMATNKTTNNIASANNKGLRGFFRDLKFEFKRITWAPKKDVKKATETVLIFCFVYMVIVGVFDYGFNNLFKLIFKL

SEQ ID NO: 52387 - protein, 638 aa, Clostridium botulinum
MEMEKALKLKNIVTKIIIRNLDIILFLILVSLKVMFYGKEISPEFFSYKYILLPVVASVGVLLGIGYFLQKHKRTKFLYVLNIIISSIIIADLLYYRYYKDIISIGAIRNAFLLGGVASSITSLFKLKDCVYFLDILLIIPFLKVYRNMPYKENKKIIRIGVGSLILAGAILLNGINIYKLSVDQPGLLNTMSNRIYITKVLGNVNFHVIDAYQFTRNKINNSKKLPEAKEKELVDNFEGKSQIQGEKLKGVGEGKNLIVIQVEALQQFAINAKVEGQEVTPNLNKWINKSMYFDNYFYQVAAGNTSDAEFLSNNSLYPAVSGAAYYMYSGNQFKSLPSTLQDKGYYTAAMHGYKDGFWNRNVMYKAQKFQDFHGESTYNIDEQVGLGLSDKSFFNQSLEKIKTFKQPFYSFLITLSSHFPYDDVKGYGEFNVGKYEGSFLGNYLKGIHYTDAQLGMFLENLEKEGYLDNSIVVIYGDHNAVSKNYIQELYDFVGEKSPNDLKWYELQKVPMLIHFPQDEYKGVDHTYGGQIDLYPTIANLYNLPRKYMLGNDLLNVADPKVTFRNGSFTDGKAFYISWTGEYYDIKTGEKITETEELKAKKQESAKDLESSDELLNHNLIKKLESESKGEGESEQSK

SEQ ID NO: 52388 - protein, 1185 aa, Clostridium botulinum
MGKNQFDEKKPEWVSLHQHTEYSLLDSSAKISDLIKRAKEFGMKSIAITDHGVMYGCVDFYKEAIKQGIKPIIGCEIYVASKSMYIKQQDKENETHHLVLLVKNEIGYKNLMEIVSKASVEGFYYKPRVDHEFLKDHSEGLIALSACLGGEVQANILKENLEKAEEVALIYKDIFKEGFYLELQYHGMEEQLKVNETLVKMSKDLDIPLVATNDVHYIRKEDYKSHDILLCIQTGKTVEEENRMRYPSDQFYLKSPEEMYETFSYVPEALENTVKISEECNFDYNFHESKLPKFPLEEGVDPYEYLREICFKGLFLRYEVLKDFIDKPFSIDEVLVYGDENKEAFDLIERLNYELSIIQQMGYVDYFLIVWDFIRFANEKGIMTGPGRGSAAGSLVAYTLGITKIDPIKYNLIFERFLNPDRISMPDIDSDFCYERRGEVIDYVVEKYGKENVSQIITFGTMAARACIRDVGRAMNYPYAEVDRIAKMIPTVLNITINKALELNPELKEVYDNEERVRELIDVARALEGLPRHTSTHAAGVVIASQPLVNYVPLQRNEESIVTQFTMGTLEELGLLKMDFLGLRTLTVMRDAVRIIKENKEINIDLDNIDFEDKEVYKMIGQGKTVGVFQLESAGMTSFMKELKPDSLEDIIAGISLYRPGPMAEIPRYIANKNNPLNIEYQTEKLEPILSVTYNCIVYQEQVMQIVRDLAGYSMGRSDLVRRAMSKKKHDVMEQERRNFIYGNEDQGVKGCINNGIDENVANSLFDSMMDFASYAFNKSHAAAYAVVGFQTAYLIRYYPTEFIAAMLNSVKGDNDKVSFYVNFAKTLGIEIIAPNINESYSNFTVKDNRIIFGLTAVKNVGEKGIDNIVLSREQKDKFIDLSDFFNKVDTSIINKRLVESLIKAGAFDCLKVYRSKMLAVFEKIMDGIQKQKRNNIEGQVNLFMDIMDNKESSIDIKYPNIKEFDKKYILQMEKEMTGLYFSGHPLEEYEETLKIQTSHLISDIIPKESLEGNLVDTISSIKDGDKVVVGGMITHVSKKLTRNNDMMAFIVLEDLYSSIEVIVFPKIFNMARNIINEDEVVLLKGRVSLREDEQPKLICEFMEPLVKINSEKLYILVEEKKDIKLKLQEIKGVFLQHKGNIPVYFCTNKERKKFRIDRELWVNGSRELMDNLRNMFGEDNVKIL

SEQ ID NO: 52389 - protein, 230 aa, Clostridium botulinum
MTIGIIGAMDEELELLLKELDLEKKQVKANMTFNFGKLWGNNVVAVRCGIGKVNAAVCAQILIDDFKVDRIINVGIAGGTAENVLPGDVVVADSLVQHDMDTSAFGDPIGQIPRLDTFDFKCDIELIEKAKKAFQNKTEHKCLVGRIVTGDQFINDKKRVQWMCKEFNALACEMEGGSIAQVSYLNNIPFVVIRSISDNASTGAHMEYEDFMTIAIKNSTNILKGMLTNI

SEQ ID NO: 52390 - protein, 61 aa, Clostridium botulinum
MARKALIEKWNKTPKHSTRAYTRCRICGRPHAVLKKYGICRICFRELAYKGEIPGCKKASW

SEQ ID NO: 52391 - protein, 235 aa, Clostridium botulinum
MAKAKFERSKPHVNIGTIGHVDHGKTTLTAAITTVLAQKGGASATKYDEIDKAPEEKERGITINTSHVEYETANRHYAHVDCPGHADYVKNMITGAAQMDGAILVVSAADGPMPQTREHILLASRVGVQYIVVFLNKADQVDDPELIELVEMEVRELLNEYGFPGDDTPIVVGSALEVLENQDNAEKTKCIDELMEAIDSYIPTPERATDQPFLMPVEDVFTITGRGTVATGRVK

SEQ ID NO: 52392 - protein, 147 aa, Clostridium botulinum
  MISC_FEATURE (67)..(67): X=any amino acid
  MISC_FEATURE (109)..(109): X=any amino acid
  MISC_FEATURE (125)..(125): X=any amino acid
GSFRPIAGSKHLHLTTISPDLLLRQCPNHYAIRAGRNLPDKEFRYLRTVIVTAAVYWGLSSHLRLRXVFPLTFQHRAGVSPYTSAFALAETCVFAKQLLGPILCGLLSXAPLLPKLRGQFAEFLXQQFFRWPLGFSPHLPVVGLRYG

SEQ ID NO: 52393 - protein, 493 aa, Clostridium botulinum
MEYSKNFDVRNNRNLTMLVDFYELTMGNGYLKSGMGDKIAYYDMFFRRVPDGGGYCIMAGVQQLIEYLSGLKFTEDDIEYLRSKKEFSEEFLDYLKNFKFSCDVWAVPEGYPVFPNEPLVTVRGPAIQAQFVETMILLTINHQTLIATKANRICRAAENRSVMEFGSRRAQGYDGAIYGARAAVIGGCNATACTIAEEMFGIPAAGTMAHSWIQLFPTEYEAFKAWAEVNPENCVLLVDTYNVLKSGIPNAIKVFNEVLRPKGIRPKGIRIDSGDITYLTKICRKMLDDAGYKDVGIVVSNSLDEFIIRDVLNQGAKIDSFGVGERLITAKSEPVFGGVYKLVAVEAYDGIITPKIKISENEEKITNPGFKKLYRIYDKNSHQAIADLITMHDEKIDESKPLEIFNPLFTWKKKKIKDYYVEELLVKIFNKGKQVYESPDVMDIKAFAKKQTERFWPEVLRFENPHKYYVDLSPKLWRVKQELLHKFSDTYEE

SEQ ID NO: 52394 - protein, 126 aa, Clostridium botulinum
MIYGIGTDITEIRRIEKAITRNKNFINKLFTKNEMDLWEKKNFKLEFIAGRFAAKEAVSKALGTGIRDFNFKDIEIINNELGKPQVILKPKAEDIIRKISQSYKIHLSISHEKEYAIAYALLEVFI

SEQ ID NO: 52395 - protein, 380 aa, Clostridium botulinum
MKMLYRKFGKTDEEVSILGFGCMRLPIIDNDPAKIDEKKAIKQIRYAIDNGVNYIDTAYPYHEGASEFLVGKALKDGYRERVKLATKLPSWLIKSREDMDKYLNEQLEKLQTDHIDFYLLHALNKGDWENLKKHNVFEFLDKAIEDGRIKYAGFSFHDELSLFKEIVDSYDWSFCQIQYNFIDENYQAGTKGLRYASQKGLAVVIMEPLRGGNLARVVPDDVKKIWNKSHIKRSPAQWGFRFLWNHPEITVVLSGMEEMDHIKENIKESNNGYASSLTEKELELIDKVKEIYISRIKVDCTNCRYCMPCPFGVNIPKNFKYLNMASIYSDVKKQKKKYINHLNKNEKASNCRKCGKCEEACPQNIKIRNMLEEVVKTFEP

SEQ ID NO: 52396 - protein, 473 aa, Clostridium botulinum
MSGLAKDFLWGGATAANQCEGGYLEGNRGLGTVDVIPAGVNRRAVMQGKMHYNNLQEDSYFPSHEAIDMYHNYKEDIALFAEMGFKCYRFSLSWSRIFPTGKEQEPNEEGLAFYEKFIDELLKYNIEPVVTICHFDVPLVLEQEYGSWRSRKLIDAYLRYCEAIFKRFNGKVKYWITFNEINMLMHLPFMGAGIMFKEGENELEVKYQAAHNELVASALATKLAKEINKDNKVGCMLAAGQFYPYTCKPEDVLEAMEKDKNNYFFIDVQSRGEYPSYAKKFLERNNIKIEMQSEDEKILRENTVDFIAFSYYTSRLASSDPNAGEKSAGNVITSLKNPHLKSSKWGWQIDPIGLRITMNSLYDRYQKPLFIVENGLGAVDILNEDGTVDDDYRIAYLETHIKNMIDAVELDGVELLGYTTWGCIDLVSASTGEMKKRYGFIYVDKDNDGHGTLKRYKKKSFYWYKNVIKNNGL

SEQ ID NO: 52397 - protein, 197 aa, Clostridium botulinum
MIIIITSVISFLLGSIPTGYFITKKACGIDIRTKGSGNIGSTNVKRIVGTKISIITQIIDVLKGIIPVVLGISLSKIVKLPVSTDTYLSIIAIAAILGHDYTPFLKFKGGKGVNTTLGVFIFIAPIPTLTGLAVYFILGLFIRIVSIRSISIGITIPIMCIITKLPIQIIISTTIACILMIIRHKDNLVRLIRGEEK

SEQ ID NO: 52398 - protein, 392 aa, Clostridium botulinum
MESNLSVAIPCYNCKKYIKKTIKTLLKQTILPKEIILVNDNSSDDTIKVLEEIQNSNKEIVRVFNLTKNKGPSFARNYAVDKSKGDYILFMDSDDLASPYLIEKSLTKLKSMNGKSHDKWILSYTSYIQIDENDNIISDIIKGIQVETEEILGYEFLRNYIISTSGVILKKNYFYEAGKFNERLSYSEDWDLWIKVAALGGFSYLNEPLVKVRRRENSLSSNLKNMKDGEKTVLNQYDLEFIEEAVNKRKVPSYINTCDFVSMLFRLNYWEEGFEKLKCLSKSFDYYNIYFLLGLYYIKNQNLNLALENFNKTINLKQNHGAALNNLGAIYCLLGQIDQGKRLLIKALEIFPNYLDAMHNLDLVINKSNVTYNNINFTWRELRNTLINYKNK

SEQ ID NO: 52399 - protein, 199 aa, Clostridium botulinum
MKKEVIVASNNKDKIREIKEILKKFNIDALSMKEAGIDIDIEEDGNTFMENAYKKAATIYEILPNYMVIADDSGLMVDALNGAPGIYSARFAGEHGNYKKNNEKLLKELDGKKVEERKAKFVCSIVFIIDKDNVIRVQGEINGVIGEKEIGEDGFGYDPLFYIPEYKKTFAQMDSQTKNSISHRGEAFRKLKCELEKYI

SEQ ID NO: 52400 - protein, 387 aa, Clostridium botulinum
MSEEITMKDMMEEINSSMKRIHKGELLKGKVISVSDKEAVLNIGYISDGILPKKEVVDNEEVNLKDIISKDDVISVCVLEVNDGEGNVLLSKKKAEIIEAWSKLEKAFKNEEILEIKVEEIIKGGAIGHIQGIRVFIPASQIDNKYVKDLNVFKGEMVKGRLIELDKQKRKIVLSSRVVKEEEEAKRKEELLNSLEKGQKIEGVVRRLEKFGAFVDIGGMDGLVHNSQLSWGRVNHPSEVVSIGDKVEVYVLDFDKDTKKIALSLKDVKKDPWNTVKDKYAVGSVIEGTIVKLLNFGAFVEVENGIEGLVHISEITDEHIAKPSEKLNIGDKVKVKVLEVNSDEKRMSLSIKEATEKPKEDFSKYDDSKEEDVTLGDLFGDKFKDLF

SEQ ID NO: 52401 - protein, 301 aa, Clostridium botulinum
MIYTITFNPALDYVVKVEDFKTGNLNRTSYEKIHAGGKGINVSIVLNNLDVENIALGYIAGFTGDEIERRVRSFGCKTDFIRLKNGMSRINVKLKSKEESEINGTGPSISAENLDELFNKLDNLKEGDFLILAGSIPKTLPENIYETIMERLKDKNIKFVVDATGELLLKVLKYKPFLIKPNHHELSELFHVEIKNEEEIIGYSRKLQTMGAENVLISMAGDGAIFISSKGEIIKSSVPKGVLKNSVGAGDSMVAGFISGYLKNNNLENAFKMGLATGSASAFSERLATKEKVEETLKQIL

SEQ ID NO: 52402 - protein, 266 aa, Clostridium botulinum
MHINYTNKILLDRRKDMKYTKILAHRGASAYAPENTMAAFKKAIEMNADGIELDVHLSKDGYIVIIHDERVDRTTDGKGEVKDFSLDELKKLDAGSWFSYEYKDEKIPTLEELLKLIKNTEIYLNIEIKAGYRLYPNIEEKVIAMIEKYKMLDRVIISSFDHYSLVRVKEINSNIKTGMLYEAALYEPWEYARSIKVEALHPNYITLTKEFIDKAYINSFEVNPYTINDETNMESLIENKITSIITNYPDRAYNIISKLKLKNLQV

SEQ ID NO: 52403 - protein, 637 aa, Clostridium botulinum
MSQENKQVYDESQIQVLEGLEAVRKRPGMYIGSTSLRGLHHLVYEIVDNSIDEALAGFCTHIEVFIHKDNSITVVDDGRGMPVGMHSKVKKPAVEVIMTILHAGGKFGGGGYKVSGGLHGVGASVVNALSEQCEVEVRREGHIWKQKFERGITKTGLDIVGDTEDHGTKIYFKPDIEIFDELEFEYDTLAHRLRELAFLNKGIKISLTDERYDKKEMFHYEGGLRSFVLYLNRNKEKLHQQPIYVDENKDGCIVEIAMQYNDGYAENIFSFANNIDTIEGGTHLAGFKSALTRVINDYARKFNYLKDTDKNLSGDDVREGLTAVISVKLTDPQFEGQTKTKLGNGEVRGIVDTIVGQSIGSFLEENPNVGKIIIEKGLSASRAREAAKRARELTRRKSILESTSLPGKLSDCSSKDPSLCEIYLVEGDSAGGSAKQGRNREFQAILPLKGKIMNVEKQRLDKILASDEIRAMITAFGAGIGKEFDIDKIRYNRIIIMTDADVDGAHIRTLLLTFFYRYMKELIEEGHVYIAQPPLYRIYKAKKEIYVYSDPELDAALLELGGKDTNTNIQRYKGLGEMNPEQLWETTMDPEHRTLLQVTVEDAMEADEIFTILMGTKVEPRRDFIESNADKVVNLDI

SEQ ID NO: 52404 - protein, 661 aa, Clostridium botulinum
MSDNRYDNFITNNKVYMFIIAILIVIIFSYKHSQVGIVLTLIYFFLLLYNFKNTRIKKKELKKFIEDFSTKMDSAFKSSLMNLPFPMMVLSNKGEVLWYNQNFSLLLKKDGILGENINHILKNFNFKYALEGKKNSFKNINFKDNYYNIYTNTFFDEEIREKILLLYFYDVTDMFNILMNMEKNKEGIMLLEVDNLDEVLKSIDIDKKPLIIAEIERHINSFSEDMKAMIKKYEQNKYILSVQNSYIEKQMEKKFDILDIIRNIDTGNKMNPTLSIGVGKGAETPLQNYSYALAAKELALGRGGDQSVVKNKDKLSFYGGKTKEVEKRTRVRARVIGHALVNLINESSNIIIMGHINADIDCLGSAIGLHSIINQLDKKSYIILENYNKSSEFLLDKIKKEKGYENTFINSKEALDVMNEESLLIIVDSHSRGYVQNISLVDKFSKIVIIDHHRRATDYIERSILSYIEPYASSTAELVTEMIQYMVEKPNISPIIAEALLAGIYVDTKNFYFKTGVRTFEAASFLKKFGADTIDVKKFFASDLDDYIKKLEIIKSVHVKNDIAIAVCPENIEDNVLAAQAADELLNISGIQASFVFVTIDNEIYISGRSLGDINVQLILEMLGGGGHMTMAGAKLEKINLKEAVEKLELAIDKYLREGEE

SEQ ID NO: 52405 - protein, 318 aa, Clostridium botulinum
MEDIMSKIAFIFSGQGAQYVGMGKDLYKNIPECRKIFEIAEEELQIPLTKICFQGPKDEIDKTENTQPAILTLSIAAMKALEKYGIKPDVTAGLSLGEYSALVCSKVIDFKEAVSLVRKRGQYMEHAVPNGVGTMAAIIGLKKEKVKEICDDLKKVGIVEIANINCPGQIVISGEINAVEKACEMAKEKRALKCVNLSVSGPFHSSMLKEAGENLYEELQKIRFNSIEVPFITNVTGDFVINTSEIKDLLKKQVMSTVLWEGSIKTMIDFGVDTFIEIGPSKVLSGFVKKIDRKVNILNVEDIDSLNKTIEKLKTINS

SEQ ID NO: 52406 - protein, 307 aa, Clostridium botulinum
MISAKMVKDLREKTGAGMMDCKKALTECDGDLEKAVEVLREKGLAAAAKKSGRVAAEGIVSTYISEDMKNGSIVEFNCETDFVSVNELFVELANNLSKQAAFSNVSTAEELLEEKYIADESKLVKDVITELIAKLGENMNLRRIAKLSVDKGVITSYIHGGGRIGVLVKLACEKEDAKLAEIAKDVAMQVAATNPLFLNRDGVDTDTLEKEKEIYRVQALNEGKPEKVVEKMVMGRINKYYKENCLVEQLWVKNGDYTITKYLQEQSKEIGADITVEAFVRYEKGEGIEKKEEDFAEEVQRQMNQGK

SEQ ID NO: 52407 - protein, 413 aa, Clostridium botulinum
MDFTNLKNTDPELLDMIKKEEERQEYNIELIASENFTSLSVMESMGSLLTNKYAEGYPHKRYYGGCEFVDEVEDLARERLKKLFAAEHANVQPHSGSQANMAVYMSVLQTGDTILGMDLSHGGHLTHGSPVNFSGKLYNFISYGVDKETETIDYEKLKKIALENRPKMIVSGASAYPRIIDFQKIREICDEIDAYMMVDMAHIAGLVATGLHPSPVPYADFVTTTTHKTLRGPRGGAILCKEKYAKAVDKAIFPGIQGGPLMHTIAAKAVCFGEALREDYKEYMQQVVKNTKVLGEELKNYGFRLISGGTDNHLLLIDLTNKNITGKDAEKLLDSVGITVNKNTIPFETLSPFITSGIRIGTPAVTTRGFKEEEMKKIAYFMNYSIEHREENLSQIKEQIKEICKKYPLYQNA

SEQ ID NO: 52408 - protein, 397 aa, Clostridium botulinum
MAKAKFERSKPHVNIGTIGHVDHGKTTLTAAITTVLAQKGGASATKYDEIDKAPEEKERGITINTSHVEYETANRHYAHVDCPGHADYVKNMITGAAQMDGAILVVSAADGPMPQTREHILLASRVGVQYIVVFLNKADQVDDPELIELVEMEVRELLNEYGFPGDDTPIVVGSALEVLENQDNAEKTKCIDELMEAIDSYIPTPERATDQPFLMPVEDVFTITGRGTVATGRVERGVLHTGDEVELIGMKQEVSKTVCTGIEMFRKILDEAMAGDNIGALLRGIQRDEIQRGQVLAKPGSVTPHKKFVGQVYVLKKEEGGRHTPFFNGYRPQFYFRTTDVTGSINLPEGVEMVMPGDHIDMAVELITPVAMHENLRFAIREGGRTVGSGVVTTISE

SEQ ID NO: 52409 - protein, 396 aa, Clostridium botulinum
MNELLIKNVNIIDWCQNFHGDVYIKNGIIEELGKDLNKNCEIFDGRGLTLLPSFIDMHAHFRDPGFTYKEDILTGSRAAVKGGYTMVNLMANTKPICSSNKEVEYVLEKGKEIGLVDIHQCMSITKDFSGDDISHLDSIDKKVKIISEDGKDVMNTRVLIEAMFKAKEKDLIVMCHSEEHDVTNLDTRLSENLMTWRNIALSEFTDCKVHIAHVSTKESMEYIKNAKKKGLKVTCEVAPHHIALTNKIFYRVNPPLREEEDIKVLIEAIKEDLVDCIGTDHAPHSKEDKLKGSPGISGIETSFSTCYTKLVHNNHISLSKLSKIMSKNPADILGVNNGEIKIGREADLVLVDTKEEYKVKSEEFHSKGKNTPMDGMYLKGRIKVTFKAGCIVYSEF

SEQ ID NO: 52410 - protein, 543 aa, Clostridium botulinum
MCIKYINFRRKEGNMKKMKSIKKATAMLLIALFTLPIIFTGCSNKKEQSEKDDKKGKTVVYGAEFEDEKLNPVLAPAYANDLIFRGLMRFDKDNKPQCDIAESYKKSTDGLTYDFKIKKGVKFHDGKELKAEDVVFTIKSIQDPKVNTEMKPEFEEVKDIKAEGDYNVKVTLAKPFPALLDKLTIGIVPKHALEGKDLNNAEFNQKPIGAGPFKFVKWEKGNNITLSKFEDYYGKDKTGNVEKFIFKFIPDYNVRAMQLETGEIDLAYVEPSQVAKLEKLEKIKIYNENTADYRCFMFNMRKELWKDVNVRKAFNYAVDRKGMVDGILKGFGVEAYSPLQKNKFNNANVEKYSYNLEKANELLDKAGWKKGQDGIREKDGKKFEFTLTAPSTDEVRVKIANYLASQFKKIGVTVKVAALDWNAIKIDECEAFVLGWGSPYDADDHTYKLFHSSQIKNGNNFGAYSNPKVDKLLEEGRTTEDEEKRKEIYGKLQEELANDPPYNFEIYVNAIYAVNKKVTGIKEKILGHHGAGFIWNAEEWKVQ

SEQ ID NO: 52411 - protein, 145 aa, Clostridium botulinum
MKKRNLLNKYIAMIDRASQGYLDEALKKYELSSGTYPFILVLYDNEGINQNALSEYVKVDKALSARAIKKLIELGYVEKIINSKDVRAYKLYLTEKAKAVVPEIRKASDGWLHIITNGLTEEEKETVECLLKNMYMNIKESKAKN

SEQ ID NO: 52412 - protein, 284 aa, Clostridium botulinum
MEKNLAQMLKGGVIMDVVNPEQAKIAEEAGAVAVMALERVPSDIRKQGGVARTSDPKMIKEIINAVSIPVMAKVRIGHFVEAQILEAIGVDCIDESEVLTPADDLFHINKKDFKVPFVCGARNLGEALRRIGEGASMIRTKGEAGTGNVVEAVRHMRTISSEMRKLQLTPKEELMTAAKEMGAPFNLVEYVAEKGKLPVINFAAGGIATPADAALMMQLGCDGIFVGSGIFKSDNPEKRAKAIVKATAHFKDPEVLAKVSENLGGAMSGLEISKLETEFAERGW

SEQ ID NO: 52413 - protein, 394 aa, Clostridium botulinum
MNYSFIFASLCLLSFINFKNNINIAYFSSNQSLDLVQILGIALILISISLLQTKGKRQKYLHKLWRDKMLKNINDKKLGLILVLLAAMFWGYVGVPTKHLADLGFDNYTISFFKTSIPAIFYFIYSFRRDPSLFKVDKKGILFFIIYGIVVIAGCFIAFNITINLLPLALALATMFLYTSQIWVVTISYFMFKEKFTTQKAISMLLILIGCFMMCEMHKLGSFNLSTKGIFWGLISGFTFALQILLAKVSNEKYHYNHNSLLTYSFLFAAIFLFPFMDMKNNIHIFKNSNNLFFLFKNIFWSVVGTLIANTAYVKSVEYIEASIASMVSSLELVIASVLGFIVFNQSLNLVQILGMALILVSIILLEMKKSVFLKLFKKPNKNLEIISETTYEN

SEQ ID NO: 52414 - protein, 265 aa, Clostridium botulinum
MAADNVYMPFKSEILDIKKHTDIEYTFRMSYEGEVKPGQFFEVSLPKYGESPISVCEIGEGYVDLTIRRVGVVTDEIYNYNIGQSLFLRGPYGNGFNLDNYKNKEIVVVAGGTGVAPVKGIVDYFSKNPKECKEFNLIVGFKTINNILFKEDIEKWKENINVTVTLDVAEEGYKGNTGLVTKYIPELNIKDKENVQVVVVGPPIMMKFAVAEFLKLGIKEENIWISQERKMCCGLGKCGHCKIDDTYICLEGPVFNYVKGKTLID

SEQ ID NO: 52415 - protein, 663 aa, Clostridium botulinum
MVKITYPLFCLKESVNMIGTKLGNRYELLEKVGEGGMATVYKAKCHYLNRFVAIKILKEQFCSDKEFVEKFKREATSVASLSDNNIVNIYDVGSENNIHYIVMEYVDGKTLKELIVEKGKIDPKETVRISKQIASALVCAHRNNIIHRDIKPHNILVTKEGIVKVTDFGIAKASNSATITNSSKVMGSAHYFSPEQAKGSFVDSRTDIYSLGIVMYEMLVGKVPFDGESPVSVAVKHIQNEVVAPKEIDDKIPESLNSLVLKCLEKNPVKRYQTIKNLEEDLARIENNENILNGSSNISENDVTRVMDTAVINDKIKEMAQNDEYEDDDEEYEDDDEEIEDKKKRSNKGKTNKKLILGIAMAVLFLVVGSVSAYLAFNKSGGKKVEVPNVVGLTKEEAEKVLSEKKLKLVVAQKVKNEKKEGTIIESYPKSGEKVAENSEVRVSISSGNVVVVPNLKGMELEAAKKAIQDLKLKVGNVKYEFNDNVASGKVISQTPDIDAELKEGEEISLVISNGPEIKYSTVPNLIGKSIDGAQNALANAGLSMGGSKAIITEDQSLDGQVASQSIGAGQSIKQGSSVSISYYKYKKPEPKPDPKPDTDTGKDPGTDTGKNPGTDTGKDPGTDTGKDPGTDTGKDPGTDPGTDTGKDPGTDTGKDSGTTPKK

SEQ ID NO: 52416 - protein, 400 aa, Clostridium botulinum
MSMNYNKKSIEDIDVKGKKVLVRCDFNVPLNEGKITDENRLVGALPTIKYLMEKGAKIILCSHMGKPKGEPKKELSLLPVAKRLSEMLNKEVIFADDDNVVGENAKKAVEDMKDGDVVLLQNTRYRKEETKNEEVFSKELASLADVFVNDAFGTAHRAHCSTVGVTNYLKEAACGYLIQKELKFLGNAVEKPERPFVAILGGAKVSDKINVINNLLDKVDTLIIGGGMGYTFLKAQGYTIGNSLVEEDKVEYSKEMIDKAKEKGVNLLLPIDNVVADKFDKDASPVITEDQNIGEGYMGLDIGPKTAKIYSDAIKSAKTVVWNGPMGVFEFKSFANGTIEVAKAMADSDAVTIIGGGDSAAAVNILGFGDKMTHISTGGGASLEFLEGKELPGIAALNDK

SEQ ID NO: 52417 - protein, 58 aa, Clostridium botulinum
MLIIYKISKGGAVKMFMTYQPKKRQRKKEHGFRKRMKTSSGRNILRKRRQKGRKRLTA

SEQ ID NO: 52418 - protein, 504 aa, Clostridium botulinum
MSKEDNVMNSFEEQANELMKERFQKLKELQSNGKDPFDVYKVERTHTSKEVKENYEDLEGKTVTVAGRLMSKRVHGKAGFSDIHDRYGKIQLYIKINDVGEEKLKEYKTFDIGDIISVTGTVFKTKTGETSIHITDFQLVCKSLRPLPEKWHGLKDPDLRYRQRYVDLIINQDVRDTFMKRTAIIKTMREYLDNKGFLEVETPILSPIAGGAAAKPFITHHNALNIDMYLRIATELYLKRLIVGGFEKVYEIGRNFRNEGMDIRHNPEFTVIELYEAYADYNDMMEITENMIAYICEKVLGTTKVQYEGTEIDFTPPWRRLTMVDAVREYAGVDFNTIKDDIEARTIAKEKHIEFKKELKDCTKGDVLIGLFEEFCEDKLMQPTFICDYPVENSPLTKKKRGNEAFTERFEGFVFGREVCNAYSELNDSIVQKERFMQQLKERELGDDEAYMMDDDFITSLEVGMPPTGGLGIGIDRLIMFLTDTHSIRDVILFPTMKPQPNNQ

SEQ ID NO: 52419 - protein, 122 aa, Clostridium botulinum; identical to SEQ ID NO: 52191
  MISC_FEATURE (19)..(19): X=any amino acid
  MISC_FEATURE (106)..(106): X=any amino acid

SEQ ID NO: 52420 - protein, 254 aa, Clostridium botulinum
MESKVYFIGAGPGNPDLITVKGRDILTKADVVIYAGSLVSKEHLDYCKEGVEVYNSASMTLKEVINVIQKAHNENKSIVRLHTGDPSIYGAIKEQMDELDKLDICYEVVPGVSSFAAAAAAIKKEFTLPGVSQTVILTRVEGRTPVPEKEDLEVLASRGASMALFLSVGMIDKVVTKLRKGYGRNVPIAVIQRATWQDEKVVIGTLDDIAKRVKDANITKTAQILVGDFIDCKYDKSLLYDEKFTHEFRKGINE

SEQ ID NO: 52421 - protein, 238 aa, Clostridium botulinum
MKTEMLGYSVFNGSKEELLNIIDKYEKVNIISGNPEVLYNGLNNEELFKNFTDKDSIIIPDGVGVVLASKIIKSPVKEKIAGIEVMDSILKKCNENGKAVYLLGTTEDVLKECERKLLIKYKNLNIVGKHNGFFDMDSCKDILEAIRESRPYALFIAMGCPRQEKFISKYMNELPCKIYMGVGGSFDVFAGKVKRAPRWMINCNLEWLYRVAKEPYRIKRLASIPKFLLKVALNKRSY

SEQ ID NO: 52422 - protein, 335 aa, Clostridium botulinum
MQYNNFYINWRYKMNFIDMHCDTIYALINKKPCSNKNIAISENETLYKNSLSVDIEKLEASNSLAQFFALFIDINETNSPLKTTLNMLDFFHNELAKHSKYIALAKNYEDINKNLSNNKISAFLTIEEGAALEGTLYNLRNFYRLGVRLITLTWNFPNEIGFPNCKKEFMNKGLTPFGLEVVEEMNKLKMIIDVSHLSDGGFYDVVRYSKSPFVASHSNARTITNHPRNLTDDMIKILSNKGGVMGINFEKTFLGQSEEGKIPEMIDHIKHIKNVGGIDVMCIGSDFDGIETPSEIKSSDEIEKLINALKKESFHESEIEKILYENALRVIKEIL

SEQ ID NO: 52423 - protein, 765 aa, Clostridium botulinum
MEDSYDLIGKSINRVDAVAKVTGRAKYCSDHFEANSLVGMVLRSPYAHAKVKNIDTKEAESLDGVEAVLTYKNVPNTKFPTAGHPYSLDPSHRDIEDYVLLTDKARFVGDAVAAVIATDELIAKKALKLIKVEYEVLPFVIDQEEAIKEGAPVIHDERPNNIVSDFGITVGDPDEVFKNADKIYKGQYETQIVQHCQMETHNAMAKLDEKGRMLIITSTQIPHIVRRIVSKACNLPIGKIRVIKPYVGGGFGGKQDVIIEPLTAIMSLAVNGRCVRLQLSREEAIVATRTRHAMRVNIKIALSKDNKIEGYDIENFVNNGAYASHGHSIAMSAGSKIRPLYDIKAEKYRPKTIYTNLPVAGAMRAYGIPQMCFVIESMIDDICNDLNIDPVDFRLNSFIKKGHIDKESDLVVRTFGLPECLKRGRKLIDWEGKRELYKNQNGPIRKGVGMACFSYFSGTWPVSLEAAGTRIVMNQDGSVQVQVGATEIGQGSDTVFSQMAAETIGIPFDMVTIVSQQDTDITPFDTGSYASRQSFIAGQAIKKAATEVKRKALKIASDKCGLDAELLDIVDAKVIEKGLRRELYTLEEIAMEAYYNREKYAPITSDLTVKVKNNAIAYGATFVEVEVDIRTGKIKVLDIYNIHDSGKILNKKLAEGQVHGGVSMALGFALSEKFIIDEKTGSIINNNLLHYKLPTIMDTPNIKCEFVNTYDPTSSYGQKSLGENTTISPAPAIRNAVLNATGVAFNKLPMDAQSVFEKFKEVGLI

SEQ ID NO: 52424 - protein, 223 aa, Clostridium botulinum
MKTYKVLEIKQSVFENNDRQAELLREELKKKGIFLLNLMSSPGSGKTTTLLRTVKALKNEMNIGVLEADIDSEVDANKVSQSGVKVIQLHTGGMCHLDADMTKQSLNGLGTENIDLAVLENIGNLVCPAEFDTGASRNAMILSIPEGDDKPLKYPLMFSIVDVLLINKIDAKDYFEFDLEAVKERVRKLNPNIKVIPISAKTGEGIEEWIDWIRKEVKIWKES

SEQ ID NO: 52425 - protein, 331 aa, Clostridium botulinum
MKFIGYRTLKTAIGATIAMSIAGALGLKYSVSAGIITILSIQNTKRKSLSVAIQRMIACLLALTISSVLFTMLGHNAIVFGLFLLVFIPLAVKFNLQEGIVVNSVLATHILAEKHISINLFINEILLMFIGAGIALLLNLYMPSIEKEIWEDQFYIEEKMKEILIQMSIALRELSVSLKEDKLFNDLEERLFKAKKRAYINLNNYFLLDVSYYADYMEMRIQQFETLKKMRQHFHKFFMTYEQTEMIADFTKKVADSLHEENTGDDLLLDLEDLRGSFKKMNLPSTREEFENRALLFQFLNDMEQFLIIKNEFKKTIDKLDYERKDYKIKN

SEQ ID NO: 52426 - protein, 410 aa, Clostridium botulinum
MRMLNMKKPELLAPAGNLEKLKTAINFGADAVYLGGSKLNLRAFADNFTDDELQEGIKYAHDRGRKVHVTINVFPRNEDFNGLEEYLKKLYEFNVDAIIVSDPGIIMTARETVPNLEIHLSTQANTVNFKTINFWYKQGVKRTVLARELTLEEIKTIREKIEKDCQLEAFVHGSMCMSYSGRCLLSNYMTGRDSNRGACAQPCRYKYYLMEEKREGEYFPILEDDKGTYIMNSKDMCMIEHIPELVQSGIDSFKIEGRMKSSFYVATVVKAYREAIDAYFEDSENYTFKERWMDYLKKASHRAYFTGFYFNDPNKQLHESSSYIRTCDIVGIVKEFNEETMEAIVEQRNKLLDGDELEVLRPEGPIFKINITNMRDKNDKKIDSAPSAQMVFKVNTDKSLKENDILIKNK

SEQ ID NO: 52427 - protein, 99 aa, Clostridium botulinum
MPFTSNNSWKISGVLLFILILFLANFLIFSVLPVVIVAGLVLFGVYKLVNYIKSWKINKKGFNNRKNKEKNFEKFDNLGPNDIPDISEENIIDVDYKEV

SEQ ID NO: 52428 - protein, 679 aa, Clostridium botulinum
MYISKLEINNFRCYEDVDIEFNEGLNIIIGENNCGKTTIMRALEYIFNRSRVSTPDTNDFNKELVNKALEIGEQPPEITIIATLKSSSSDKLEDKAVVASWLTKLETPWEATLTYKFFLPESDIKEYKEEIKSIKKSQKNYIQKRWNIFEKYLKKYVSRIYGGNSESKNKVESEYLNKFHCELLDALRDVESKMFTGKNALLKEVLGYFKDSHIEIEDGDEFSEEDKKKLIEKEKKDRKKEFDEYADKIVKNISKRVGNNDVLDFAEKTGASIGGIPTLGGNLEENDVLSVLKLMIKNKTGIEVPIINNGMGYNNLIYISLLLSKFKMITSDEYGENAKVFPILLVEEPEAHLHPALQYNFLKFLKDEVSNQKISRQIFITTHSTHITAAVGLDQIICMERDESGNTTARYPGKVFSDSDKEDIKSKKYVERYLDATKSTMLFAKSVLFGEGLAEQILLPVLAEQVDRSFDKNHVAMVRVDGVTFKHFIKLFGAGIKKHNLKYALTKRVACINDSDPQKIIKEKEEGKTRRWKKCWPFEIDLDTEHYDYKAFSGTIKNLLEDVKECKNVNVFYNITEKGKTLEYDIALENYDSDDFFNDKIEIMDFQELNKSSWKKEEKVKAKKAASYLNYAQDTKGEAAFELAEKIRSEEINIKLPNHIQKAFNWVCYMDDEEVKEDE

SEQ ID NO: 52429 - protein, 225 aa, Clostridium botulinum
MYKMYLGINDGEEGFILPVLPEKIEFDEDGNNKTYDIINLGEINTINKPKLMEISFESFFPKHKGPYVSSEQLFEPSFYIAKIREWRDKKQKIRFIFTGSPLEINDLFTIENFKPSEEGGEVGDVHYSIELKRYKNYSAKKVVIVTPKTAAANQSVKKVIANSKATRPSNTNKPKTHTVSGNDTLWHIAKRYLGDGNKWPQIYNLNKDKIKNPNLIYTGQVLKLP

SEQ ID NO: 52430 - protein, 217 aa, Clostridium botulinum
MRYLNDAFVQFFKFIHGAVSNVISNPNFSYGIAIILVTLIIRLLILPLNIKQTKSSLRMNELQPEIKKLQAKYKNDPQKLNQKTMELYKEKGVNPLGGCLPLLIQWPIFIALYYVFNTLTGINGISFLWVKDLAKPDVVLAVLSGATTYFSGTLMTTADSSQAGQMKSMNIGMSIFMIVISWKLKSALVLYWVINNLIQIIQTVIMKKMELRGKVEA

SEQ ID NO: 52431 - protein, 292 aa, Clostridium botulinum
MNINWFPGHMAKTRRQIKESLKMVDAIIEIRDARIVSSSKNPDIEDICGNKPRIILLNKKDLAEDKVTKKWIDSLSQDNIKVLAVNSVTGEGLNKIKPTLNELLKEKHERMKNKGLVKIVDRVMVVGIPNVGKSSFINKMAKNSIAKVGDRPGVTKSKQWIKTKIDIELMDTPGVLWPKLDSEIVQLNLAFTGAIKDEIMDIETLALRLVERLQVKYPERLMKRYKLEALEENPLNNLDNIGRKRGALISKGEIDYNRISVIILDEFRGGKLGAISLEDPEDITKDNIQIEE

SEQ ID NO: 52432 - protein, 306 aa, Clostridium botulinum
MNQYKNFIMQFEDIVGNNNVLIDEPMKKHTSFKVGGPADLLITPTTLEQVKDSIILCRNNSIPYYIIGNGSNLLVRDGGIRGVVIKFLKLGDIKVEGDRVIAQSGAPLTNICNEALKSNLGGLEFACGIPGSVGGAVTMNAGAYNGEISQVIESAKVIDKDGNVFLLNKEQLDLGYRMSAIQKYHYIVLEVTFKLHNSEYDTIKNRIMDLNRRRTEKQPLEYPSAGSTFKRPEGHFAAKLIEDTGLKGESIGGAQVSEKHSGFIINKGGATAGDILNLIEFVQNKVMEKFEVDLHTEVRIIGEENN

SEQ ID NO: 52433 - protein, 256 aa, Clostridium botulinum
MSKDLISTDEYIKIKKKRKRIKKIVVLFIFLISILVTLCLKIPYFNIESIEIKGNVNIPKEVIKDSSTIKTGNNIFYTNKKDAIENISLNPYIEEVKITKKLPNKLQIYVKEREALFYNKVDNDFFIISKNGCVLEKRKEIKNMKLINLQGFEFNESKIGSALKAKDERAVKILNDFGVLLKNNTSDVIFTQLDLRNLLDIKIYYNGICVKIGTSDQIEKKLNTAINILKRDELKKAKKGYVDVSYEGNPVFYIEK

SEQ ID NO: 52434 - protein, 1178 aa, Clostridium botulinum
MNMKPKKLVIKGLNSFIEKQEIDFETLVNRGLFGIFGPTGSGKSSILDAITMALYGDIARDSTQFINLDTDSLFVSYEFQIASVDERDDYIVSRTVKRDKKGGYKTTAARLVKNTYEEEEIIADKPRDIQKNIESIIGLTAEDFTRSVVLPQGKFSEFLKLSGKSRRDMLERIFGLEKYGKKLLERIRKARNKEISSLTLIEGRLEQYKDISKEKLQELKIQYENLLKEKSKIAKEKEESNKLYEKYKNIWELQEELNIYLNKLENLKKGLLNIEEKRIKVEKGKNALSVKPYIDELSKIESDRNINEEELQTAMEQLRNIDLNLKNIEEEYKKASEDKEEKIPLLMQKENNLLQAIEIKKKVEVIKRERADLVQKYKEKESLIRNKNIDKKHIEENINKISKEVKLKEEEINSLKIDGDRREKIQKLYEIDKEYKRLNLEVCNITERINIKIKSLKEYELKYKDTLETQRDINKKLEYVSGKREDLIKNSPGNNDILLDKKDYINKLMEIFNDLNKINDRKQELEKNLKEKQVVKLNLEKQHKEILEILKLKEETIVSLEEKIKDIEKMDMASILATNLKDQEPCPVCGSMHHIKLAKKVDIKELEILKEDHRNAFKKLENIKIEEKEKNILLISVEKEEELILEELENLKEQLKGRNLEDLRGELQKEKNDFEKLNENIKDWEKEKLILEENINKLQKEKNDIDKEEAKNHEAISKEKELIASIKKDMEEREILFKEKEKEYLNLKEEIKVSNVEEEISRVRASDKKIEEYNKVIKNEREILESENNKREETIKQINIMEIELGKIIEAGKEKKNFIDKEEEEIKKLNVGEISIEHLDQVKKSIGNIKEKEEILKSKLELEGKNREILWKNKISKEQIKINLEKLHNEKYIQLNKVLEENKFHTLEDAKLMLICKEEIKELEKEIEEFEKEYNSLNINIERVNKKLKGERIEEGSWKDIRLKKENKEKELEDIIKNIVIEEKLISDMENNIKSLKNLLDEKEKVAHKKALLEDIDKLVQGNKFVEFVAMNQLEYIVFEASKRLKDITRGRYALELDCNGNFTMRDDFNGGGIRPTNTLSGGETFLTSLALALALSSQIQLKGSSPLEFFFLDEGFGTLDSELLDTVMTSLENLRSDRLSVGIISHVEELKNRVPIKLIVDPAVPGEGGSKIKIEYS

SEQ ID NO: 52435 - protein, 596 aa, Clostridium botulinum
MCSLNKKWMLRRNKLNIRDIANKSGISETLCTVLVNREIYNLEDIKDFLEPSLEKLYNPLLMKDMDKGTEIIKRSIIDKKKIAIYGDYDADGVTSTVILYIALKECEANVIYYIPDRETEGYGMCTERVERLKAEGVEVIITCDNGIAALEQVERAKELGMTVVITDHHELPFIENEKEEREYVVPKADAIINPKQKDCYYPFKMLCGAGIAFKFSKLLYEKLNMNPNKYKELLQFAAIGTICDVVDLKGENRIIAKLGLESINNTNNLGLRALIKETSLNEKNITSYNVGFIIGPCINATGRLDTAALSVELFLAKDIKRAEKLAKELRNLNTERQEITMVGVEEITYAIENSSLKNDKVLVIYKENIHESIAGIVSGRIKDAYNRPTIVLTKGKEMPKGSGRSIDGYNLFEELMKCKEYIYKFGGHPMAAGLTIEEKNINKLREELNKNCNLKDEDFIPKIRIDKRLALKEVNLELIDSLQCLEPFGKGNSSPILAEKNIKIEGIRILGKDQNTLKLTCRVEDTNKRIHAIAFGKVDEFKRDLENIYEDENVENIITNPLMAGLKLDLIYYPMINEYNGNVYTQLRIIDYRINR

SEQ ID NO: 52436 - protein, 206 aa, Clostridium botulinum
MARYTGATCRLCRREGLKLFLKGDRCYTDKCAFARRGYAPGQHGQSRKKVSNYGLQLREKQKAKRIYGILERQFRGYYEEADRRRGITGENLLRLLEMRLDNVVYRLGYGNSRTEARQLVTHGHFLVNGKKVDIPSYQVSANDVITVCDKSKATEKFKTFAENPKTLPAWLSGNVEGFEGKVERQPAREDIDVPVNETLIVELYSK

SEQ ID NO: 52437 - protein, 492 aa, Clostridium botulinum
MKNFTIGVIIKMKKSLTFKDMVLMTMTAILGLRWVAVSAKYGASCAVLWGIAALLFFIPSALVAAELGGKYPEQGGLSVWVTKAYGEKMGFLVSWLNWVSKLFFYPGFVTYAAVTFAYVIDPSLANNKLYNLFMVLGIFWFITIWSFRGTGNSKIFAVIGGLVGSVLPALLIIILGYASAFVLKRPLATTYTLQGMIPDFTNIANLALLSSVMFGLTGAEVTAAFAGEVEDAKKTIPKAIIFCAIFITILYILCSSAITFVVSPEKIGAANGLIEAFRLITEQFGIGQWFLTLMAVLMTIEALGGVSLYIMSPITMLFETSKNGVLPPFLTKTNKNGVPINALLVQGIGISIVIIITTLLPTVNAIYSILIIMTAITGLIPYLLMFASYIRLKKMEKLQAKGESTEEFYEISKSKQFSTFVSIVGLISVIFGIVTSFFPPSDYTTTGQIVFFELLSIGGPILLSWIGWRMFSKYEQKRDTGEIQSTNNSLSE

SEQ ID NO: 52438 - protein, 365 aa, Clostridium botulinum
MKLGIVGLPNVGKSTLFNAITKAGAESANYPFCTIEPNVGVVSVPDKRLDVLEKMYNSKKKVPTAIEFYDIAGLVKGASKGEGLGNKFLSHIREVEAIVHVVRCFEDSNIVHVDGSVDPIRDIETISLELIFSDIELMQRRIEKNSKLAKSGNKEAKTEEALMKRIVAHLEKGKPVRTLELEEDEEKLVKSYFLLTSKPVLYAANVSEDDLMSGNPENEFVKKVKEFAKAENSEVITLCARLEEELSTLEDDEKAEMLSEYGLKESGLDKLVQSSYKLLGLISFLTAGQVEVRAWTIVKGTKAPKAAGKIHTDIEKGFIRAEVISYDKLIECGSEAHAKEKGFFRLEGKEYVMQDGDIVNFRFNV

SEQ ID NO: 52439 - protein, 337 aa, Clostridium botulinum
MTMDIKLFPIKSKGKYGYVNVKGETCIEIKYGYAEEFIEDLAVVAIDDYFGFIDKKGNEIVKIEYDDVYDFVEGLAAVDKEGKLGYVDAEGNVVVTPQFKEANDFSEGLAAVQLGYKWGYIDKEGKFVVKPEFFDAGDFREGLAMVQPGGKVGYIDKLGNMLIEPNYDYGKKFSEGLAPVKLKNKYGFIDKSGNMVIKPKYYEASIFKEGLAAVEIMEKYGFIDKNGEMIIHSKYDWADDFCEGIAAVSIEEKYGFIDKEGRDIIPLKFDSVGVVSEGLIAVEMEGRWGYINNKGEFIIKPIYDRAEKFVDGVAKVIFENRVKYIDENGAYLGVKSI

SEQ ID NO: 52440 - protein, 175 aa, Clostridium botulinum
MLCDKCNKSNATVHITKVINGHKEEVNLCESCAKQEQGIGITDNLDLMSSFSVQNILANILDYMNKPQEKNISYEITCPHCGTTYNEFKTKGLLGCSECYKVFNDSIIPIIKRIHGNVEHTGKIPEKSGQYIIKQRNLQQLRDKLQKCIKEEEYEKAAEIRDEIKLLENEKEEEA

SEQ ID NO: 52441 - protein, 102 aa, Clostridium botulinum
MAKQKIRIRLKAFDHSLLDQSALKIVETAKTTGAKVAGPVPLPTEKDIVTILRAPHKYKDAREQFEIRTHKRLIDIISPSPKTVDALMRLDLPAGVDIEIKL

SEQ ID NO: 52442 - protein, 239 aa, Clostridium botulinum
MEFFNILQSACNDVNLDFNDKKYNQLISYKNLIQEWNKKINLTAIVEDDEIIKKHFIDCIKIFKSSPIGEAKSLIDIGTGAGFPGIPIKILKEDIEITLLDSLQKRINFLNTVIGELQLKNIQCLHGRAEDYAQEIQHRQKYDIAVSRAVANLAVLSEFCIPFVEKGGYFIAMKGPSVEEEITAATKSIEILGGKIEDIIKIDIEDTDLKHNLVIIKKVKETGKRYPRKPGIIKKNPLK

SEQ ID NO: 52443 - protein, 232 aa, Clostridium botulinum
MAMEKILIVDDEEHICELIKFNLENNSYNCICALNGIEALNIAKEEKPDLILLDLMLPGMDGYEVCKEIRKDNNIATTPIIMITAKGEELDKVLGLELGADDYITKPFSVREMVARVKAVLRRRTTINIESKSYILGNIVVDFEKHSLTKAGEKIELTLKEFELLEVLIKNKGKVMTRDFLLDRIWGYEYIGETRTVDVHIRHLRKKIEDDDKNPKFIETIRGIGYRFNSEF

SEQ ID NO: 52444 - protein, 445 aa, Clostridium botulinum
MEEHTMKLWGGRFKEEESKLMEDFNSSLSFDKKLYYEDIKGSIAHVKMLTNQNIIKEEEKEKILLGLEEILKEIDEGILKIEGDYEDIHSFVEINLINKIGNVGKKLHTGRSRNDQVALDMKLYAKKSTEEVIECLKELMDSLIKVGNENNYIMPGYTHLQRAQVVTFRYHLLAYFEMFKRDEKRLENALEILNESPLGSGALAGSTYNIDKEYTAKLLGFRKPVDNFLDGVSDRDYIIELISKFSIIMMHLSRLSEELILWSSSEFRFIQIGDAYSTGSSIMPQKKNPDGAELIRGKIGRVYGDLISILTVMKSLPLAYNKDMQEDKEPFFDAKDTVISCLKVMEGIISTLKVNKENLMKSVKKGFLNATEAADYLVNKGMAFRDAHKVIGEVVIYCEDKNSAIEDLSLEELKQFSDLFCEDIYEFIDYKNSINKGIKKEMGYF

SEQ ID NO: 52445 - protein, 198 aa, Clostridium botulinum
MFLKGGIMVNIIWGIIFLVGVMFGVFSGNGEQLSKSIIESTNSTVKLVIGLVGVMSLWCGIMKIAEESGLTDKIAKCIKPILKVIFKDSKNDNKALGAITMNLTANMMGLSNAATPFGIKAMKELKRLNVKEEEASNDMALFLVLNAACIQLVPTTVISIRAAMGSKNPGEIIIPAIIVTSTAAFCGVIFCKILQKYF

SEQ ID NO: 52446 - protein, 386 aa, Clostridium botulinum
MIRRKNVNLNKSFNLKRHIKYFDVFLFIVIILISILGIVMISSATSNFENSRKYIITQILSLVIGLVFMFITIYIDYRNIGRAYKIIYIFNFLLLAGVILLGTGKDQWGAQRWIRIGGIGIQPSEIAKIGFIITFAKFLELIKDDLNKIKYLLAAFCYIGVPIILVMIQPDLGTALSFVFISIAMIYICGIDYKYILGGFLACIVIIPIAWQYVLKAYQKNRILIFINPDSDPMGGGYHVLQSKIAVGSGEFFGTGLFKGSHAQNFLPEKHTDFIFALIGEELGFIGSIIVVLLLLIIVLRCISIAKSAKDNLGCYICVGVASMIIFQTFINIGMCIGIMPVTGIPLPFISYGGSSLITNFVAMGLVLNVGLRHKPINFFKGSINN

SEQ ID NO: 52447 - protein, 463 aa, Clostridium botulinum
MDITLVKSLYRETEKHMDKEVKINGWVRTVRDSKNFAFVEVNDGSFFKNVQVILESSLENFKELCKMPISTSVEVEGIVQPTPNAKQPFEIKATRISIEGKSSTDYPLQKKRHTFEYLRTIAHLRPRSNAFSAVFRVRSLAAYAVHKFFQERGFVYTNTPIITGSDCEGAGEMFQLTTMDLNNIPKTEEGKIDFSKDFFGSPANLTVSGQLSAETFALAFRNVYTFGPTFRAENSNTARHASEFWMIEPEMAFAELTDYLDNAEDMVKFVINYVMENAPEEMAFFNSFVDKGLFDRLDNVVNSDFKRITYTEAVELLQKSGVKFDYEVEWGIDLQTEHERYLTEQIFKKPVFVTDYPKDIKAFYMRLNDDGKTVAAADLLVPGVGEIIGGSQREERLDVLEKRMEELNLNKEDYWWYLELRKYGETKHSGYGLGFERILMYITGMTNIRDVIPFPRTPGSAEF

SEQ ID NO: 52448 - protein, 336 aa, Clostridium botulinum
MRLFGITKDMGIDLGTANTLVYIKGKGVVLSEPSVVAINKDVNKVLAVGDEAKQMIGRTPGNIVAIRPLKDGVIADFDVTQIMLKKFIEKVSPKGGFTNPRIVVCFPSGVTEVEKRAIDEATKSAGAREVVLMEEPMAAAIGAGLPVNEPTGSMIVDIGGGTTEVAIISLGGIVTSKSLRVAGDELDQSIINYIKKEYSLMIGERTAENIKVELGSAYETDEDKTMEIRGRDLITGLPKVITISQKEVREALSEPVISIIEAIKTTLEKTPPELAADIMDKGIMLAGGGALLRGLDQLINEETHMPVHIAESPLDCVAVGAGKALDTIDKILDSKK

SEQ ID NO: 52449 - protein, 554 aa, Clostridium botulinum
MSNKDSVKVIPLGGLGEIGKNITAFEYGNEIVIIDCGISFPDEEMYGVDLVIPDITYLLNNKDKVKAIFLTHGHEDHIGSLPYILQQLNRPVYGTALTLGIVENKLKEHNMLSDCELNKVEAGDIVELKNLKIEFIRNTHSIADSCSIAIHTPVGVILHTGDFKIDYTPIDGLVMDFHRIAELGKKGVLLLMADSTNVQRKGHTISEKSIGETLTKIFSNAKGRVIVATFASNIHRMQQIIDASIEYGRKVAFSGRSMENISKVAMDLGYLHIPETYLITVDEMKNYPNEQITIITTGSQGEPMAALARIAYSNHRKIAIEPKDLFIISASPIPGNEKLISRVINELFKKGADVIYEALEEVHVSGHAYEEELKLIHTLVHPKYFMPVHGEYRHLKRHVDLAMELGMERENIFSLETGQVLEISHEEAKVSGKVRTGSIFVDGIGVGDVGNIVLRDRRYLAQDGMLTIVVTLEKESYSVIAGPDIITRGFIYVKESEDLINEVKGIVKKELENCLENKIIEWYVLKSNIKKSVEKYLYEKTKRRPIVLPIIMEI

SEQ ID NO: 52450 - protein, 408 aa, Clostridium botulinum
MKYVIIGASAAGISAVKTLRTLDKDSQIVMISKDDKVYSRCLLHHFIGGNREIEGLSFIEKDFFAKYNVKWIKNKKVETVDIDKKVVKVQGKISEHYDKLLIASGSYASIPPIKNLREAKRVYTLRNLDDAIAIKEEAKKIKKAAVIGAGLVGIDATMGLLENDVEVTVIEMGNRMLPLQLDQRASKTYEELFRKHNVNIKTSVGAEEALIDGNRNVCGIKLSNGEKIDCDIIIVAAGVRPNIDFIKDERIKIERGIVINDNCETTVKDIYAAGDVTFRAPIWPIAMKQGRIAACNMAGEKKLLDDNFGARNSMNFLGVYTISLGIVEPQDESYKVDIIDKNGVYKKIIHKDGIIYGAILQGDIAYAGVLTELIKNKIDISKIDKDIFDISFADFFNIKENGEFSYKK

SEQ ID NO: 52451 - protein, 276 aa, Clostridium botulinum
MKSIETKNLDIAYEDTLIVKELNMQIPKGKITSIIGANGCGKSTILKSVGRILKPKKGVVHLSGQDISKLSTKEIAKKMAILPQNPTAPSGLTVSELVAYGRFPHQKGFGNLTEEDKRIVKWALAATKLSEFERREVDTLSGGQRQRVWIAMALAQQTDLILLDEPTTYLDLAHQLEILKLLYELNRNQKCTIVMVLHDLNLAARFSDYIIAIQKGDIIKYGPPEEVMTPEVLRKTFNINADIVIEPKSNRPVCITYDIIDENECVQLKEREAVGI

SEQ ID NO: 52452 - protein, 327 aa, Clostridium botulinum
MVVGGIYHMRTIAVLTSGGDAPGMNAAIRAVVRTGLEKGLKVMGIQRGYNGLINGEIFEMDTHSVSDIIQRGGTILRTARCEEFRTEQGREKAAKILKAFGIDGLVVIGGDGSFHGAQLLSKLGINTVGLPGTIDNDLAYTDYTIGFDTSINTVLDAINKLRDTSTSHERVSVVEVMGRNCGDIALYTGVAGGAESIIIPEKEYNADKLCKQILQGKLKGKMHNLVLLAEGVGGANELAKYIEEVTGIETRSTILGHIQRGGSPTCMDRILASRMAYKAVELLISGKSSRVVGIKNGKIIDMDIDEALAVERSFDQELYDIATILSK

SEQ ID NO: 52453 - protein, 307 aa, Clostridium botulinum
MLEKYLEISKEVSEALKENKPVVALESTIISHGMPYPKNAETALNVEKIIRDKGAIPATIAILNGKLKVGLTKDEIEYLGKKGKEVVKTSRRDIPFILAKKLDGATTVASTMIVANLAGIKVFGTGGIGGVHRGAQESFDISADLQELANTDVAVVCAGAKSILDIGLTLEYLETQGVPVVGFGTEELPAFYTRKSGFKVDYKVDTAKELAEALKAKWDLGLKGGMVVGNPIPEEYQMNYDTITKAINDAVKEAEEKGIKGKESTPFLLAKVKDITKGKSLEANIQLVYNNVAVASDLAIELSKLNK

SEQ ID NO: 52454 - protein, 216 aa, Clostridium botulinum
MGFKNDKGEIVGFDIDLAKEVAKKMGIKVVFKPVQWDGVVLSLNNKDIDVIWNGLTITEKRKEQINFSKPYVENKQIIVVNNDSNIKSKKDLNKKTVAIQLGSSSEVALDSDKDFVKSLKELKKYSNNTEALMDLQAKRVDAVVVDEVVGRYYISKKPNVFKVLDEDFGGESYGVGFRKTDNSFREAVDKALDEVIKDGTADKISEKWFGKGIFKK

SEQ ID NO: 52455 - protein, 1279 aa, Clostridium botulinum
MSGTKWTDEQRQAIFTKDCNLLVAAGAGAGKTAVLVQRIIEKILDKGEPIDIDKLLVVTFTNAAAAEMRERIGDAISKGLDEDPESKVLRKQLTLLNKSNIMTIHSFCLQVIKNNFHTMEIDPNFRICDETEGILMKQEAIDELFDELYEIENEDFINLVESYASRKDTRLQEVVLELHRFAKSAPFSYDWLLNMAEEFNVGEEFNFEETPWADMIMEDMKVLLHGFKNMLQQSIDVILNSEGIDYYYEPFKMDLSFINSLLEKSSFKEFRGEIIAYDFPKLPLKRNKDADKEAKERVKKLRDKVKKKIVELKNILDSYENEFIKKEFIFLYPSMKALSNLVILFDKKYEAKKRERDLIDFNDIEHLCLSILTDKNSEGHIIPSDIALDYRKKFAEVLIDEYQDSNLVQEVIMSMVSRVKGYWSFYNGQLMFNEEEINLEEPQICLDIPNRFMVGDVKQSIYRFRQAKPEIFLDKYNEYSEEEGTKNRKVKLFKNFRSRKEVINGVNYLFKQIMSKTIGELDYTEEEALKVGASYGEEVKGEPIELCLMDKKYEISEEVLKEYNVDEEEALDNIQLEGRLVAKKIQKLVGNNLEGGLKVFDKKLGEYRNLQYRDIVILMRATSNWAPIFVEELAKEGIPVFADTNSGYFDTAEIKTMISLLQIIDNPLQDIPLLSVLRSPIASFTDDELIDIRMVNKNITFYECMEIIYRLYKNEKLDSYYSFYIEDENKINKIIKDMNEKLKNKICSFIEKLKLWREKSIHIDIDEFIWFLYVETGYYGYAGALQAGEQRQANLRILFQRAKQYAKTSYKGLFNFINFINKLKFSSGDMGSAKILGENENVVRIMSIHKSKGLEFPVVILSGTGKNFNMTDLNKNILFHRDLGYGPDYVDTERRIAYPSLVKNIIKNKIRLETLSEEMRILYVALTRAREKLIITGLINNMDKTVEDWLNLSEDKNKVPEYAVMSGKTYLDWIGPALIKHKDAVSFREELKMTSELSNIVDDKSKWKIELWNKRELLKEKVEEDEVEISEKIKETLMNLEESNYKEEIYKRLSFKYKYDNASSIPTKLSVSDVKKQFILDEKENTEELFKKLELRKPMFMEEKKKISPSERGTIIHLFMQHLDLKKAENEEDIKEQINRLIEREFITYEQSKVINPYKILKFCRGELGKRILNSNNVNKEMPFSIEIPALEIYKELDKEIYKDEKLIIQGVIDCYFEEEDGLVLLDYKTDYVNDIEEIKNRYEIQIKYYEEALNRITGKNVKDKYLYLFSVDNYIKID

SEQ ID NO: 52456 - protein, 232 aa, Clostridium botulinum
MKVNKLLDSFNYAIDGIIHAVRTQRNMRIHMLSALLVLTACFFYDLSKIELVVVCITITLVIFAELMNTAIEFAIDATTNYYHPLAKVSKNVAAGAVLLTAINAVVVGYIIFWDKLKYINFVLITKIKNSNPYAIFIILAIVCIVTVVVKAIYGEGTPLKGGMPSGHSTMAFSIATIIALITKEFPVVTLSYFLAFIVAQSRVDSEVHSILEVIVGALFGTLFTTFLYKIFG

SEQ ID NO: 52457 - protein, 442 aa, Clostridium botulinum
MLLIGNGKVITRDNTRPIIDNGCIAVDENKIIEIGSTETLKNKYKESQFIDAKGKLIMPGFINTHMHYYSTFARGMANDSPPAKSLCDILTGLWWRLDKVLTLEDVYYSAAVPMIDQIKNGVTTVFDHHASTHAVKGSLFKIAEAAETMGIRSNLCYETSDRDGEKIAQEGINENVEFIKHCNAKNDDMIKGMFGLHASMTISDKTLEKCVDAVKGLNTGFHVHCGEGIEDLEDSKKKYGKGIIERWNNAGVLCDKTIAVHCIYVSDEEMDMLKEKNTIVVHNPESNMGNAVGVSPVLKMYKKGILLGLGTDGYTPDIIESYKVANIIHKHATSDSTVAWTEIPEMLFENNGKITERFIDGKIGVLKEGALADIIVVDYNPPTPINENNINSHILFGINGRHVDTTIINGKVLMEDRKLLHVDEERVMARSRELAKEVWKRF

SEQ ID NO: 52458 - protein, 350 aa, Clostridium botulinum
MVIGPLFAIPRTAATVYEIAVKPVAPGVPIIVISLIFFVLTYIFVSNQGHVIDNIGKILTPLLLIILAAIVIASIVTPVGPIVATKPNRYFLIGFQEGYQTMDALGASLMAGIVLTDLILKGYKDRKEQEYMTIRVGLVSGVLLLLVYGGLTFVGATGSGIFTGDISRVDLLLKLVYGLFGNAGAVAISIAVALACLTTAVGLTSTAANFFNSVSNGKLSYKAVSIAVVLCSLFLSVIGVEGLINIAVPILSTVYPVMIVLILMTLFDRHIPNNLTYTGAVIGAFLVSLIININSAFGILNGPMALVKKLPLFEAGFPWIVPAIVLAILFTIFGKKNKSQSLEHENSFDN

SEQ ID NO: 52459 - protein, 268 aa, Clostridium botulinum
MYKLIALDMDGTLLNNKKTISRENKEAIKAAISKGSKVVLATGRPLKGIEKYLKELDLINNGDYAIAFNGALVQETKTGKVLYENNMTKEDLKILYKLSKELDVDIHFLTIDECYTPKLNVYSQIETTLNNIPLNIIDFDNVPDHLKIIKIMFVGSEEKITEIIKLVPKEFQEKYNVVRTASIYLEFLNKDTSKGYGIERLCNILNIDKKEVICAGDAENDIHMIEYAGLGVAMENAYPQVKKVANYITKNNEDHGVAQVINKFILNK

SEQ ID NO: 52460 - protein, 333 aa, Clostridium botulinum
MKVTIKDVAKEAKVSPSTVSRVLSDNPRISDETKEKVYKVIEKLKYKPNAIARGLVNNKTRILGVVLPEEAENLLSNPFFIQAMKGISSYAEKREYYITYAFSSNKENEKKHIKDLTTSGLIEGLLILRPKENDENIKYLKDINFPFVIMGRLKDTEDVLWVDNDNFQAMYNIVNKLIDKGHTKIALIGAKKELNVCKDREKGYKVALEMNGISFSEKLVSYGEEFKEKEGYIQMNKLLEKVKPTAVVAMDDLLAIGAMKALKEKYLTDLSIVGFNNIPLGEFQKPQLASVDINGVKLGYYATKLLIDKIEEVEDTRDHYIVETTFVKRESFK

SEQ ID NO: 52461 - protein, 160 aa, Clostridium botulinum
MGGNILSLNIVLFQPEIPQNTGNIARTCVLTNSRLHLIKPLGFSLDEKHLRRAGLDYWQYLDLSIYESYEELREKYKDSNFYFSTTHGNNFYTDVKYSDGDFIVFGRESSGLPDEIRDSDPSKCIRVPMINTTTRSLNLSNTVAVVTYEALRQVGFPDMK

SEQ ID NO: 52462 - protein, 814 aa, Clostridium botulinum
MINMMFGRFTERAQKVLMNAQEEAEKFKHGYVGTEHILLGILIEDGVAKELLNNFSITEDKVRQLIERYEGKGEMDLYKNEIPLTPRTKRLLEMSLLEARNLNHNYITPEHILLGLIREAEGVAFTILSNLGLDAERLRKELIKNLSGQETPKDEGSKKSSKSSTPTLDQFGRDLTEMAEEGKVDPVIGRDKETQRVLEILCRRTKNNPCLIGEPGVGKTAIAEGLAQNIIDGNIPEILKNKRVVTLDLTSMIAGAKYRGEFEDRLKKIMEEVRSSKDTILFIDEIHTIVGAGAAEGAIDAANILKPALARGEIQCIGATTLDEYRKYIEKDSALERRFQPINVGEPTKEETIEILKGLRDKYEAHHRVKFTDDAIYAAVNLSDRYIRDRFLPDKAIDLMDEAGSKVRIQNLIAPPDLKNIEEQLDKVVKEKEDAIRVQDFEKAANLRDKEKELKEKLEGLKKDWNAEKEGSNLIVSEQQIAAVVSNWTNIPVNKLTEKESERLLKLENILHNRVIGQEEAIKSVSRSVRRARVGLKDPKRPIGSFIFLGPTGVGKTELTKALAEAMFGNENNMIRVDMSEYMEKHSVSRLIGSPPGYVGHDEGGQLTDKVRTNPYSVVLFDEIEKAHPEVFNILLQILEDGRLTDGKGKTVDFRNTIIIMTSNVGASTISRQKTLGFNTSIEEERETEYEKMKDNIMNELKHSFRPEFLNRIDDIIVFHQLREEHIREIVKLMLKTVSNRVKDQGIKLEFTEEAEKILAKEGYDTNYGARPLRRAITKIVEDKLSEEILKGNIKKGDSVKVNTIEDKLNFCKM

SEQ ID NO: 52463 - protein, 220 aa, Clostridium botulinum
MKFIFNINIMWKVETIMNQKDRMLAGLPYKACLDGLPEERMANKKKIYEYNHCFPDEHEKIHKLIRDILGKAGADIHIEAPFYCDYGKNIQVGDNFFANYNCTILDVGKVIIGNNVQFAPNVSLYTAGHPIHPDSRNSGYEYGMGITIGDNVWLGGNVVVNPGVHIGNNVVIGSGSVVTKDIPDNVIAMGNPCKVIREITEEDRKYYYKNYEFDVDDYKE

SEQ ID NO: 52464 - protein, 334 aa, Clostridium botulinum
MKMLKDMLIKEIREYVYHKNLFKIINLSKSFNVRFLAQGEYNINFILEDEINKYVFRVNTGSQLSLENQIEYEYSVLKRLENSKVTPKVYYVDGSREYIKYGVLIMEFLDGRPLNYEKDLNKAAKIFGKIHSIELNKEDFSSFIIENNIFSDRIKEANNLLKDFWDSSLIKEDIKKFFYKFINWATENSYKEKYFIDDPIQVINNTEVNSHNFIIGSKNFYLIDWEKPVISDPCQDLTQFLAPTTTLWKANYILKDCEINEFFYNYEIIFKGKNIRERVDMYTPYLYLRALSWCAHAYLEYQNPDRDIKNMDTYEKIKEYLELDFMSNLLSRWF

SEQ ID NO: 52465 - protein, 438 aa, Clostridium botulinum
MFMGKLEVMPKLGLTMTEGELVKWHKKEGDTIKVGETLFDVTTDKLTNNVEAKADGIVRKILVDEGTVVECLKPVAIIGDKDEDISNLLRESLQDSKGNEVEKEVKESKEEIKDNRKIKKGERTKISPIAKRLAKENDVDIQLLDGTGPEGRIVLKDVESYIENNKNNIKTSPVAEKIAKDLGVNLEGIKKDGRIMKDDILEFIQKSIPSVGEDLMDRRVKMSTMRKVIASRMSESSKISPTVTYDIEVDMTNLKRLKEQIKNEWKVTYTDLLVKIVSKVLIQYPLVNCSIEGDEMIFRNYSNIGVAVALEEGLVVPVVKYANQKGLKDISIEVKELAHKAKNNGLTEENSTGGTFTITNLGMFGIKSFSPIINQPEVAILGVNMITNTPVVENGEIVIKPLMSLSLTADHRAVDGAVAAQFLKAVKKYMEKPELLIL

SEQ ID NO: 52466 - protein, 510 aa, Clostridium botulinum
MNKELVLVVDFGGQYNQLIARRVRENRVYCEIVPYTTSIEDIKEKAPKGIIFTGGPNSVYGENAPRVQKELFDLGIPVLGICYGDQLMAHSLEGEVTSPEKREYGKTDVNLDNSSLLFKDMKEKDQCWMSHTDYISKVPKGFKIIATTDECPCAAMENAEKKLYGVQFHPEVEHTLFGKKMLKNFLFNVCNLKGDWSMSSFAEQQIKAIKEKVGDKKVICALSGGVDSSVAAVIVHKAIGKQLTCVFVDHGLLRKDEGDQVERIFKDQFDMNLIRVNAQDRFLGKLKGVSDPERKRKIIGEEFIRVFEEEAKKLGDISFLVQGTIYPDIVESGTNTSATIKSHHNVGGLPEDMEFKLIEPLRELFKDEVRAVGEELGIPHKLVWRQPFPGPGLAIRVLGEVTEEKLAITREADAIFREEIAKAGLEEKIWQYFACLPNIQSVGVMGDERTYCHTIALRAVTSSDAMTSDWARIPYEVLDKVSRRIVNEVKEVNRIVYDVTSKPPATIEWE

SEQ ID NO: 52467 - protein, 184 aa, Clostridium botulinum
MNNKAILRKEIINVRKSLTLEEKIKRDIIIKDKLQKNSLYKESNFIFIYVSLKDEVDTHAIIKEGLKHGKKICVPKVISIQEGMVAIEIKDFSELIECGPYKILEPKNFKNIVDSKEIDLAILPGLAFDNKGGRLGYGGGFYDRFIPKLKKEVSKIALAYDFQILKEVPKDAHDVLVDDIIIDI

SEQ ID NO: 52468 - protein, 408 aa, Clostridium botulinum
  MISC_FEATURE (379)..(379): X=any amino acid
  MISC_FEATURE (380)..(380): X=any amino acid
MLGLLQFLRDVLKQPALLMGIMALVGLVALKKPGHKVLTGTLKPILGYLMLGAGADFIVANLEPLGGMIQTGFNITGVVPNNEAIVAVAQKVLGVETMSILVVGLLINLVIARFTKYKYVFLTGHHSFFMACLLSAVLGTSGMKGTELILFGGFLLGAWSAISPAIGQKYTLKVTDGDEIAMGHFGSLAYYVSAWVGSKVGKPEESTENIEIPEKWGFLRDTTISTAITMMVFYIVAAVAAGPEYVSKLSDGMSPILFAIMSSLKFAVGVTIVYNGVRMILGDLIPAFQGIATKIIPDAIPAVDCAVFFPYAPTAVIIGFVSSFIGGIIGMVLLGVAGGVLIIPGLVPHFFCGSTAGIFGNATGGKKGAVIGSFVNGFXXPLPQHYFFQYLVPLDSKTQLLVILISVF

SEQ ID NO: 52469 - protein, 108 aa, Clostridium botulinum
MVNVVFKKENNDIVFVKMSGHAGSTDQGYDMVCSAISAVSITIVNGITEVLKINPLIKEEDGFLSIDLRSCIKEDIHKCQVLMSTMLLGLKSIEFNYSEYIKLTMEEV

SEQ ID NO: 52470 - protein, 286 aa, Clostridium botulinum
MRRILSTREMLKKAQAGSYAIPAFNIHNLETLQVVVETAAELKSPVIIAGTPSTITDYAGADYIVAMAEVAAEKYDIPIAIHLDHFEDVKEIKKDIDIGFKSCMIDASKKSFEENIKTVKEVVEYAHKYDVTVEAELGKLGGKEDDLVVSEKDAMYTNPDDAVEFVNRTGVDSLAVAIGTAHGLYKGEAKLDFDRLREIREKVSVPLVLHGASDVPDELVKKAISLGICKVNVATDLKIPFSDAVKKYFNENPKANDPRKYMTPGKEVMREVVRHKIMVCGSNGQA

SEQ ID NO: 52471 - protein, 366 aa, Clostridium botulinum
MKKRKIIGLLCTLVLGTALIATGCSKGSKETSAEKDKDYTVNLGYYNCDHMTSACVAKDAGIFDKMGLKVNVSGNGKVPQAMAAGKMDVGYIGYAGLIRGLAKGSPITVAANNHLGGSMYLVVSNKIKDPKDLKGKKLGIGTKPEESETWLMCAKKLGIPTEGKNYDCVEFGSDKDAYLALKAGKIDGFTCCDPWGSMAEYEKTGHIIATADKIVGEDKWGECCVYSMNTKFQKEHPELAKKMIQAHVEAMKYCYEHPIKAAKIFAKNYQVPEEVAIMTIYKKTVGEGRTITWKMNDDYFKTEIDTLMKYKLIEEEPDYDKLISKKIYEEAKVADFDKFIKENVDSVFPVGMKYEEWKVKAMEIDK

SEQ ID NO: 52472 - protein, 93 aa, Clostridium botulinum
MVEGLKDLDKNSHIIILFYFNKSKDFNLITKTPWSDEKKGVFSTRSPRRPNPIDLSIVKLIEIDHNKIIIKGIDMLDGTPVLDIKPYSEELNP

SEQ ID NO: 52473 - protein, 117 aa, Clostridium botulinum
MILIKKFKFDAAHNLIHYHGKCERLHGHTYGLVIKISGERDKEDMVIDFTELKAIVKENVLDILDHAYINDIIEQPTAENIAVWIWDKLYTKLKRDNCSLYEIEVWETETSGVVYNG

SEQ ID NO: 52474 - protein, 621 aa, Clostridium botulinum
MSYIKIIRRKKRMSYNYFEKQQREDSILVGQDILSFRYNNSRIDTTIISCLRKIVNLSKEKVAIIDNETKITYGHFMKRINALSNFLLNQKEFERTSPITLILNGNYLRYVCVYGVLASGGYYLPIEPEVNNINRIISLVERSKSKVVITNREYVNILKEKISESVSFIIIEDLDFSSLDSKENVIDIKADDPAYMIYTSGSTGVPKGVIIPHRAVVNLVNALYVNFRLTKKDRGVAFTSFSFDSCGCDIYPYLLNEVPLVCIERRKEYVYDIEKLNKFCIDNMISIMFLPTVLAEKFITVDNNVLRVLYFGGEKFCKNKVTNYELFNSYGLTETGILNTVYKIKGDEREIPLGDPIINSGILILDDQDKIIPKGKLGEIAIFGSGIAIEYDNNTELTNKKFIKLKEMGNLRCCKTGDLGYINENDNLYFKGRKDKQVKISGYRIELDEIRFYLQKYACIELSIPMVIKKGKLSLLVNFYVAKEVLDEELINKFLSKYLPFYMVPLCHINIKDVPYTTNGKVDYRGLQKIFENKKEKVYLKSNLLYSKLELKEFLIDTYANILKMDKDEIMEDGSFFEMGGDSLKAMKLQWYIQDELGVEVDISKIYEEFSIKKLLNLILI

SEQ ID NO: 52475 - protein, 84 aa, Clostridium botulinum
MDNNVDTITLTDEEGKETEFEVITKLDIEDKEYVVVVPKNEEVDEAIALRIDNNDNGEEVLVPVEEDEEFNMVAEAYELLFSEE

SEQ ID NO: 52476 - protein, 642 aa, Clostridium botulinum
MILMIIVTVENICKSYGEKTLFKDVSFTISDEYKIGLIGVNGTGKSSLLKIVTGEDSPDGGTITIPKGATIEYLDQNPDLDPNATILEQVFKGNSKIMSVIGEYEKALDLISKNPEDEKLQNHLLTLTSEMDSLDAWDLESKIKTVLTKLNVTDFDKKIKELSGGQKKRVALCSALISPCDLLVLDEPTNHMDNDTIDWLENYLQTRKGALLMVTHDRYFLDRVVNKTLELDYGTMYTYNCNYSQFVEKKAERKTLENSLEEKRQSLYKKELEWIRAGVQARGTKQKARIKRFEELGESSFNHNSNDIDISVAHSRLGKKIINIENLTKKFEEKTLIKDFNYILLRNDRIGIVGNNGMGKSTLLNIITNKINSDSGSIDIGTTVNIAYFSQHSEDMDPNLRAIEYIRETAEFITTADGTKISASQMMERFLFTDDMQWCYISKLSGGEKRRLYLLKILMTAPNVLILDEPTNDLDIDTLKVLENYIDEFNGPVISVSHDRYFLDRTCNKILHFEGNGKISEYIGNYSDFIYRKKEISNITSKEEKTNKALKENNSQKEKTSKLKFSYKEKLEYENIDKEIEKLEEKLSKLEEEVEINASDFMRLEDLLKEKDKVEEELLFKMERQEYLENLAKEIEENKKTV

SEQ ID NO: 52477 - protein, 291 aa, Clostridium botulinum
MKISVENLNMIYKAGKKAGKKALNDVSLQIESPSLIGLLGPNGAGKSTLMKLLVAELIPTSGEILIDGVPLLKNERKLKASLGYLPQSFGLYDELTVWQFLDYMAALKGIKNSKKVIKEVIEKTNLIEKRKARISTLSGGQRQRVGIAQALMGNPELLIFDEPTVGLDPEERINFRNLFSKTAQDKIVLLSTHIIEDVQSVCDKLIVINHGQILFTGTPEKLIDLAHNHVGVFEERIGESGREDYKITSRVNTARGIACRIVAETLPAFAEAVEPTLEDAYMYLIMEKEVK

SEQ ID NO: 52478 - protein, 337 aa, Clostridium botulinum
MNYKDILKNARENLNGSCRVCRVCNGKACSGEVPGMGGKGTGDAFTINIDALDSYKLNMRLIHDVKNPDISVELFGKKMDMPVFAAPVSGTTLNMGGKFTEEEYISWVIGGCRDAGIYPMVGDTAVDSFLITNLDELKKFNGEGIAIIKPWENDNVINKIKLAEEAGAYAVGMDIDAAGLITLALHGKPVGPKTVEEIKEIVKSTKLPFILKGIMTVEDAKLAVEAGVDAIVVSNHGGRVLDQTPGVADVLPEIAEAVKGKVTILADGGVRTGVDVLKMIALGADAVLIGRPFVTASFGGEREGVKIYVENLKSELKSAMVLTGCNSIKDIDEKIIY

SEQ ID NO: 52479 - protein, 321 aa, Clostridium botulinum
MEVMDKLRPRGDEAMIYTLTTNPAIDMNCSSSSNEVFKVNRTNNLSYSPNGKGVNVSLVLNHYSIESKALGFFGGFTGKYIVEELNKKNILTEAFWIEENTRINVFINTEDNKEFKYVNKGPFVSRETQKDLLKYLSSNLKKGDYLIISGSLPQSIQEDYYNEILDICMENNVQVILDISSKKLKELLKYKPLLIKPNDEEVEAIFGLSLKDEEDIKEALKYIYKLGAKNILLTLGEKGMYFYNGDKIYYCNAPKIKLLSSACAGDSALAAFLSEWLYEANIEKALKKASATGANVAESSALGTFGKVSEYIKKIHVKEVA

SEQ ID NO: 52480 - protein, 338 aa, Clostridium botulinum
MGIKVGLNGFGRIGRAVLRIAQDKFPEDVEIVALNARATTETLVHLFKYDSCYGRFNGQVEIISNDNMKVNGKEIKIFRENDPQNLPWKELGVDIVIESTGIFKDREKAMKHIEAGAKKVIITAPGKNEDITIVLGVNENEYNPEEHNIISNASCTTNCLAPFAKVLDDNFGIVRGLMTTVHSYTNDQRILDKTHKDLRRARAAGESIIPTTTGAAKAVAKVLPSLKGKLNGFALRVPTPTVSLTDLVCELKTKVTAEEINAAFKKAADGEMKGVLGYSEEPLVSVDYKGDPRSSIVDGLSTMVLEDDMVKVVSWYDNEWGYSCRTVDLVNYVAKFMK

SEQ ID NO: 52481 - protein, 449 aa, Clostridium botulinum
MAFDGLASKLQDALKKLRGKGKLSEKDIKEAMREVKLALLEADVNYKVVKNFIKSVTEKCMGNEVLESLTPGQQVIKIVNEELTELMGSTESTLNSSTSGLTVIMLVGLQGAGKTTMAGKLALHLRKRNKRPLLVACDVYRPAAIKQLQVVGKQIDIPVFTMGDKLNPVDISKAAIEHAKNNKNNVVIIDTAGRLHIDEELMDELHNIKEEVNPSEILLVVDAMTGQDAVNVANNFNDKLDISGVILTKLDGDTRGGAALSIKSMTGKPIKFVGLGEKMNDLEVFYPDRMASRILGMGDVLSLIEKAQQSIDEEKAKEIGERMLNQEFNFEDFLESMQQMKKLGPINKLLEMIPGMNSKELKNIDLSSSEKEMKKTEAIISSMTIKERRNPSLISSSPSRKRRIAKGSGTNVQHVNKLLKDFQASKKMMKQMKGMEKGFKKGLFGKLPF

SEQ ID NO: 52482 - protein, 448 aa, Clostridium botulinum
MNTHLTETWEKAINIIKGELTEVSFNTWIKSINPISLENNSLKLAVPNDFTKGILESRYKDLIVNALKLLTSKKYNIDFIVTTEEKIEENQKNHNNEKSNIVVNDEMSTMLNPKYTFDSFVIGNSNRFAHAASLAVAESPAKAYNPLFIYGGVGLGKTHLMHAIGHYILHNNPKSQVVYVSSEKFTNELINSIKDDKNVEFRNKYRNIDILLVDDIQFIAGKERTQEEFFHTFNALYEANKQIIISSDRPPKEIPTLEDRLRSRFEWGLIADIQAPDFETRMAILKKKADVENLNIPNEVMVYIATKIKSNIRELEGALIRIVAFSSLTNKEISIDLASEALKDIISSKQTRQVTIDIIQEVVANYYNLKIEDLKSARRTRNIAFPRQIAMYLSRKLTDMSLPKIGEEFGGRDHTTVIHAYEKISNNLKKDESLQNAIKELNKRINQK

SEQ ID NO: 52483 - protein, 465 aa, Clostridium botulinum
MKVYNTLTNKKEEFLTLVPGEVKMYVCGPTVYNFFHIGNARTFVVFDTIRRYLEYRGYKVKFIQNFTDIDDKMIKRANEEGSTVKELGDRFIKEYYKDADDLNIERATKNPRATEFMEEIIKFVSDLIEKGYAYEIDGDVYFSTKKFNSYGKLSGQNLEELQLGARINVDERKKDPMDFAIWKSQKPGEPAWESPWGMGRPGWHIECSCMAYNLLGETIDIHAGGSDLSFPHHENEIAQSEARTGKQFAKYWLHSAFVNVNNQKMSKSLNNFFTAREILEKYDADVLRMFMLSGHYRTQINFSMELLDSTKAALDRLYNSINNLENLLDEVKNEELRDEELEYKNELQKYKEKYIEKMDDDFNTADAISIIFDLIRDVNTNVTIESSKELVKYTLDLIRELGSPLGILQESTKASLEEEIEKLIEERQKARKEKNWALADKIRDNLKERGIVLEDTPQGIRWKQI

SEQ ID NO: 52484 - protein, 458 aa, Clostridium botulinum
MKSNFSKFKDFIKYKKVAVVGIGVSNRPLIKFLVKLGAKVTAFDKKHREKLGSISLELEEIGVDLVLGENYLDKLDGYDVIFKTPSMRIDRPEFVKAKESGAYITSEMEEFIKYCPAKVFGITGSDGKTTTTTLVYEMLKKEGYRTWVGGNIGTPLFANIEEMKEDHMVVLELSSFQLMTMDVSPEISLITNLSPNHLDVHKDFEEYVWAKKNIFKYQSSNNLLVLNKDDDLTNGMENEALGDVLKFSLVEKVYNGACLSNNKLTIQGKEVCDSKDIKLKGRHNIANLLAAFCMVNKYVSIDSMKYVATNFSGVEHRCEFIREVNGIKYYNDSIASSPSRTLAGLNSFEKPVILIAGGYDKKIPFEPLAEGGYDKIKILILMGDTKNKIKSAFEKVISYKKCEMEIVIVNSMEEAVKVADNMAEKGDIITLSPACASFDMYPNFEIRGNEFKNIVNSL

SEQ ID NO: 52485 - protein, 484 aa, Clostridium botulinum
MYFITLFFIFLYIFICNIYLVSERTGKGKMHVIIVGNGKVGYTLAKHLSQENNDVIVIDKNAEALQKAMDNLDVMCIKGNGTRVSVLKEAEISRADVVIAVTNSDERNMLCCLAAKRFGAKHTIARIRDPEYAEELTMLKRELEIDMIINPEKEAALEIAQLIKFPTVSSVENFAQGKVDLVSFRLGKEDFIAGKSISDIDLKKCSVLFCAVERDGRVFMPTGDFILKSNDKVYVIGDHENITLFLKYLGKHQNKIKSVMVIGGGRITHYLTKLINKVGANIKIVEKNYIKCKDLNETLPEAIIINGDGTEQELLESENLEDVDAFIALTDRDEENIVASLFALNANIHNVITKITRVNYNHIVKNIGVESVISPKTLTANKIITYVRGLKNKKGSFIENLYKIVGEQAEAVEFAANSTTKCLNVALKDIKIKKGVLIAAIVRNKDIIIPNGEDSIKDGDNVIIVTEENNIMDINNILEGGNLI

SEQ ID NO: 52486 - protein, 207 aa, Clostridium botulinum
MDKNSLEYFKNKLIREKESVNSLLEEMKDNETIDSNSAMSMELSNYDNHPADTGSELFEKEKGLALKENEISIMKKINDALKNIEDGNYGICKSCGKHIPKERLEFVPYAEFCVKCQNEVSGKNVRKVQRPIEEDVLGYPFGYGYNDKTSKVEFDAEDSYQSVEFFNKMKNMDEYYNVGEEEDLEEEGYVEPVERISNEYYKSTLYD

SEQ ID NO: 52487 - protein, 441 aa, Clostridium botulinum
MNNIGMQLFLILILIIINAFFSSAEMAIISLNKNKLNTIIDNAEEENSSSRKTKKAKILLNLLKEPSKFLATIQVGITLAGFLASASAATSISKYIEIFFKHLNIPKSSSIALFLTTLLLSYLTLVFGELLPKRIALNNSEKIALFSIKPIIIFMKISLPFVNILTYSTNFLLKVLGIDYENIEEKISEEEIKKMIDLGEETGVFNSTEKEMINSIFDFDNTLAKEIMTPRTSVFTMDINDSPENIINNMLEERYSRVPIYDDDIDNIIGILHIKDILSIINKENIKKEDLINILRIPYFIPETKAIDFLFKEMQTNKNYIAILIDEYGGFSGIVTMEDLIEEVMGNIFDEYDEDHTEEIIKIDANTFLLDASITIDDLNEKLNLELPSENFDTLGGFILDITGTIPKCNVNSEIQYNNLIFKIEKVYNNRIEKIKLYISE

SEQ ID NO: 52488 - protein, 289 aa, Clostridium botulinum
MLMHRIIYDCDNTMGLKDKDVDDGLTLMYLIGNENVELIGLTSTHGNGTVEEVHENNLRIMNLLDKEYKPIFKGGDLNTGRISEAAKFLAISASRYKGEITILATGSMSNLYGAYLYDENFYKNVKNIVLMGGITKPLIISGVEVKELNLSCDYEASYSVLTSGADITILDGHVTLQALFREKELNALKNSSNEILRYVYTEIEPWFNSMEKTFNIKAFCNWDVAAAMYITNKEIFNENFVYINPHIEELKSGIITLSEEHKVFKVNMPNKIIDLDKFNSILIEKWGKL

SEQ ID NO: 52489 - protein, 738 aa, Clostridium botulinum
MDLKNKLNKEQYEAAITIDGPLLILAGAGSGKTRVLTYRIAHMIENLNIYPSKILAITFTNKAAGEMKERIKALVGDVVEGMWVSTFHSSCVRILRREIDKLGYDKNFTIYDTYDQKTLVKQCMEELNINDKEITDREIINTIGNQKDNLISPKEFKKISNGNYRKDRIADAYILYQKKLKTNNALDFDDLIYKTVELFKTNKDVLEFYQRKFKYIMVDEYQDTNKSQYELVKLLALVHRNMCVVGDDDQCIYEWRGADISNILNFEKDYKEAKVIKLEQNYRSKGNILNAANEVIKNNSQRKNKVLRTENENGNKIKVFRAYSDIDEAKFVASEIKKIIKDSERSFNDFAVLYRTNAQSRIFEDVFMKRDIPYRLIGGLKFYDRKEIKDLMAYLKLINNPLDDISLRRIINVPKRSIGDATVKKVQEFANEMDECMYSVLLDADQILTLSQRSITSIKKFVSIMNSFIRKKDEISVSALIKEILEETGYLKELKNSKNPDDVSRVENLKELVSAAADFERESEDKSLGAFLEKVALVTDIDNYDENSDSVAMMTVHSAKGLEFPVVFMVGMENGIFPGTQSLSDPKEMEESRRLCYVAITRAKEQLYITSAEIRKVFGRTVAYALSDFVSEISKDLKDNVNITGEVATDKVLHKNFGIRSQKTNSINSYKSPSLNNIPKNNVDSNKLNVGLKVKHKDFGIGTIVSMSKVSDDIKLTIAFDRRGVKILMLSMAPIEAV

SEQ ID NO: 52490 - protein, 100 aa, Clostridium botulinum
MGKEPSVKSSANLLAIVSLIMSIIVILPILNWLFKITPWQKLEGLPLFFGLLISPFGFLLGILSIKIQSNKLGKIGVIINTLLFLLPFIYMTLGVLIFGP

SEQ ID NO: 52491 - protein, 241 aa, Clostridium botulinum
MINYIALENKGEKGVLKIDPRTKIILMILGNVAIFLAFSIQIKISLIIFYLIFGFLCGAYKSPIKISLGYFGLILVEYLGGKYLSGTLALMIVTFSQFVKMILPCALLASIMISTTKVSEFMGALNKMRVSKKVIIPLTVMIRYFPVVFEDWKNIKDSMRMRDVSPTFLGFLKNPSDTIECIYVPMLMSASKVSDELSAAAITRGIENPNPRTCMVKMKMKFCDYLSISLMVTVIVLEVLM

SEQ ID NO: 52492 - protein, 426 aa, Clostridium botulinum
MGKKSKTKNIIVKICCIIASFALWLYIFNIENPIKEQKITVPVNIVNKESMNEMELALVPKEASTVTLIIKGNVKDIYSVKAEDFKVEADLNSFGLKKGENKIPVKVKKSPSNIKIVNEENLWTKITLDKLKSKTVPVKIKVTGTPKEGYAALNPILKQETATIYGTETYINKVKEVVGNCNIEGKSSEIKTNISLQPKTYDGDIINEISVEPSKVYVEIHLRRIKKVPINMKLSEDISNNKNIESITPLQNEVEISGEEGALQNIKYINTETINVNSIKIGQENIESNLVLPKGVILVNDNNTVKFKVKFKVIEDKKEEEKNKDKEENKEDKIIEKKVTKDINIMNEPKDKEVSLSEPSVTINMKGNKDVIDKINVNNINCYVDLKNVNLGENVVKVIVDMEDNKIDYSSNLDSIKVTVKEKQEE

SEQ ID NO: 52493 - protein, 407 aa, Clostridium botulinum
MSKIIVIGGGPAGMMAAIKAAEKHDVILIERNEKLGKKLYITGKGRCNVTSSKDISEFFDYIPTNPYFLYSPLYTFTNEDAIKFFNDRNIKLKVERGDRVFPSSDKSSDIIYALEKELIERNVKILLNKRITRIYKEDSNIKYVETEKGEKIKGDYFILCTGGVSYPQTGSEGDGHKIAKKLGHNIKELKPSLVPLETKEEWVKDLQGLALKNVEIKIIDSKNKTLYKNFGEMLFTHFGISGPIVLTASSVIDRDNLKVFINLKPALSSNDLDERIQKDFKKYCNRDFSNSINDLLPKKLIDIIINLSKIDPNKKVNSITKEERKSLVYLLQNLPLTVKGKRPIKEAIVTSGGVDVLNIDPSTMKSKIVNNLYFAGELIDVDAFTGGFNIQIALSTGYLAGLKVGEN

SEQ ID NO: 52494 - protein, 145 aa, Clostridium botulinum
MLKNYINDQVVEVNVEVKNWEEAVRLGGKLLEEDGAVEHSYIDAMVDTVKNMGPYIVIAPGIAMPHARPEAGAKNIRIGLLKLKNPVNFGNEEHDPVDMVIFLCAVDNKAHIEVLGELVQLIEDDDFLKIVRNASTKKEILDYIK

SEQ ID NO: 52495 - protein, 132 aa, Clostridium botulinum
MAAGMKGKRSRRRKERKNVEHGCAHIKSTFNNSIVTITDSVGNTLSWASAGGLGFRGSRKSTPFAAQMAAETAAKAAMEHGLKSIEVYVKGPGSGREAAIRSLQAAGLEVTLIKDVTPIPHNGCRPPKRRRV

SEQ ID NO: 52496 - protein, 270 aa, Clostridium botulinum
MKKKILSIAIATTLILGLVALTGCGSSKEEAKEKKTIVVGATPEPHAEILKKVKPILEKKGYTLEIKEFTDYVTPNTALQDGEIDANFYQHIPYLEEFNKEKKTDLSYTVKVHLEPMGVYSKTIKDLKELKNGATISIPSDPTNGSRALKLLEKEGIIKLKEGELVSKMDITKNPKNIKIEELDAAQLPRTLGDVDAAVINTNYAVPANLNPLKDALAIESKDSPYANVIVVKTENKNAEYIKALDEAINSEEIKKYIEEQYKGAILPAF

SEQ ID NO: 52497 - protein, 590 aa, Clostridium botulinum
MISEDVVQKVIELNDIVDVISGDIKLKNSGRNYFGLCPFHHEKTPSFSVSQDKQIYKCFGCGEAGNVVTYVMKTKNVAFPEAIKILAERVNIDIEEDKKENTNNPKDKIYKINVDAARYFFNNLIINKNAINYFLNRGVTKSIIKRFGLGYSKDSWDGLLRHLKTKGYTELDMLSAGLIIRSKNGSYYDRFRNRVMFPVFDYRGKVIGFGGRVLNNAKPKYLNSPETMVFKKGINLYGLNYAVKENKDRVLIIVEGYMDCITLHQYGIKNSVASLGTALTTNQARLLKRYADKVIISYDSDTAGQLATQRGLEILKDVGLGVEILTVPDGKDPDQFVKAHGKEAYLKLVKEALPLIEYKIKISKQDLNIGNKRQVIQYIDRYIKIIENLDPVEKDMYIRRLSEETNIEIQTLYDQLNKKNQNSRKNGKEVNMLEAFGQKLYLEPAYIRAERFILQLMFNYNNIYEYIKNSINEQDIIEETHKAIYKYIKDTLEDSNIQNKKLHIETLCNKNVETSKEWVNILNTNFIYKEDESKKFIDDAILNIKKYKLEKYKENLLKKIKEYEAQGKLDETIKMSQELIKVKKTLGAMK

SEQ ID NO: 52498 - protein, 333 aa, Clostridium botulinum
MFNLKNRNFLTLMDFTPKEINYFLDLARDLKRAKYTGTEVQRLKGKNIALIFEKASTRTRCAFEVGAKDQGAHVTYLGPTGSHIGKKESAADTARVLGRMYDGIEYRGFGQEIVETLAEYAGVPVWNGLTDEDHPTQILADFLTIREHFNKPLNEIKFAYVGDGANNMANALMIGAVKMGMDFRIVSPKEIPTDAALVAKCKEIAAETGAKVTITDNIEEGVKGCDVLYTDVWVSMGEPDSVWESKIKLLTPYRVDMNMIKMTGNPDAKFMHCLPAFHDEETAVGKEIKEKYGLSEMEVSHELFESKYSIVFDEAENRMHTIKAVMVATLGDQ

SEQ ID NO: 52499 - protein, 324 aa, Clostridium botulinum
MFRRHRRLRENEAIRAMVRETVTREEDFIYPMFVVEGENIKEEISSLPGNYHYSIDRLEELVEEVKKSGIKGIMIFGVPDHKDECGSAAFDDNGIVQKGIRRLRELMPELYIVADVCMCQYTSHGHCGIIHGHNVDNDESLKYLAKISLSYAKAGADMIAPSDMMDGRVYAIRKILDENNLKHVGIMAYSAKYCSAFYGPFREAANSAPQFGDRKTYQMDPANGREAMLEIEDDINEGADIVMVKPALPYLDVIRMAKDRFEFPLAAYNVSGEYAMVKAAAKQGLIDERRVALEMLTSIKRAGADIIITYYAFEASAWLKEDRK

SEQ ID NO: 52500 - protein, 744 aa, Clostridium botulinum
MQEIQGFIEDILFKNDENGYVVAKIRKKKELITIVGCMPYITEGQNLKLKGEWVIHPQFGNQFKVEICEEIVPDTVAGIERYLSSGIISGIGPVTAKKIVKKFGEETLNILDNNIERLTEIEGIGKKKIEVIYDSYIKQNEVRNIMMFFQNYGVTPNQCMKVYKRFGENSISIVKENPYILTEEIRGIGFKTADKIARSLGIASNSPFRIQSGINYIINGFCSLGNTYMPLEKLISEAMDILGVKEEEIHENIYNNVAENKLKIEKVKERSCVFTLPYYYCELGVTKKILSLSLSQYDNLNINIEDEIVRFEKNNNIKFHDSQREAIKGALENGVEIITGGPGTGKTTIINCITEIFEKANMKVYMAAPTGRAAKRMSETTGREAKTIHRMLEMGVSEDDTEEVFSKGEETPLECDVVIIDEASMIDIILMNTLLKAIALGTRIIIVGDVDQLPSVGPGNVLRDLIESKCVKVVRLKEIFRQSKESMIIVNAHRINDGEMPIINKKDKDFYFIECSEPKKIVNTLLELSNRRLPKFNKSWHKIHDIQILSPMRKGILGVSSLNKELQSVLNPKNDSKKEMEFKDYIFRVGDKVMQTKNNYSLKWTRASGEGEAEGLGIFNGDVGYIEDIDEEKETIQVLFDNERRVVYENLYLDEIDLAYAVTIHKSQGSEFPVVIMPAFKGPPLLMNRNLLYTGITRAKRLVVLVGSLKAINFMVQNDKIFERYSLLKWRISNILDTEIINGE

SEQ ID NO: 52501 - protein, 83 aa, Clostridium botulinum
MSGDKTIQFDPVENKKTLTKEILTKVYNSLLEKGYNPVNQLVGYLISGDPTYITNYNGARSLVIKLERDEILEEVIKSYLGIN

SEQ ID NO: 52502 - protein, 142 aa, Clostridium botulinum
MYTEKVMDHFRNPRNVGEIEDANGIGEVGNAKCGDIMKIYLKVEDNIIKDVKFKTFGCASAIASSSMATELIKGKTLEDAWQLTNKAVAEALEGLPPVKMHCSVLAEEAIHKAINEYRVSQGLEAWKMKTHSEHIHEHVHGH

SEQ ID NO: 52503 - protein, 554 aa, Clostridium botulinum
MNKTWWKEAVAYQIYPRSFKDSNDDGIGDIEGIISKLDYLKDLGIDIIWICPMYKSPNDDNGYDISDYKAIMDEFGTMEDFDKLLQKAHEKGMKLIIDLVINHTSDEHKWFIESRSSKDNPKRDFYIWRDGKDGKEPNNWESIFKGSAWEYDYNTEQYFLHLFSKKQPDLNWENENVRNELYKMINWWLDKGIDGFRVDAISHIKKEKGLKDIHNPKNLDYVPSFEKHMNVEGIQKYLKELKENTFDKYDIITVGEANGVNISQAPQWVGEKDGKFNMIFQFEHLDLWDVDHKEQSTIKKLKEVLSKWQEGLEGVGWNALFIENHDIQRVVSTLGDDKNFWEESSKALALMYFMQKGTPFIYQGQEIGMTNVKFEGIEDYNDIKTINIYKEKIRKGIPKDQALKYVWETSRDNSRTPMQWDTTENAGFSKEKPWMKVNPNYVDINAREQENNLNSILNFYKKIIRVKKENEALIYGKYNLILAHHEQIYAYTRTLRNEKFIVIANLTNKEAKYTYKREKLNYKGLIISNYSIEKHEDITEILLKPFEARLYKIV

SEQ ID NO: 52504 - protein, 452 aa, Clostridium botulinum
MAKNKIVYICQQCGYESIKWLGKCPGCNSWNSMVEEEKQSTNKTIKNINIKSEPKIISTIKSSEYERLDTGINELNRVLGGGIVKGSLTLISGSPGIGKSTILLQAANNIATKYGKILYVSGEESEEQIKMRADRLKVISKDIYILSETNVDIIKEHITTINPKFVIIDSIQTLFKSELSSAPGTVSQVRQCSNDIMLISKSNNIPFFIVAHVTKQGELAGPRVLEHMVDTVLSFEGERTQEFRILRTVKNRFGTTSEIGVFEMAGEGLLEISNPSAVFLEETEFQREGSVIIGIMEGTRPILIEIQALVSETKAYMPRRTAVGVDTARLNLILAVLEKKLNIPFYNCDVYVNVVGGLDLTGTFADLGLALALLSSAKSKDIKLPKVLVVGEIGLTGEVRPVSFCDRIVNEGIKMGFTNIIIPDRNKDKISVKNNVNLIGISSLREGINKVF

SEQ ID NO: 52505 - protein, 875 aa, Clostridium botulinum
MNKERLLILDSNSLLNRAFYALPDLMTGEGIHTNAIYGFVNMLLKMKEEINPDYIVAAFDRKAPTFRHEEYKDYKAGRKKMPEELAQQFPIVKELLSALAINIFEIDGFEADDLIGTLSVFAEEKGIEVYIVTGDKDALQLATDNVKVVITKKGITEKEIYDKNRMVEEFGVTPKEFIDVKGLMGDTSDNIPGVPGIGEKTAFKLIKEYKSIETVLENIENIKGKKLKENLHEYREQAIFSKKLATIICNVPIDMSLEDIKSKEEYDINKVREMFERLEFKSLMNKVGKSDEEETVEEEVSYKNIVSLEEFKDLKNNIIKYKENDLYLYFELEDIVLFSKSRVKTLYANFKDEVYRIDFEMLIKNTKEQFIEVCKEIFESKEIKKITYDAKNPRTILRKLGIEFNGIKFDINLAAYLIDPVRKEYEISSLASEYLFKNINREDEFLKIKEVNIMPNLYKVLEEKIKEQDMEELLYKVEQPLTETLSAMETEGFKVDKDILLQLEKKFKGEIESTQLEIYSMSEEEFNINSPKQLGKILFEKLDLPVIKKTKTGYSTNAEVLDKLRDKHPIIDKITYYRQLTKIYSTYIEGLKAAIDEDGKIHSNFNQTVTATGRLSSTEPNLQNIPIKYEMGREIRKVFIPNTGDSVILSADYSQIELRVLAHISDDKNMISAFNEHDDIHTKTASEVFKVPIEEVTPLMRGNAKAVNFGIVYGIGDFSLSQDLNITRKEAKQYIDAYLERYPNVKLYLENIVEEAIEKGYVSTILNRRRYIKEVKSSNKIVKAAGERLAMNSPIQGSAADIIKLAMVNVHRKLKEDNFKSSIILQVHDELILNVHKDELEKIKALVKKEMEQVLELKVGLDVDINIGNNWYEAK

SEQ ID NO: 52506 - protein, 254 aa, Clostridium botulinum
MHYKIKEVADMAGISVRMLHHYDKIGLLDPESVSDAGYRLYSDENLDRLQQILFFKELNFPLQEIKIILDSPNFNKKEALETHKQLLLEKKIRLEKIIQSVDKTISSMEGEFKMNKKEVLGAFDMTEIEEHQKKYSEEVKNKYGNTSAYKESNEKTSKYTKEDWNNIMKDWDIIYKKLANLMDKNPDDKEVQEYIHQFREHISKNFYDCTPEIFRGLGELYVNDERFTANIDKYKTGLSKFLREAINVYCDNIK

SEQ ID NO: 52507 - protein, 296 aa, Clostridium botulinum
MYKILEKKNIAPSIFLMKIEAPRVAKSAKPGQFVIVKMDEKGERIPLTICDYDKEEGSVTIVIQAIGSSTKKMDSFKEGDSFRDFVGPLGQPSDFVNENLDDIKKKKMVFIAGGLGAAPVYPQIKWLSDHGIEADVIIGCKSKEHLILEEEMKKVAGNVYVATDDGSYGYKGLVTNLLKDLIDKEGKTYDHVVAIGPMIMMKFVTLLTKEYNIKTIVSLNTLMVDGTGMCGACRVTVGGQTKFACVDGPEFDGHLVDFEEAIRRQQMYKTEEGKKLLEDQEKAEGHVCHVGLDGDK

SEQ ID NO: 52508 - protein, 439 aa, Clostridium botulinum
MAKPIVAIVGRPNVGKSTLFNKLAGKRISIVQDTPGVTRDRIYAEAEWLNYKFTMIDTGGIEPKSEDIIVSQMRRQAQIAIEMANVIIFLVDGKEGLAPADKEVAQMLRKSKKPVVLVVNKIDKLKDENNAYEFYNLGIGDPVTISSSQALGLGDMLDRVVEYFKDDESAGEDDERINIAFIGKPNVGKSSLINKLLGEERLIVSDIPGTTRDSIDSYVDTDFGEFTLIDTAGLRRKSKVKEEIERYSVIRTYASIERADVCILMIDATEGISEQDQKIIGYAHDINKAILVIVNKWDLVEKDDKTMDKFKKELKVNLSFMPYAKYLFISAKTGQRVVKVLQTAKECYDNYNKRVKTGVLNDVISQAIMMKEPPIVGTKRLKIYYVTQIGTKPPTFIFFVNDPACIHFSYQRYLENQLRENFDFQGTGIKSEFRERKEK

SEQ ID NO: 52509 - protein, 433 aa, Clostridium botulinum
MKKTSAKDFIVIGFALFAMFFGAGNLIFPPFMGKLVGDQAPAAIIGFLITGVGLPLTGIIACAKINGTFSDISGRVGKIFAIISTTALILAIGPMLAIPRTAATTYELAIHPIFPGVAPVVAVIIYFLVCLAFVLRPSGIVDSIGKVLTPALLVMLAIIIIKGLVSPLGPTISTGFKGAFSKSLLEGYQTMDAMASVIFASIIITAVRAKGYTEKKDIVSLTIKSGIVAAVGLAFVYGGLMILGSHTSQIIPGEIGRSALVVEIVKRLLGNAGTVILGLAVGLACLTTAIGLISTGAEYFSSLTKGKVPYNVFAIIISAVSALLGTGGVDKIVKFSVPILQVLYPIVIVLIAITLAGKLVKNNTVVRITVYTTLVVSFIDTINILTNGNVAFIKSLLGIIPLSNAGFSWLIPAVIAFIIGTVAFGKKQDIADA

SEQ ID NO: 52510 - protein, 932 aa, Clostridium botulinum
MGLTPMMRQYLEVKESCKDCILFFRLGDFYEMFFEDAKVASKELELVLTGRDCGLEERAPMCGIPYHAANTYIGRLVSAGYKIAICEQLEDPSASKGIVKRGIIKIITPGTYTDSSFLEENKNNYIMSFYLDDNMCAMSFADISTGEFNSTHSNFKEAVVLDEISKFAPREIVLEENIKESFIHTIKERFPNISISKIKQENFDYNIDNNLKEQFNNFNENEYETIVKKSANGLLYYIFHTQKNILSNINKIDYYSIVDYLTIDVNSRRNLEITENLREKTKKGSLLWALDKTNTAMGGRQLRRWIEQPLINKNPIENRLNAVEELLNNISLQEDLKEDLKSIYDIERIVGKVASKSVNAKELISLKCSIGKVPYIKEYLSNFKSDLFLNMEQCIDTLEDIHKLLDKALLDNPSLSVKEGNIIKEGFNEEVDSLREAKSNGKKWIASLEQKEKEETGIKSLKVSYNKVFGYFIEITKANLNLVPEGRYIRKQTLSNAERYITPELKEMEEKILGAEEKLIDIEYKLFTEIRDFIEENIDRMQKTARIISDIDCLCSLATVALENNYIKPNINAKDEILIEEGRHPVVEKVIPKGEFISNDSLIDTKENQLILITGPNMAGKSTYMRQVALITIMAQIGSFVPAKKANISICDKIFTRIGASDDLAAGKSTFMVEMWEVSNILKNATSKSLVLLDEVGRGTSTYDGLSIAWSVIEYICNNKNLRCKTLFATHYHELTKLEDNIEGVKNYSVSVSELENEIVFLRKIIKGGADQSYGIEVAKLAGLPSPVINRAKEILQHIEGDKEENSLNIAPSKEYKSKDYIEVSKDTSNTKNNLGSEIKHDTLSETNTDTIIEDESTKEHLSSNKKQINCRINDEKSIKKEVAVDSFQINFEYIKRDKIIEEIKNIDILNMTPMEGFNKLYDIINKTKDID

SEQ ID NO: 52511 - protein, 323 aa, Clostridium botulinum
MKKLTYAEAIREAMRTKMSEDDKVLIFGEDVGAFGGCFGVTGDLYKEFGDKRVRDTPISEGAIAGCAVGAAATGLRPIAEIMFGDFLTVSMDMIVNQAAKMRFMFGGKISLPMVVRLPEGAGVQAAAQHSQSLEAWLTHVPGLKVVYPSTPQDAYGLMVAAIEDDNPVMFMEHKFLYGMKGEVSDEIKRIPLGVADIKREGKDVTIIATGKMVHESLKAADILSKDGIEVEVIDPRTLYPLDKETIFNSIKKTNRAVVVTEENKRGAYSGEISSLINEEIFDYLDAPVGRIGALNTPIPFSPTLESYVIPDSKDIVKKVKELF

SEQ ID NO: 52512 - protein, 314 aa, Clostridium botulinum
MKSSYFSFKGREDTKINVYKWEPDKEQDIKAIIQISHGMAETANRYEELASYLSEAGYIVYANDHRGHGKSALSLDQLGYLGEEDGFMSMVEDVHTLNTIIKEENKGLPVFLLGHSMGSFISQRYIQLYGQELNGVILVGTNGNQGPLINMGILVAKLEMKFKGRRHKSNLLNNLSFGGYNKKFEPNRTEFDWLTRDEKEVDKYIKNEYCGAIFPTSFYHDFLKGLKSIWKEENKNKIPINLPIFIIAGDKDPVGNFGKGILNLYNFYKSIGVVDVNYKLYKEGRHEILNEINKREVFQDVLNWIDSKYNKTIK

SEQ ID NO: 52513 - protein, 148 aa, Clostridium botulinum
MDISEAKVLIFKINGEYYAADIMEIERILGYEEPTNLPDAPSFVEGVINYQGKILPIVSLARKFNLKEEEIKNEAKIIVVKEEENKLGIIVDVVSEVKDVKLDNIEQPPEIVAGISKRYIKGLIKIENQIIIFLNLSTILTEEEKSMI

SEQ ID NO: 52514 - protein, 156 aa, Clostridium botulinum
MVQSGVKITNWGGDMFIGEYNHGLDTKNRIIIPAKFREELGKNFVLTKGLDGCLYVYPKSQWEVLQKKLETLPLTNKNARAFVRFFFSGAHELELDKQGRTLIPQNLLEYGQIQKEIVSIGVSNRIEIWSKEKWEEYNNSNIDYDSIAEQMSELGI

SEQ ID NO: 52515 - protein, 84 aa, Clostridium botulinum
MERSNRKTRIGRVVSNKMDKTIVVAVETKVRHPLYGKIMNRTTKFKAHDENNAANINDKVLIMETRPLSKQKRWRLVEVVEKAK

SEQ ID NO: 52516 - protein, 446 aa, Clostridium botulinum
MNYKELAFYIMKKYFDDFNEEELKECIDKAYDSKFENPLIAPLNYKAGAYFLELYHGKTLAFKDMALSILPHLLKTSAKKMNITKDIVILTATSGDTGKAALEGFDSVEGTKIVVFYPKDGVSEIQKRQMVTQEGKNTFVVGIDGNFDDAQSGVKEIFNDRDFNGLLEERGYMFSSANSINIGRLVPQIVYYVYSYVNLLKDKKVGEGENINIVVPTGNFGNILAAFYAKNMGIPVGRLICASNENKVLTDFINTGIYDRRRKFSVTNSPSMDILISSNLERFLYEISGKDSRLIKNLMTELKEKGKYEITEEMKKRLDILYGDFSDEDDTLKAIEKVYESSDYLIDTHTAVAYDVYEKYKNKTGDNSATIIASTASPFKFPKSINEVLDMGHENASDFELVNLFSDKLNLKLPKGLEGLEEKEICHKVTCKKDEMKKVIKNFLGI

SEQ ID NO: 52517 - protein, 241 aa, Clostridium botulinum
NMNSRYIGALVLAPFVIFLFIGGVFLKWGILALSLGGMYEFYKVVKNKDIHPIEIIGYLLCLIYYIPLLNSINYKNIFYIITLAVFILLAIPVINLKYNFIDVAITLLGFLYVPIFFSFIVLVNNKTYGNYLVWLIFISAWLCDTTAYYVGKYLGKNKLCPKVSPKKTIEGSIGGIIGASLACTIFGMVIFRLGVSIGIIHYILIGLICGIVCQFGDLVASSIKRYAGVKDYSNLIPGHWR

SEQ ID NO: 52518 - protein, 259 aa, Clostridium botulinum
MISSKDNQLIKEVRKLREKKYRTQNKSFIVEGFRFFEEALKSNSSVNKVFIEEKSLNKLEELYKKYNINNDIETYVVSYSVLKSIGNTENPQGIVSVINYFKKEKLDLQNGFYILVDKVQDPGNMGTIIRTAHAAGALGIITTKGTVDIYNEKTLRSTMGSIFYIPIIEDENLEVVKSLRKKGFKLLVSSLDTNSNFYDVNMKDNMIIAVGNEGNGISEVLNTLSDIKVKIPMPGAAESLNVAVACSIMTFERIRQINK

SEQ ID NO: 52519 - protein, 359 aa, Clostridium botulinum
MNILKKKVLVGMSGGVDSSVAAYLLKEQGYEVIGVTMQIWQDDEEFIEKEGGCCSLSAVADARRVANKIGIPFYVMNFKDAFKRNVIDYFVDEYMEGRTPNPCIACNKFIKFSSFLDKAMAIGIDYVATGHYAIIEKHNDRYIIKKSEDDKKDQTYALYNLTQFQLERTLMPCGQYKKSKIREIAKEIGLRVHNKKDSEEICFIPDNDHGRYIKNRFPNKVREGNFVDKQGNILGTHKGIVYYTIGQRKGLGIAFGKPMYVVDINPFRNEVVLGDLEDLLNTKLIAKDTNYIPFDTLKEPMEVEAKIRYSQTPSKAIITPIEDGRVRVNFHEKQRAITKGQSVVFYKDDLLIGGGIIEK

SEQ ID NO: 52520 - protein, 277 aa, Clostridium botulinum
MFKYSKADEVLKEKLSSYTNKGEYLLVSDVIKYNQIEYREVLFNKKTLLMEESKGIEYIDENNNIVQDKNIQKSLATLAYYYEIFFCINKKNNIFKALRSEEDLHKENEDIELSIKALEFLQKEKVKDIEKVKNILLQLPSLRKKTNDLLKAMKSIIENIFNEEDAMSKESFKKVYTIYKEILKLNFKNVKLIYSGIDYYDYIKGCINKKRKSFSIRFNKKISDPLFKLDYQINYFKKLLKTYNEILCMNEREYLKFIHNSEKENINERLYLVRAKN

SEQ ID NO: 52521 - protein, 154 aa, Clostridium botulinum
MQDTPKKVGQTNAKVEENKEEAKSKTFKVGDVVELKDLKVTVNKVYTVAGDEFSKPKDGNEYIAADITLENTGKEEKAVSSIAMFKVVDKDGRQCEYSVMGLSAAKAGQMDGTLGAGRKMTGAYVVEVPKGTTGLELEFDSSLLSGGQVIVKLN

SEQ ID NO: 52522 - protein, 304 aa, Clostridium botulinum
MKGLKRRVSIIICIMLAFMLVSCNLKKGENKETQKNIKITDSYGKELAFEKAPERIVSLSPGATETIYALNKENTLVGRSDFDDYPTAVSKIKSVGGVKDPSIEKITELKPDLVIGGAHFSKDTVKKLEDLGIKVAVLYGAEDLDGAYKNIMDISTILGVTEKGQTIVDGMKKKVESVENKVKSLNKSKIYYMVDFGKADFSAGGDTFIGKMIEKAGGDNIAKDTKGWNYSFEKIVENKPEMIILSDKFNTKKNFLTADKYKELPASKANKVYEIDDNMLLRQGPRQADGLEALAKIIHPEAFK

SEQ ID NO: 52523 - protein, 323 aa, Clostridium botulinum
MNIGNLIFHNNVFLAPMAGFTDIAFREICKELGCGLVYTEMVSAKALYYESNNTKELCVISNKEKPVALQLFGHEPEIMANAVEFFNNNDDVCILDVNMGCPAPKIVKNGDGSALMKDPKLASEIIKAMKKVAKKPITVKFRKGFDKNNINAVEFAKIMEQSGVDAITIHGRTREQMYEGKADWAIISKVKNSVSIPVIGNGDVFSSEDALEMINKTYCDGIMIGRGAQGNPWIFKQINEKIKGEHVYYPTPQERIDICINHYKKSLEYFEEHKAVREMRKHVAVYVKGLKNCTDIKDKVNMEKDPDKVLEELIKYRETLREF

SEQ ID NO: 52524 - protein, 295 aa, Clostridium botulinum
MNYSNAISECIEFIEENIKSDLTPEVIANKCGYSVFHFSRIFNINKGITLMEYVKKRRLSLAAIDLFKGGRIIDIALDYGFETHNGFSKAFKKEFGFSPKQYVKCMGNYFNEELNIDFGGYIMNPVIIKKSAFKVAGYGIKTNITNSNYTKDIASFWSNYNGENLESKMYKILNPPKHGEVGLCVPANGESGDAVYLLGVIVDNFDNVTNEMITVEVPEATYAVFTIPPVDTSNDLDNDDFPEAIKKTWKYIFEEWFKDSEYVFDESKFDFEFYDERCHGRKDTVMEIYVPIEKK

SEQ ID NO: 52525 - protein, 529 aa, Clostridium botulinum
MADLREKIETRRTFAIISHPDAGKTTLTEKLLLYGGAIRLAGSVKARKASRHATSDWMEIEKQRGISVTSSVMQFNYEGYCINILDTPGHQDFSEDTYRTLMAADSAVMVIDAAKGVEEQTKKLFHVCSLRGIPIFTFVNKMDRESKDPFELMEDIESVLGIKSYPINWPIGSGKGFKGVYDRNKKIIQAFNGGNHGQTAVESLSGDIDDDVFKDLIGEDLHEKLKEDIELLDIAGDDFDLEKVRVGELTPVFFGSALTNFGVEPFLKEFLNLTQPPLSRESDIGEIDVFSDKFSAFIFKIQANMNPAHRDRIAFMRICSGKFKKGMEVYHYQGGNKVKLAQPQQFLAQDREIVDEAYAGDIIGVFDPGIFRIGDTLCSAQDKFRFEGIPTFAPEYFARVRTIDTMKRKQFIKGITQISQEGAIQVFKELHIGIEEIVVGVVGVLQFEVLEYRMKNEYNVDIKLERVPYKYVRWIEKTEKEAEKLSITSDTKIVKDLKDRDLLLFQSDWAISWALEHNEGLVLSDIGKN

SEQ ID NO: 52526 - protein, 455 aa, Clostridium botulinum
MEVLSMKNSLSLDLTKTKPYVEEHELQYLESIIREMDNTLGKKTGSGNKFLGWMDLPINYNKEEFARIKKAAEKIKNTCDVFIVIGIGGSYLGSRAAIEMISNTFYNNLDKNQRKVPQIYFAGNNISSTYMADLLELVKDKDICVNVISKSGTTTEPAIAFRIFKELLENKYGKEGAKERIFATTDAAKGALRTLADSEGYETFVIPDDVGGRFSVLTPVGLLPIAASGIDIDEMMKGAADAREEYSSDNIEKNHVYRYVAVRNALYRKGKTTEMLVNFEPCLHYFGEWWKQLYGESEGKDGKGIFPAAADFSTDLHSMGQYIQEGLRNIFETFINVENPRKSIIVKEDKENLDGLNFLADKDMDYVNHQALRGTVLAHNDGGVPAMVLNVPELSAYYFGQLVYFFEKACGISGYLLGVNPFDQPGVEAYKKNMFALLGKPGYENMKATLEERLK

SEQ ID NO: 52527 - protein, 623 aa, Clostridium botulinum
MKKLSTGIAVFLCTILILGQIRIVKNAIFPSGIKHENNRIHLNTGNTIRVSGKSSKEIGTKVTDILFPAFNYEGKPNGLIIYKGDNWKDILALMPLVKKYNSTIIPFNEKDESSLLDYINKLEPKGIPKLNNAQVVICGDNINTLKNNLERKGIRVTNINYKDTNSLLEKVYNSVFSNSEKCYGYIVSDEDPLMTVPVATWIVQNGGIPLYLNNEKKLYSSSKKILPNISKIYVIGKKNNVDEEDIKSLKVPVQKVYGYNPENFAINFAKFYDREEGFGWHSNRSRDDSNHNFILCSKEEPLMALVGSQLALKGKVGPILWTNKNYLSPLTENYLWRMKPNYWVTAAEGPYNSLWVMGNEDILPFSIQSRVDYTQEIQPYKTMGDQAVSGLDGISIIFSLISILGAIWVSIHLYLRMKKLSILIKFMWILTVLVLGPLGIWFYVISYINSPWIKINEKIVYLRSLWKQTSVATLSGLAFGASSIIVVNYILTYIGSPLISFYARYGGYLLGNPMIIKMIISYLIAFLLDLFVFMPTILIEMKSSKYKDAVKESLLLVFISITSISVGMMLSMWWFNMSYSPSILREDNILWFGFMFLSAFIGFLTAYIPNWILVRNGKKMGTL

SEQ ID NO: 52528 - protein, 386 aa, Clostridium botulinum
MSKIFMENTIIEFRNIKKIYKDAIVIEKFNLRIEKGNLVVLIGSSGSGKTTLLKMINRLIESTAGEILVNGKNIKDVDPIELRRSIGYVIQQTGLFPHLTVKENIEIIPKLMGKSKEEINKKTNELLNMVGLNPEEYMDRYPVELSGGQQQRVGVARAFAADAEIILMDEPFSALDPITRSELQEELFNIQKEYRKTIVFVTHDMDEALNLADKICILKDGKLLQYDTPEDILKNPAGEYVEEFVGKNKIWTKPEMIRAEDVMIANPVTVTSKRNLLQAREKMRDNKVDSLLVIDKQRKLLGYITLEYIRKIKEKNTLVEEVMNKEPKCVLGDTNLPELLDKFNSLKMGYLPVSDSEGKLLGLITRSSLISVLSSQYIDMEGIIDE

SEQ ID NO: 52529 - protein, 700 aa, Clostridium botulinum
MGQKMGQNLVIVESPAKAKTIKKYLGKNYVVEASMGHVRDLPKSQLGVDIENNYDPKYITIRGKGELLDKLRKEAKKSSKVYLATDPDREGEAISWHLAHVLKIDESEECRIEFNEITKTSIKKAIKSPRRINENVVDAQQARRVLDRLVGYKISPILWSKIKWGLSAGRVQSVALRMICDREREIEEFIPKEYWTIECEVYKEKNKKPFIIKLTTKSGKKIEINNEEEAIEAIQDLKKGEFIVKKIKKTKKNKNPLAPFTTSTLQQDSYKKLNFSTKKTMSIAQQLYEGIDIKGFGAVGLITYMRTDSIRISEEAQKSTLEHIKSNFGEEYIPKTPRVFKGKKNIQDAHEAIRPTNIEITPTLAKESLTPQQYKLYELIWKRFVASQMASCILDSTSISIENGKYGLRASGSLIAFDGFMKVYEYSTEEEKDSIKIPELEDNEILGEKSINKSQHFTQPPARYSEASLVKTLEENGIGRPSTYAPIISTILDRKYVEREKKTLKPTELGDIVNNILSEYFKQIVDLEFTADMENKLDYIEEGKKSWREVVNDFFQPLIESIEIAEKEIAKITIEDKVTDVVCEKCGRNMVIKHGRYGDFLACPGYPDCKNTKPIVEEIDVKCPKCRDGKVLIKKSRKGRKFYGCSNYPDCDFVSWSEPVKEKCEECGSYMVKKQSKAKGEYYECANSECKHRKYLNNKE

SEQ ID NO: 52530 - protein, 158 aa, Clostridium botulinum
MDFKGIENLIKAMSESNLSSMDIEYNGIAIKMKKENNKIYKQETISQEYEKENRDNIVEEKKLDLLSNEEKTGIAIADNLIEIVSPIVGTFYESPGVDKKPYAKAGDKVKKGDTVCIVEAMKVMNEIEAEVDGEIVEVLVENEQMVQYGEVLFKIKPL

SEQ ID NO: 52531 - protein, 268 aa, Clostridium botulinum
MKRVKGMALGEWKTFLIPYKQAVEELKVKFRSIRKEYREKNEYSPIEFVTGRVKEISSILEKANKFNIPLDRISYEMEDIAGIRIMCQFTSDIEKVVELVRQRKDMQIIYEKDYITNVKNSGYRSYHMIIKYPVSMAEGQKEILAEFQIRTLAMNFWATIEHSLNYKYKHQIPKDIKLKLKSAADAASNLDKLMMEIKDEIKDAQKLFEVKSSLVSYIMDNILTLQSMGKIIDSNRYQEQLNKLIEEGEVFELNSLLKSTEKTIEMYK

SEQ ID NO: 52532 - protein, 118 aa, Clostridium botulinum
MIYLILTSVFLGALGQILVKYGAVNLTLNFSPAHFLPSIVSILKNMPVMAGIISYGISFLLWIKVLSKVELSYAYPMVSLGYVLVMIFSYFFFKENITPIRILGVAFIMIGVILVARS

SEQ ID NO: 52533 - protein, 276 aa, Clostridium botulinum
MKLIKEIKKMAKDNGGKSMVLTFKDHPLNTINKDLAPKILLDNPSKVKILKENEVDLVNFINFDKEYMKLCPEDFIKKMIYYYNAGGFVVGFNYRFGYKNLGDIELLDKMSKKFNFNLKVVSPVKYLNEIISSSKIRHILIEDGNVDKAKKMLGRNYFLKGNIVKGKQLGRKLGYPTVNLNYNTKYVLPRGGVYYTLIEYENKLYKGITNVGYNPTVEDKKLNIETHILDFHKDIYGENIVIYFSKRIRDEKKFSSLEELKNQLKKDKSFAKRQSM

SEQ ID NO: 52534 - protein, 178 aa, Clostridium botulinum
MEVPNCEYGKNGMLLFADCAVNPNPTADELASIAISTAETAKALCDMEPKVAMLSFSSKGSAKHDLIDKVAEATKIAKEKRPDLDIDGELQLDAAIVQKVADLKAPDSAVAGKANVLVFPDLQAGNIGYKLVQRFANASAIGPICQGFAKPINDLSRGCSSDDIVNVVAVTAVQAQNM

SEQ ID NO: 52535 - protein, 317 aa, Clostridium botulinum
MKKRYLILALIILSICSIFIGVKDISFIDIFNSDDVKLKVLLISRIPRLISIIVVGVSMSIAGLIMQQISRNKFVSPDTASTIDSAKLGVLVALMIFPSATLTEKMIVSFIFSLLGTFLFMKILKKIKVKNSIFIPLVGIMLGNIIDSITTFFAYKYDLIQSIASWLQGDFSLIIKGNYELIYFSLPLVVIAFIYANKFTVAGMGEDFSKNLGVNYNRIINIGLVIVALISSLVVITVGKIPFLGLIVPNIVTLYKGDNLKNSLCSTALLGAVFLLGCDILGRLVIYPYEISIGLVVGVIGSMVFLYLLFRRNGNEV

SEQ ID NO: 52536 - protein, 122 aa, Clostridium botulinum; identical to SEQ ID NO: 52191
  MISC_FEATURE (19)..(19): X=any amino acid
  MISC_FEATURE (106)..(106): X=any amino acid

SEQ ID NO: 52537 - protein, 159 aa, Clostridium botulinum
MNISIISVGKIKEKFLKAAIDEYSKRLSKYCKLNIIEVADEKTPDNASLKEENIIKEKEGNLILKHIKDNSFVIALDLKGKSITSEEFSDLIENCRLTGNSTIAFVIGGSLGLSQQVLSRANYKLSFSKMTFPHQLFRVMLLEQVYRAFRILCREPYHK

SEQ ID NO: 52538 - protein, 191 aa, Clostridium botulinum
MYGPKDHGWIEVVAGPMYSGKTEELIRRIRRAEIAKQKVQVFKPEIDNRYSKQDVVSHAGDKIQSVPVKSSKEILEKLLDDTDVIGIDEAQFFDDFLVEIVSKIANNNRRVICAGLDMDFKGEPFGPMPKLMAIAEFVDKIQAVCMVCNNPATRTQRLINGKPAKKSDPVVLIGAQESYEARCRKCHRVPR

SEQ ID NO: 52539 - protein, 285 aa, Clostridium botulinum
MFGMNEMIKCNNVTYKYESNKEYESTQKIALDKVNLTIKKGDFVVILGRNGSGKSTIAKHMNSLLIPSEGKVYVENLDTENLENTWDIRNKAGMVFQNPDNQIVATIVEEDVAFGPENLGIPQEQIRSRVDESLKKVNMYDYRRHAPHLLSGGQKQRVAIAGVLAMRPECIIFDEPTAMLDPSGRLEVVNTIKEINKKYGITIVLITHFMEEAVEADKVIVMDSAKVIKEGTPKEIFKEVEMMKKIGLDVPQMTEIAHYLRQHNVEIPSDILTIDEMVDELCQLK

SEQ ID NO: 52540 - protein, 275 aa, Clostridium botulinum
MRNTVSTFQELKNKGEKITMLTAYDYSMAKLIDSSGINGILVGDSLGMVCLGYENTLSVTMEDMLHHTKAVVRGTSNALVVGDMPFMSYQTSIYDAVYNAGRFIKEAGAHAVKLEGGATVAEEIKAIVKAQIPVMGHIGLTPQSVNMFGGFKVQGKNEKVAKKLIEDAKILEEAGAFSIVLECIPEKLSKIISESISIPTIGIGAGKYCDGQILVYQDMLSMFSDFKPKFVKSFGNIGESIKDGVSQYIKEVKEAKFPEEKHAFKIDDDVINKLY

SEQ ID NO: 52541 - protein, 66 aa, Clostridium botulinum
MIMKAYVDKDTCVGCGLCPSICSEVFSMQDDGKAHVIVENENVPEELTHLAEEARDSCPVAAIEVE

SEQ ID NO: 52542 - protein, 474 aa, Clostridium botulinum
MSDSPKQFIKRFIGFSMGPILSAIISFFTVPITTYFVVPTEFGKASMYTMALSISSMFIFLGMDQSFTREFNSEEDKKSLFWNSLIVPLIFSLILGAFYIIYYKPLSVLMIDTVDRYIVVILALSLPFAVIDRFNLLLIRMEEKARLYSVLNVISKVINVVVLVPYLLYIDKSFKGIINAGFVSLVFMCIVECLFIGDYWIAKFKINKTLINKMFRYGIPLIPASVIVWFLNSMDKIAMRQWSSFEEIGLYSAAFKIVTVVSIVQSAFCTFWTPTAFRWYEEKVEGEKFMKVSNMLMCFMNFMFVGIVLFRDLIIKLLDASYASSAIIVPFLLLLPIMYTVSESTCLGISFSRKTSYNIIVSLIAAVVNYILNYLLVPKYGALGASIATGIAYTVFFWVRTLISRKLWFKFKLGFYILNTASMLLLASLDVLYNNLYINIAISLFIVYVNRNEVKSIISYIKMFLKDRKNKAVA

SEQ ID NO: 52543 - protein, 457 aa, Clostridium botulinum
MNQEFVEALREIVKEKGISADLLFTTIEDALVTAYKKNYAKQGGSTNNVKVIMNRENGEIKVYAQKKVVDFVEEEVEEISLEDAKEIDPNYELEDIINIEVTPKKFGRIAAQAAKQVVIQRIKEEERRIVYNEYIEKEEDILTGTVLRKDKGNILINVGKSEAVLGPNEQIPGEQFRFNEKIKLYVVEVKNTTKGPQVLISRTHPGLVKRLFELEVPEIYNGIVEIKSIAREAGSRTKIAVYSNDESVDPMGACVGPKGVRVQNIVNELKNEKIDIIKWSKFPDELICNALSPAKVIDVTIVDEENKAARAVVDDSQLSLAIGKEGQNVRLAAKLTGWKIDIKSKSQAEKEATLNLSEAKDEKILENKKEDKEDKIDLHEEMDSIVEDTKENIKEEISVSHDNQEVDSELEKAMEEVFNTEDKENKLEKDMNLFEDDNEKPSIDTEKAIEEIFKDEF

SEQ ID NO: 52544 - protein, 442 aa, Clostridium botulinum
MDNAREVALDVLKAVLFEGAYSNIVLSKKLNKSNLKDNDKALITEIVYGTLKYKETLDIIIQSYLRNPIKTMDKNIVNILRITIYQIRYLDKIPSFAAVNEAVEMSKKISIKYSKLVNGVLRNYIRTYKNKKFYDHRNNLEKFSFMYSYPKWLIKMFISQYGIEIAEKILKGLNERPNITVRVNNLKIDYDEAFEKLGEYGYNIEEGYICPEAIQIIKGKNIEKNPLFIEGNITVQDESAMLVAPSMELDEESIVLDLCSAPGGKTTHISEIMNNKSKVYAYDVHQNKLSLIESNAKRLGIKNIETDVGDAAVFNKKLKEKAHRVLMDVPCSGLGIIRKKPEIKWTKNEREIKNIIAIQRKIMNNGASYLKEGGILLYSTCTLNKEENEENINWFLKKHKNFKIEPLYYGDVDNIIYHKEGFVSILPNDKMDGFFIAKLKKC

SEQ ID NO: 52545 - protein, 302 aa, Clostridium botulinum
MTNISLDKLVTESRNENTKNIDRVETLEMLKMINNEDKKVAEAVEKELIHIAKAVDKIGEAFLNGGRLIYVGAGTSGRLGVLDASECPPTYGVSYDLVRGIIAGGESAMFKAREGAEDSKKLCIKDLKNINFGKNDILAGIAASGRTPYVIGGLEYANGIGATTISVTCNPESEMSKIANISIAPVVGPEAITGSTRMKAGTAQKMVLNMLSTGAMVKTGKVYGNLMVDLKATNEKLVERAKRIVMQATGSKREQVEKILKETNFDVKLSIFMIESSLDKIKAKEILDKNKGYIVEAIKEIS

SEQ ID NO: 52546 - protein, 164 aa, Clostridium botulinum
MKEFLAVGEIINTHGIKGEVKVYPLTDDMKRFKKLKEVFIDGEERKILSCKLQPNNVVLKIEGIDSIEEANKYRKKLLEIKRENSVKLPKGSYFIADLIECRVIDEDGREIGQISDVIKTGSNDVYEVKGKSEVLVPAIKDIVTNIDIENKTVTIKPLEIWQCE

SEQ ID NO: 52547 - protein, 315 aa, Clostridium botulinum
MNKKYVVGVDLGGTKIYTALVDLDGNIIKEKNVKTEASKGELDVLYKIINTIDNVIEGVNLEEIKAIGIGLPGPLDAKEGIIISSSNLPFENFSLVQPIKDKYNIPTYLDNDANVATLAEFMFGKGKGTQNMIYVTASTGIGAGAIINSRIYRGNTGNALEIGHTTVMKDGPNCGCGNKGCAESLGSGTAIMKKAKEVCKNNGETSLKKYDNLTAKEVFEEAKKGDKLSKEVLEFCLSYLGITVANIINTFDPEMVVIGGGVINGGEIVCDIINREVKNRCWKAIRDNCKITKAKLAGKAGVLGAAALAITESKN

SEQ ID NO: 52548 - protein, 260 aa, Clostridium botulinum
MIKLSINDKPIGFFDSGVGGISVLKEAFKLLPKEDFLYYGDSKNAPYGTKKVEEVKALTFNATDFLMSKGIKALVVACNTATSVTINDLRENYDIPIIGIEPALKPAVELKKGGKIIIMATPMTLAEKKFANLMDLYKETEDIEPLPCPGLPELIEQGIVSGDVIYNYLKDKFSKYDNEKISSIVLGCTHYPFIEETLKEVTHNKACIIDGSFGTSRELKRQLKNSNMLTEENRVGKVTIFNSREDKDIIDLSYKLFNMK

SEQ ID NO: 52549 - protein, 391 aa, Clostridium botulinum
MEVIFMKQKIVSYLKSIESDLFNISKYLYDNPETSFNEYKSCKYLIDILKKNNFNVQENYYNIPTSFYAEFGKGYPKICFFCEYDAPSEIGHVSGHNLVSSISLGAALSLSKVIDNFSGTIIVMGTPGESLSGSKVTLAKQGAFKDIDVGLMIHPDEVTCQSGSSMAILPLKIKFRGKETLSYENTNVFSSLNGLLYTFNSINLLKQSINKNFHIDKLVINSGKDPYISSNTTEAKFYIRSKSISTAIYVENRIRKIVDNVNSLLNLDSEICFFELPYRELITNKRLSRLFCHNLKEAGIIDICNEKNTVSGLSLGTVSHYIPCIHPYISILDKNSSINYFTKEFADETLTKHAQQNALKASQALSLTALDLIQNDMLLKEVKKEFFNKIE

SEQ ID NO: 52550 - protein, 103 aa, Clostridium botulinum
MIVRREANIVSRSVKKGPYIQEVLLKRINEMNKNGEKKVLKTWSRSSTVFPQMIGHTIAVHDGRKHVPVYITEDMVGHKLGEFVLTRTYRGHDDKSEKSSRLR

SEQ ID NO: 52551 - protein, 388 aa, Clostridium botulinum
MYNSYSLNYRGSDNMLRFLDAGESHGRALAAIIEGIPSNIHIDIDFINKELKRRQTGYGRGKRMIIEKDKVEIWSGVRANKTTGNPITLIIYNKDYNNWKELINKEVEDKDKIFVPRPGHGDLVGHIKYNTGDIRNVIERSSARETAIRTAVGAICKYILKLLGIDIRSKIQSIGEIFDENVDIYNDHIYKEIEDSPLRCYNKKVENNMINEIDNCKKEGDTIGGSIYISIKGMPVGIGSYTQWDRKLDALLSYSIMSVQGIKVVEFGEGLDLSKRGSTFNDEIYYDEDNIKRKSNNAGGIEAGVSNGEDIIVKAYMKPIPSIKKTIITINLKEKTNVENRYERSDVCGVVPASIVLENVCAFEILKEILNTYPCDDFNMLKKYMREM

SEQ ID NO: 52552 - protein, 141 aa, Clostridium botulinum
MAKKVVGMIKLQLPAGKASPAPPVGPALGQHGVNIMGFCKEFNAKTANQAGLIIPVVITVYQDRSFSFILKTPPAAVLLKKAAGIESGSGVPNKTKVAKVTKDQIREIAETKMPDLNAGSIETAMSMIAGTARSMGITVEE

SEQ ID NO: 52553 - protein, 104 aa, Clostridium botulinum
MTQMIFEKIKATIAEQLSIDEEEITMESSFIDDLGADSLDIVELIMALETEFDLEIPDEDAEKISTVGDVVDYIKSHTEELLIFIPAFISGDFILKDKFILEFI

SEQ ID NO: 52554 - protein, 339 aa, Clostridium botulinum
MGKGRNKMDSTVCFLGAGSFGTALAVMLGKKGLKVNIWHRNNNIVEDINIKKENIKYLPKVVIPAGVKAYNEIEKSIEQCEFIVLAVPSHVIRQVCKKIQPFIKENQIIVSIAKGIEEGAGKRLSEVIKEELPNNPIVVLSGPSHAEEVAQDIPTTVVASSEHMDIAEKVQDLFMTNKFRVYTNDDLVGVEIGGAVKNIIALAAGVSDGIGYGDNTKAALMTRGMSEIIRIGTKLGGKQETFSGLTGMGDLIVTCTSMHSRNRRAGILIGKGYSTEEAIEEVGMVVEGIKACKAFYTLKEKLDVEMPITDTLYKVLFENKEPNYGVYELMTRDKKMEII

SEQ ID NO: 52555 - protein, 123 aa, Clostridium botulinum
MARISGIDLPKEKRVEIGLTYIYGIGLPTSQEILKATGVNPDTRVKDLSEEEVNAIRDYVNKNVKVEGDLRREIKLNIKRLVEIGSYRGIRHRRNLPVRGQKTKTNARTRKGPKRAIGGKKKK

SEQ ID NO: 52556 - protein, 553 aa, Clostridium botulinum
  MISC_FEATURE (267)..(267): X=any amino acid
  MISC_FEATURE (273)..(273): X=any amino acid
PTIPDGMWVKCNKCGEILYQNDLEKNYMVCNLCGNHFRIGVKERIKYLFDKDTFKEWDYKIKTENPLDFKGYDEKIEHIKEKTNLSEAVTTGKCKIAGMEVVVCIMDSKFMMGSMGSVVGEKITRAIERAIGLRLPVIIFTASGGARMQEGILSLMQMAKVSSALAKLDEEGLLYICVLTDPTTGGVTASFAMLGDIILAEPDALIGFAGKRVIEQTINEKLPEDFQKSEFLLEHGFIDKIVPRSDLRKVLAKLINMHQNSFKTIHXYYFLIXIGDINMEDKKLIHNVKKYASKNAWQRVILARLKERPTALDYINIIFDDFIELHGDRSFSDDQSIVCGIGLLNNKSVTIIAQQKGKNIKDNIKRNFGMPKPEGYRKALRIMKQAEKFKRPIVCFIDTQGAFCGIDAEERGQGEAIARNLLEMSRLKTIALSIVIGEGGSGGALALGVADRVIMLENSIYSILSPEGFASILWKDASKAKEAAEVMKITAEDLKEFNIIDKIIKEPAGGAHKNLNKMAETLKENIINEIEILKEYPLDILLDKRYNKFRNMG

SEQ ID NO: 52557 - protein, 676 aa, Clostridium botulinum
MFKKSFGVLQQVGKALMLPVALLPAAGILLAFGNMFQNPDFLKLAPAFGSTGFQAFARVMEQSGNIIFANLALLFAVGVAVGLAAGEGVAALAAIVGFLIMNTTMGLVVGVTPGLIGKSHPEFASVLGIPTLQTGVFGGIIMGIIAASLYKKYYNIELPSYLGFFAGKRFVPIITAAVAILVGLIMVVIWPPIQHGLNSFSHNMIDANRTLAAFIFGVIERALIPFGLHHIFYNPFWYQFGEYINKAGQVINGDQAIFFQQIKDHAPLTAGTFMTGKFPFMMFGLPAAALAIYQEAKPEKKKLVGGIMASAALTSFLTGITEPIEFSFLFVAPVLFGIHCIFAGLSFMVMQILNIKIGMTFSGGVIDFLIFGVVPNRTKWWLVIPVGLAFSAIYYFGFRFAIRKWNLKTPGREDDAGSESVNYSSEVSLAAKVLEALGGKENLANLDACITRLRVSVNSIDKVNKEELKSLGASGVMVVGNNIQAIFGPKSDQLKEQIKDVISGKIITKDVKIEEPKKETVKVSSKDKFVAPIEGKILSITDVPDEVFSQKMMGDGFAIEPKNGTVVSPVDGVITTVFPTKHAIGITAENGLELLIHFGIDTVNLKGEGLEALVEQDAKVKAGDPILKVDIDKIKDEVPSIITPIIFTNLTDDQKLEIVKLGSHVKAGEEDIVKLK

SEQ ID NO: 52558 - protein, 123 aa, Clostridium botulinum
MKILISNASEQPIYEQILCQIKVAIIQGELKEGEILPSIRNLAKEVGVSVITTKRAYEELEKEGFVETVKGKGTFVAAQNKELLREKKIKIIEEKLNEVIEDSKLLDISYEEILEILKILYFQ

SEQ ID NO: 52559 - protein, 255 aa, Clostridium botulinum
MIIVHKFFVPAENIIDEKAIIDGDDVKHIYKVLRLECGDAININNCQGKEYKGEIESIDKKSVVVKILEQVEVNNENPLNIYLYQGLPKSTKMDLIVQKSTELGIKEIIPVITERVEVKASLKEFKKLDRWNRIALEACKQCKRSLIPSVREPLKFNDLLEEIKGMDLIVVPYESKENYGIKSLIKNIEYEKENIKNIGIIIGPEGGFEESEIRALEEIKAQIVTLGPRIFRTETAGIVCASIISYELGDLGGNI

SEQ ID NO: 52560 - protein, 85 aa, Clostridium botulinum
MKNMAVKIRLKRMGAKKAPFYRVVVADSRSPRDGRFVEEIGYYNPITEPSTIKLDEEKVQKWIKNGAQPTDTVKKLIEKAGISVK

SEQ ID NO: 52561 - protein, 137 aa, Clostridium botulinum
MFEWKKCYSCNISKIDNQHKRLFELADEIYTIVSVNDGYDHFDEIMEAIKALKEYTVYHFSYEEEVMRKYEYSDLDNHKVEHDAFVNKIKSINEEEIDEKQKNFLMDLLEFIVNWIENHILKSDLKYKEYLNGLGVY

SEQ ID NO: 52562 - protein, 544 aa, Clostridium botulinum
MIYIQLLESMSLIGIAAYLYSQTKTFNKFIKNKSDYKYKLIIITFFSVLSILGTYTGVNIEPYALANARPIGAIVAGYIGGPLVGIMVGIIGGTHRYFLGGFTALSCAISTILEGIVGGIANVITKDEGLDVSTGVTAAIIAEVLQMIIILLIAKPYEAALELERVIALPMIITNSIGVGIFINIINNTQEHYKKIGAIQSQKALNIAKKTSIYLRSGFNQEILDKVCSIIYESINLKSIFIAENGGIFSYNGEELNKEKLKYRVKEYFDFKDYKLIKFEDNNKQKLFYCIPIYTDKDKFKFVIGIQVKSYKSIDKYFSDFAKELSALLATQIELYELDQLAQEVSKAELKMLRNQIHPHFLFNTLNTIASFCRTDPIKARELILNLSNYFRQTLKRQDEKIILKDEIEFLESYLAIEKARFGERLNIDINIPEELLDAKVPIFVLQPIIENSMKHGILIKPQGGEVIITAIDEKDKIKFVIKDTGVGMDKNTLSYVVESWPGIGLSNVNKRLKLLYGEKSFIRIESKLNEGTKVMFCIPKEVF

SEQ ID NO: 52563 - protein, 267 aa, Clostridium botulinum
MIKDITIGQYIPGDSFVHKLDPRVKIIISLIYIIDLFIVNNFKGYIFIVLFTLAAILISQIKFKYIYKGLKPILILVIITAVLNLFLTPGDTLLFKWKFITIYKEGLRLAIFMVLRLVFLIIGTSLLTLTTSPIELTDGIEKLLNPLRKIGVPAHELAMMMTIALRFIPTLMDETDKIMKAQMARGADFESGNLIQRAKNLIPLLVPLFISSFRRADELAMAMEARCYRGGEGRTRMKELSLSSRDFVAAAFTSILVILSIWSRMWT

SEQ ID NO: 52564 - protein, 428 aa, Clostridium botulinum
MSAFIVLGAQWGDEGKGKMTDYLAENADVVVRFQGGNNAGHTVVVGEKEYKLHLIPSGILYNDKLNVIGNGVVLDPKALFEEINYLESLGVEITPDRLIISDRAHVIMPYHRILDGIKERARGNKDIGTTGKGIGPSYTDKMERSGIRVCDLIHKEVFEENLKETLEVKNKIITEIFGGRALDYNEIYNEYLGYAEKLRPFVKDISVIVNKKIKDGKEVLFEGAQGTLLDIDYGTYPYVTSSSTIAGGVCIGAGVGPTAITNAVGIAKAYTTRVGKGPFPTELLDSTGDWVREKGHEFGVTTGRARRCGWLDLVILKTSARISGLTSFAVTKIDTLAGLDTLKVCTGYRLNGEIIDYVPASLEDLAKCEPIYEEFEGWDDSIANARCYEDLPENAIKYLKKIEDFTETKVSIVSVGPKRDQTMMISEI

SEQ ID NO: 52565 - protein, 702 aa, Clostridium botulinum
MIHTLETTVAGRKMKVDFGKTGMLSNAAIFMSYGDTVVMINANASKEPREGIDFFPLSVEYEERLYSVGKIPGGFIKREGKPSDKSILHARSIDRPLRPLFPKGYRNDVQIVNTVLSVEQDNLPEILAINGSSLALCLSSIPFTTPVAAVSVGLVDGEFIINPTVAQRENTILDLTVCATKERVMMVEAGGQEIDEETMYSAIMFGFEECKNIVAFQEEAVAKFGKTKNEPVLYKADEEVEKEVKSFAFDMIKEAMYIMDKDERNAQLDKVKEKISEEFSEKYEDKVADIAEVIYKTQKEIVRNMLLNEDRRPDGRAFDEVRPISCEVGILPRTHGTGLFTRGLTQVMTVATLGALGDVQILDGIAEEESKRYMHHYNFPSYSVGEVRPLRGPGRREIGHGALAERALEPLIPSQSEFPYTIRLVSEVLSSNGSTSQASVCGSTLALLDAGVPIKRPAAGIAMGLITSEDLEKEKVITDIQGIEDFFGDMDFKVAGTEKGITSIQFDTKIKGLSNSCVKDALEGAKKARLHILGKIKECIPEPRKELSKYAPRTEIICIDPEKIRDVIGAGGKVINKIIADTNVKIEIKEDGKIFVTSNNEPEGVKKAISIIEGLTKEVVQGEIYLGKVTKTTNFGAFVEILPGKEGLVHISKLDFARVEKVEDVVSVGDEILVKVTDIDNQGRINLSRKDAIAKKEEEKDK

SEQ ID NO: 52566 - protein, 788 aa, Clostridium botulinum
MKDKSIKVLEFNKIQEILKNYTCTKAAKDIIEDLKPYDSMYEVREHLEETKEAFKLLITKGAPPFEGVYDIRSGISLAEKGSALLPGQLLKIAAVLRCARRFKEYINHKEEEESYRVLENICEGIFSLPKIEEEIFNAIEGEDEIADRASSTLYNIRRSLKEKNYSVRDKINSLVRSYSSYLQENIYTVRGDRYVLPVKAEHKGAVPGLVHDQSSTGATLFIEPMSLVNLNNEIKELMLKEKAEIERILTVLSAKINANITGVKTDANIVWELDFIFAKAKFASEYNCTCPTINDEGIVDIIEGRHPLIDRREVVPISVKLGEEFTSLMITGPNTGGKTVTLKTVGLIHLMAMSGLMIPARENSVISYFNNVFADIGDEQSIEQSLSTFSSHMKNIVEIMDKADENSLVLFDELGAGTDPTEGAALAISILENLRKRGTKIIATTHYSELKAYVLRKEGVENASVEFDVETLRPTYRLLIGIPGKSNAFEISKRLGLPDYIIDFARENISNENIRFEELIQNLQEKSIKAQEDARLAENLKLERDKEKKKYEEKLEGLQKVRDNALIDARREAKNIIKEAKEEADKILKDIRQLERMGYSSDARRKLEEERKKLKDKLDSIEEKEIKTVHKGEALKNVKEGDEVLLASINQKVIVLSKPDNKGDVLVQAGIMKITANIKDLRAAKGSNSNNSSSKIKKSKKLNLNLRRVESSVDLRGMDAEEAIYTVDKYLDEAYLGGLGEVTIVHGKGTGVLRKTIMDMLKGHSHVKKYRLGEYGEGGTGVTVVELK

SEQ ID NO: 52567 - protein, 830 aa, Clostridium botulinum
MGKKKKKRKSSAFKIILNVFLSIFLVAGVAFGGIVFAMIKTAPPLNVQQVLTFDEPSILYDDKGQYMDKVITNEQRIVVDYKNVPQNLKNAFVSIEDERFYKHHGVDIKRFTGVILINVTNKIKRSSKLQGASTLTQQLIKNTVLSSEVSIKRKVQEMYLSIQLEKELSKDEILGAYMNSIFLGGNALGVEAASKQYFNKSVKDLSLIECAFIAGVPQSPSVYYPYSSASKKNPSIYLNRTKTVLYKMLDNGYITQNDYNKALKDLDSKKLVFAKPSAPSNKLAYEWFSIPAIEQVKKDLKTQYKYDDKQIHNLLVNGGLKVYTTMNKNLQDKTQNTINNAYYLNSYKSNGMIYPQASAVIMDYHNGEVKTIIGGRGDQPARSYNRAASYNYLRPAGSSIKPLTVYSAAIDSKKATAATGFEDSPIPNNIGRKYSSGAPYNPKNSPDIYYGYVNVREALMRSINVVAVKLVDKIGLNTSIQYAEKFGIPIDQHDRSSIASLSLGELHKGTNPLIMAQAYGVFGNNGTYTEAKLYTKVVDRTGKVLLEPKTNTKKVLSPEAAFITYDMLQGPVSESGTGPQANFGNMEVRGKTGTSSDMKNLWFCGLTPYYSAAVWIGNDNSSTVDGVYSSTAARLWGDIMKEFHVNLPYKQVQKPASVVTANVDRISGKLPTQLSYRDPRGSTVYNEFFINGTIPTEYDDIHVEAQINKLTGKLASKFTPSFLVESRVFLRRDYSPGVELLDQQWLLPYSIDEGGSLPPTEEKNNSNTRDKNKDKNKNKNKDKNPSQDKPNNNNNDNNSNNNNNNNDNNNNTKPPENDSNQNHEDNKNKQ

SEQ ID NO: 52568 - protein, 206 aa, Clostridium botulinum
MKFKKFITLIIFISIISLINGCGSNNSDKNNNTSNTTSNTNSKKSNSTSNAVSNINSIKDIKYDNLQKLYLSINSNMSYLEALEKVKTTGLPYSETDFNQSKAIKIAFKEAVTPQKYAEEGDHINISFDYDRNNNSYSFSTIEYFNHKKYITVFEYRDGSYWDLRDKKDAGLYINNYKNTSGSKEEKYIKASSKEEQLKYIYDYSE

SEQ ID NO: 52569 - protein, 429 aa, Clostridium botulinum
MRKILYYDCFSGISGDMNLGALIDLGVDKEYLLKELAKLNINDEFEIKINKDSRKGISGTKVDVILKNLHEHNHEHEHSHDYVHSRGHEHEHNHEHSHEHEHNHAHDHRNVININKIIDNSNLNDNVKKISKEIFLEVAKAEGKVHNKPLEEVHFHEVGATDSIVDIVGAAICLDYLKVDKVLCSKVQVGSGFVKCAHGTMPVPAPATAEILKDIPMVSSEEIPFEATTPTGAAIVASTVYKFTQNKNFYIEKVGYGIGGKDLSDIPNVLRVFLAEVKEQEENDIEKEEALILECNIDDMNSEIYEYVINKLLHEGASDAYITPIIMKKTRPAAKLTVLCENKLENIMREIIFKETTTLGIRKYSVEKSMLKRKIEKVKTIYGEISVKKSYLKGQVLNSKPEYEDCKKIALENNIPIKEVYEAVNERKE

SEQ ID NO: 52570 - protein, 227 aa, Clostridium botulinum
  MISC_FEATURE (67)..(67): X=any amino acid
  MISC_FEATURE (109)..(109): X=any amino acid
  MISC_FEATURE (125)..(125): X=any amino acid
GSFRPIAGSKHLHLTTISPDLLLRQCPNHYAIRAGRNLPDKEFRYLRTVIVTAAVYWGLSSHLRLRXVFPLTFQHRAGVSPYTSAFALAETCVFAKQLLGPILCGLLSXAPLLPKLRGQFAEFLXQQFFRWPLGFSPHLPVVGLRYGHLFTRRGFSWQCGIRYFAINGSPSHLSLARRICLSSMPKCLDAHPIVRTSYPTASPHFSNVNRRYRNINRLSITYAFRPR

SEQ ID NO: 52571 - protein, 879 aa, Clostridium botulinum
MERMGLNEIREEYLKFFESKAHLRLPSFSLVPKNDKSLLLINAGMAPLKPYFTGLQVPPNKRVTTCQKCVRTGDIENVGKTSRHGTFFEMMGNFSFGDYFKEEVIPWAWEFTTEVLKLPKNKLYVTIYEDDDEALDIWVNKTDMDPKRIFRLGKEDNFWEHGLGPCGPCSEIHFDRGAGEVKTSEEFVKASDEDKIVEFWNLVFTQFDKDEEGNYNKLANPNIDTGMGLERMATIMQNVDTIFEVDTIKAVLDKVCKLSGANYKEDRVKDISIRIITDHIRSITFMISDGILPSNEGRGYVLRRLLRRAARHGKTLGINNTFLHNLTDIVIENCYKNYPELEEKREYIKKIIKLEEERFDETIDAGMQILNDYIKEVKNNNYKILSGDKAFKLYDTYGFPVELTEEILEEEGISIDKEGFNKEMKEQRERARSAREETNYMGAEDTILNKIDLNINTDFEGYDKLEVKSKVAVIIKDEEFKNEMEKGNEGVIVTYNTPFYAEMGGQIGDTGIIYNDNFKAEVIDCKKNISGKILHFVKILDGKVALEDQVILKVNEERRNNIRKNHTATHILHAALIKVVGDHVQQSGSYVDDERLRFDFSHFEAVSEDELKEVEKIVNKEIMKANAVNTKVMNIEEAKQQGAIALFDNKYKDDVRVVSVGDFSKELCGGTHVSNSGQIGIFKIVSEAGVAAGIRRIEAVTAFKAMEYVDHKNNILKEAAQILKCNEKELLNKLNHQVLEMKEKEKEIEALKLKLASGAEDEILDNIKEIKGVKVASAAVKDIDGNALRDLGDKIRDNMQSGVVVLGSNYKGKVLFVAMATKDTVAKGVHCGKIIKEVATIAGGGGGGRPDMAQAGGKDPNKLEDAIKTVETVVESLVK

SEQ ID NO: 52572 - protein, 211 aa, Clostridium botulinum
MKNLMNKVYGQFRRPKGMIGKFIAKSMNKEHFKVTTWGLHKLKVKDSNIILDIGCGGGRTVNRLAHGVPKGKVFGMDYSLDCVNFSKKYNKDLIENGKVEIIHGSVDKMPFEDDKFDIISAVETTYFWPNLLDSFKEVKRVLKPSGKFIIVNASYTNEKFKERNEEYLRKVPGMKIYSVDYIKNLLEEVGYKNISIETLEEENWLCAIGEK

SEQ ID NO: 52573 - protein, 252 aa, Clostridium botulinum
MGNNMKCLEGRTAIVTGASRGIGRAIAKKLASMGANLVLNYRSSAKEIDTLLEEIEEFGIETLVIQGDVSSFEDSKKIADEAKNKFGTIDILINNAGITKDSLILRMTEEDFDKVISVNLKGVYNCSKHIAPIMLKQRSGKIINISSVVGVAGNAGQCNYAAAKAGVIGITKSLAKELGSRGITVNAVAPGYIRTDMTDALPEKVKKSIEDLLPLKRLGTPEDVAEAVGFLASDKAAYITGQVIHVDGGMII

SEQ ID NO: 52574 - protein, 245 aa, Clostridium botulinum
MKYMELNICHLYPDLLNVYGDIGNILVLKYRAEQRGIKINVSNVSIKDNFPIDKYDIALFGGGQDYEQSIVSKDMLETKKDDLTKYIEKGKVLLAICGGYQLLGKYYTTPEGEKLDGLDILDIYTEGGDIRFIGNTVIKNEEFNETYVGFENHSGRTYIGNLKPLGKVIAGYGNNGEDQEEGCIYKSTFCTYFHGSLLSKNPELADRLLSTALKNKYGEDINLEPLDDNLEIKAKEFIIHRESKA

SEQ ID NO: 52575 - protein, 265 aa, Clostridium botulinum
MKIIVIGPRGKMGSLVTKSCYTNENIELVAAVAPKERDYIGQDLGIVANLGKNIDCKVVDNLENVIDKCDCIIDFTDPETSMDVFEKALKSKKSVVCGTTGFSEEEINRINEISKEIPLVLAGNTSMVVNLMYKLVELAANTIGNMSDIEIIEMHDRYKKDAPSGTSLEIGEVLAKTFNKELKELAQFGRCGKGEREEGKIAYHSLRAGDISSSHTVMFGLMGERLEITHHAHNWECFANGGCQAALFLRDKKPGIYSMKDVLGL

SEQ ID NO: 52576 - protein, 731 aa, Clostridium botulinum
MGKVLVLAEKPSVGRDLAKVLKCNKKGNGYLEGNKYIVTWALGHLITLSDPESYDEKYKKWSMDTLPMLPKRMKTTVIKKTSKHFSEVRKVMIRKDVEELVIATDAGREGELVARWIIDKVGFKKPIKRLWISSQTDKAILDGFRNLKPGKNYENLYHSAVCRSEADWIVGLNVTRALTCRYNAQLSAGRVQTPTLAMIVQREEEIKNFKPRDYYSIEGKTKGFTMHWESAKGRFNTFDEDLAKKVVSKVTGKEGKIIEVTESDKKKYAPALYDLTELQRDANRIFGYSAKQTLSIMQRLYENHKILTYPRTDSRYISKDVVGTLKDRLKAISISNYSKFTNEILKGNIKAHKGFVDDSKVSDHHAIIPTEEKPKLGNLSGEERNIYDLVIKRFLSVMLPPFEYIQTTIKSEVIGEKFVARGKVIKSKGWKAVYDREEFDDKNNNSDSDDIKDQTLPKVNKGDGIKFSNFKINKGQTKPPARFNEGTLLSAMENPQRYINLDKESSKTLGETGGLGTVATRADIIEKLYNTFYIEKRGKEIVPTSKGKQVIDLVPKDLKSPLLTAKWERELDSISKGNLRGQIFINKMRDYSTKLVEDVKNSKDKYVHDNLTGKKCPQCGKYMLEVKGKNGVINVCQDRECGYRENVSRFTNVRCPECHVKLELRGEGQGQIYVCTRCSFREKLSSFNKKYRNNQEKLNKRDVTKYMKKMQKENDEPINSALAEALSKLKL

SEQ ID NO: 52577 - protein, 241 aa, Clostridium botulinum
MIFMKYNDLKIKIFADGADLNGMLDAYNKGIVKGFTTNPSLMKKAGITDYKEFAKEVLAKIKDMPVSFEVFSDDLETMEKEAEVLGNLGENVYIKIPVTNTKGESTAPLIKKLSEKGYHLNVTAIFTIDQVKEVVGALKSGVDSIVSVFAGRIADTGEDPVKIMKEASKICKTKEGVELLWASCREFYSIVEADKCGCEIITVTNDVLKKMPNMGKDLKEYSIETVRGFYKDASSLGFSIL

SEQ ID NO: 52578 - protein, 445 aa, Clostridium botulinum
MEKIKVALVSLGCDKNRIDSELMLYKLNEEAELVKDPKEAQVIIVNTCGFIETAKEESINTILQMASYKKTHNCKVLVVTGCLTQRYKGELKELIPEMDIMLGVNDYDKLLESIKVFLKSGEKSFYHKYSDTKINEGNRILTTPTYTAYVRIAEGCNNFCTYCAIPRIRGKYRSRKKENILKEVENLAKQGVKEIILIAQDTTMYGIDIYGKKVLHELLRDISKVEGVKWIRLLYCYPEEITKELIEEIKNNDKVCKYLDLPIQQISNSVLKRMGRKTTKETIINIIKKLRKEIEGITLRTSLIVGFPGETEGEFSELKEFVSDVKLDKLGVFKYSKEEGTSAALMEEQIDEEIKEKREEEIMILQQSISKDINKEKIGKTYEVIVEGTKEDMYYGRNYEMSPEIDGEIYFEKDENVKIGDIIKVKVTHSLEYDLIGVVYNELSK

SEQ ID NO: 52579 - protein, 352 aa, Clostridium botulinum
MVEKLKKKIKEHFSNGPKAILIVVVILMIASIVITNMRKTIIVSIDGKESQKITTFKKTYAKALTSKNIQVGPKDKVQPQLDAEIKDGSKLSIKKAVKVNVEVDGKKLAIQSAENNIGDMLKKEGIQVKKLDKVAPSKEEEIKKGLKVTVTRVEEKVIKSKKNMDYETVVKEDDSLEKGDKKVIREGQNGEKEVTTKVVFEDGKEKVRKVVSESIKKQPVSKVVAMGTKVTTVNALSRGGSVTGTPGGRLLRMRATAYTSSYEDTGKSPGSPDFGVTATGTTARRNSGGYSSIAVDPRVIPLGTKLFVEGYGYAIAEDTGGAIKGNVIDLYFDSNVEVSNWGSRWVNVYILD

SEQ ID NO: 52580 - protein, 254 aa, Clostridium botulinum
MKEIRAIIIEDEKPAIEELKYVLSKYNFLNIVDVAMTGDVGYELVKKIQPEVVFMDINMPTENGISVSKKIKEFNKDINIIFITAYEQYALEAFEIDALDYILKPFDDKRIGVTIKRLQEKIDEKYKEEIPVMISDILNKLEKEEKTLKKIPCEYRGKIILIDTKNIYYCYTMEDKTYVKTNSEEYITHNTLKEIEKKTDLFRVHRSYIVNMDNIKELYSWFNGTYKLVMNDKEQSEIPVSRNNVKKVKEILGI

SEQ ID NO: 52581 - protein, 415 aa, Clostridium botulinum
MNNMNKRVVITGMGAITPIGNNLEDFWKGIKEEKIGIGNIKSFDIEDYKVKLAAEVKDFDPEEYMDKKEARRLDRFCQFAIAAAQQAIDNSKLDLDKINKEKFGVIVGSGIGGLATIEKEEQKLLEKGPNRVSPLFIPTIISNMAAGNIAIRFGAKAICSTVVTACATGTNCAGEAFRAIKNGEADIMLAGGTEAAITPIAIAGFTTLTALSKSTDPNRASIPFDKDRDGFVMGEGSGLLVLESLDHALERGAKIYAEVVGYGSTCDAYHMTSPAPGGEGAARAIELAIKEAGINKEEVSYINAHGTSTPYNDKFETEAIKRVFGDYSSSIPVSSTKSMIGHLLGAAGAVEAIICAKSLEEGYIPATVGYKVKDEECDLDYVTSGGRNKIINYAMSNSLGFGGHNAVILLKKWGE

SEQ ID NO: 52582 - protein, 772 aa, Clostridium botulinum
MLRKIESKDLLYNLELDDINIDRTQKYTPEYNSIYEKINLALDIDKSGYNLYLVDDFSKEKLNSIINFINQKLEKKSKPKDICYVVLEEERYPYSIYLENGKGKILKEKLKDIQTKYNECIYDFYNKSSNKEKEIILESMEKKRSEIVNELIEESKKEGFEIKTGVSGFVFMPIKDGNSLSESEYEDLNKEDKEEILEKVSKLKEKAESSLEVLADMEREGLEKLKDIMRTYLEMEMKGSKEEYRMEFEDNIQTLDFLNSVCRNIEKELIESYTSSYEEDQESIINVIYKYKVNVIVDNTLNKSPLVIFEENPSVNNLVGSIEYENKSGVYYTDASLIKAGSLLKANEGCLIVRANSLFTNGSAYFYLKKALINDKIDFDYNKGYLELLSLGGLKPEPINTKLKVIIIGDYETYNLLYNYDEDFKKIFKLKSEYNKVVDINSKSKEQICKNIYDICENKDLKNINEEAVKEVCKYLSRKAENKNKFYFDNYEIDRLLIQADSKARIEDRDIITKEDIQFVAYEKEEIEKEVMEGYEKERIFIDVKGDKVGQVNGLSVIDLGYASFGRPIRITCCCYKGNGDIIDIQKESNLSGNIHNKAISTLKGYINSIIGKYDTLPVDFHLSFEQIYGTVDGDSASVAEAIAMLSALSNIPVRQSIAVTGSINQFGQVQPIGGVNEKIEGFYEVCRYKKDIKDKGILIPKSNKENLVLNKEVEEAIKNGEFSIYTMETLEDAVKILLGEKNLKFNELIVEIEKELKKYNKKSKKCRKIKL

SEQ ID NO: 52583 - protein, 272 aa, Clostridium botulinum
MIYADLHVHTNHSDGICEIANVLDMAKKKGIKAIAITDHDTVDQFDEINELGRKMDLEVVKGVEMSCYDYDVFKKVHIVGLWLNKNATHVKKLCDKTLKCRDNYHRDLIKELSEKGYDITYEDAKKYSKYSIVFKMNIFQALKEKYKHEMTKERYNELFASKTSKETDLKMGYTPVMQGIEAIKKDGGIPIIAHPCQYDNYDEIEKYVKYGLQGIEINHSKMKKIDYKKTLNFAAKYNLAKSGGSDFHDPDLIEFGCYGLTKEQYEKLKHFR

SEQ ID NO: 52584 - protein, 296 aa, Clostridium botulinum
MNYRKDIENCIEYIEEHIRESLTVNQITKEIGYSSYHFCRVFSFLKGMPLMEYVRKRKLSLSTIDLLEGEKIIDVAFKWGFETPSSFARAFRKEFGCSPSQYIKKMKFYYKSENNLILSKFMNDPYIIKKEAFKVAGYGIKTNVADSKYTKDVASFWSNYNGENLESKLYKILSPLKHGEVGLCIPCSDSGDITYLLGVIVEDFSKVTSDMITVEVPKAQYAVFTTNPVNTVESKDQREFAKIIKESWKYIFDEWFKNNDYEYDEEKLDFEFYDERCHLRPDTVMDIYVPIKKLER

SEQ ID NO: 52585 - protein, 65 aa, Clostridium botulinum
MPKMKTKRAAAKRFKVTGTGKLKRAKAFKSHILTKKSRKTKRNLRKAGYVSESQEKVMKKVLPYL

SEQ ID NO: 52586 - protein, 620 aa, Clostridium botulinum
MSNKKIENRRKGGFGSRHGGPIGAVEKAKDFKGTMKNLGKYIMPYKMSIIFVIVLAIGSAAFSIVGPKVLGKATTKLFEGLVQKVSGVKGALIDFDYIGKIIILLLVLYIISAIFSFVQGYIMSSVAQKISYEFRREISEKINRMPIKYFDNKTHGEVLSRVTNDVDTVSQTLNQSMSQIITSVVTIIGVLIMMLSISWQMTIVALLILPVSMMIIMLVVKKSQKYFKAQQEDLGNINGHVEEIYGGHNIMKAFNREQEAIEGFDKINDKLYSSAWKSQFLSGMMMPIMSFIGNIGYVLVSILGGWLAIKKTIEVGDILSFIQYVRSFTQPISQVAQIANVLQSTAASAERVFEFLEEGEEVKETENPVKLEKVSGEVEFKNVKFGYNKDKIIINDFSAKIKPGQKVAIVGPTGAGKTTMIKLLMRFYDVNKGGIFIDGHNINDFKRADLRKIFGMVLQDTFLFTGTIKENIAYGKLGASDEEIIKAAKSAHVHNFVETLPKSYDMELNEEASNISQGQKQLLTIARAILSDPKILILDEATSSVDTRTELLIQKAMENLMEGRTSFIIAHRLSTIRDADLILVMKDGDIIEQGNHEELLKAKGFYYSLYNSQFENAEVS

SEQ ID NO: 52587 - protein, 485 aa, Clostridium botulinum
MDLTKLTAHELKDMLSNKEVKAEEITKAFLDRINLVDNKLGAYLYVSEEEAIKKAKEIDGKIEKNEELKALSGIPVGIKDNINVKGMQNTCASKILEGYTSPYDAHVTEKIKQEEGIILGKLNMDEFAMGSSTENSAFKLAKNPWDLERVPGGSSGGSAVAVAGSEATLSLGTDTGGSVRQPASFCGVVGLKPTYGRISRSGVVAFGSTLDQVGPMGKDVEDCALLTSVIAGLDKKDFTTVDKEVPDYKKSLTKDIKGKRIGIPKEFFGDGLDKNVRKSVEEAIKVLEANGAEVKPCSLPLMDYALSAYYIISSAEASSNLARFDGIRYGYRSKNFKDAKDIYLKSRSEGFGDEVKRRIMLGTYVLSAGYYDAYYKKALKVRKLIKDDFQRVFKEFDAIVSPTSPTTAFKVGEKKDDVMSMYLSDIYTVPISVAGVPAISLPCGMIDGLPVGLQIISDYFKEDVLFNLAYNYEQSVDFHKMRADF

SEQ ID NO: 52588 - protein, 401 aa, Clostridium botulinum
MSYKFNTIEEAIEDIKDGKIIVVVDDEDRENEGDLLMAAEKITPEAINFMAKEGRGLICTPVKKSRLEELEICQMVHKNKDNFGTAFTVSVDAVGTSTGISAFDRAFTVSKIVDLNSKPEDFLKPGHVFPLAAKDGGVLVRAGHTEAAVDMARLSGFSEVGVICEIMNEDGTMARVPQLMEFVKKHNLKIITIADLIEYRSKEEKLIKALEPVKLPSKYGDFIAIGYENLITGEEHIALVKGDVKGEDPVLVRVHSECLTGDVFGSLRCDCGEQIAKALMKIEEEGKGVLVYMRQEGRGIGLLNKLKAYALQDEGMDTIEANLALGFPEDLRDYGIGAQILKDLGIKNIKLMTNNPKKISGLSGYGIKIVDRVPIDMGCKKENRNYLRTKKDKMGHLIDIM

SEQ ID NO: 52589 - protein, 104 aa, Clostridium botulinum
MPTVSLDKGDNYLEVLTMDKAKKQELMAKHARHEGDTGSPEVQIALLTERINHLNSHLKEHKKDHHSRRGLLMMVGKRRGLLNYLMREDIERYRAIIKELGLRK

SEQ ID NO: 52590 - protein, 272 aa, Clostridium botulinum
MKGKKIVSILAAITLTLGMVACGNSSSKDKEKANETSGDKKVITIGTSVISKDVLEEAQKVFNKKSSKYEMKVKVFDDAITPNMAVNDGSIDGNFYQYQDYMENFNKDRGTKLKAYGKPVFAFQIGLYSNKVKKISDIKDKMTVAVSNDNTNRALALKLLDKEGIIKLKKGVEVPNTLDIVENKHNLKFVEMERLNLANALNDTDMAIVMADVMLKAGKDSEKALAFAQEEGIVLVLKEDKEWAKEVEEALTSNEVKTFIKEKTKGTKTPLF

SEQ ID NO: 52591 - protein, 58 aa, Clostridium botulinum
MSEIKVGENESLENALRRFKKKCARAGVLSEVRKREHYEKPSVKKKKKSEAARKRKFK

SEQ ID NO: 52592 - protein, 811 aa, Clostridium botulinum
MRIGGLSGLDTDNMIKNMMKPYTMRVDKMKQNAQIVKWQQDAYRSVISGISDMTKKYFDVLNGDNYMLSSKNFSSLKPSGIPDTSTIKINTGSGAVSGNYSLKVIELASKAEAISDKAINIKTLSEGDYGIKIDASNSKIVIDGNEITLSESKYNNASDIAAEINSKINEDGSTLKDKVKAVVKDGSIKIENLFKIDDTNKELKVTVDGKEYTAELAKGNFTLEELTDSINGKLEVAKDADGNVLVEDKGVKASLSADGKSIEFTGTTAQPNYLVAGVNLGGTTGGTGITGTDVTVAGNSITYAKEIIAGFNDTFNIQIGTDSSKQVKLAAGTINSIDELKTKLNDAFTTAGLNTTLTATVKDGKIVLSSNSDKQVIITGESGKSATSLLGLSDRYEMSMSTNEKMSNIVNEAVEFEINGVNFKYDFTSIGAERDKTISQILADILDKANVQASYSEITKSFTLRSKEEGATQNIKCEDKSGNFVSSILGSSTTAKGKDAKIELKTPNNSTATTIIKPSNNFTIDGVNYNIAGAKKDEEISFSLDGNVEDSFNKIKGFIDDYNKLIDELQKKTSEKKYRKYEPLTEEQKKEMKENDIKLWEEKAKSGILRNDSNIENMLSTLRRAFFDSVEGAGLSLKELGLTTSKDYQEGGKIVFDQILDKNGNNGEARLKKLLKEEPDKVFKIFSQESTSYPSYSADLTLTERQIRNKEEGIFQRINDIFKDYTRTSRSASGKRGILVDKAGIEGTVSAIDNILYKDLEKREKAIQDMELKLIERENKYYIQFAQLEKYINQANSQASWLAQQLGGGMS

SEQ ID NO: 52593 - protein, 114 aa, Clostridium botulinum
MLEVIKAIEAEQVRSDLPEFNVGDTVKVHQKIKEGTRERVQVFEGTVLKRQNGGARETFTVRRVAYNVAVEKTFPVNSPLIEKIQVVRKGKVRRAKLYYLRDRVGKAAKVKERI

SEQ ID NO: 52594 - protein, 81 aa, Clostridium botulinum
MEDANILNRTYHHIAFKISNSDVDNYLDKIKTLNLELKPPRRRVSGEGYSIYFYDYDNNLFELHTETLEKRLASYTKIDNI

SEQ ID NO: 52595 - protein, 113 aa, Clostridium botulinum
MAGYRKLGRPTDQRKAMLRNLVTSFLKHGKIETTETRAKETRSIAEKMITLAKRGDLHARRQVLSFVTEETVVQRLFEEIAPKYAERNGGYTRIYKVGPRRGDGAEVVILELV

SEQ ID NO: 52596 - protein, 278 aa, Clostridium botulinum
MNNMNTKEIVNKYEFKFNKNLGQNFLIDESVLEDIIEGAEINKEDTVIEIGPGVGTLTKELLERAKEVYSIELDGDLIPILQEELKEYNNFTLIHKDALKIDFNELMENKDSIKLVANLPYYVTTPIISRLLTEKCDFKSLTIMIQKEVAERINAEPNCKEYGSLTVLVQYYCNTKIIRKVSPNSFIPRPKVDSIVIKLDRLSEPRVRVKSQKLFFNVVRSSFNMRRKTLWNSLKSLNIDKESMENAFERAGIDPKRRGETLSIEEFGKLSDCIYDIL

SEQ ID NO: 52597 - protein, 97 aa, Clostridium botulinum
MKLTNYDIIRRPLITEKTMASMADKKYTFVVDIHANKSQIKNAIETIFDVKVEDVKTARIMGKTKRVGVHIGKRPDYKKAIVKLTEDSKTIEFFEGL

SEQ ID NO: 52598 - protein, 254 aa, Clostridium botulinum
MKVISIFNQKGGVGKTTTSINLCSCLAMNGYKILNIDIDPQGNTTSGMGLDKNSLELSVYDVLTSDEISIKEAIKQSELISNFYILPSTMSLAGAEIELINKLDRERILLQKLKEIENDFDYVFIDCPPSLGLLTINALAASDSVLIPIQCEFYSLEGVGQLVNTIELVQKSLNSNLEVEGVILSMYDIRTRLCNEVAEEVKKYFNDKVYKTTIPRNVRLAEAPSFGLPIILYDSKCKGAEAYNNLSKEFIEKQ

SEQ ID NO: 52599 - protein, 824 aa, Clostridium botulinum
MIERNLFNIINKYLPMGSQIIVEEDNNNEPLIIRANLNGYGLGEIIVAYRWQEENYIMVLERYCNQWSVIDNIRGKGYDISYLKVAPITDNAMDNLIIGWRRGAIWSELDILQWTPYGFKRVIDEGIYYSKIEVENMKSVKAMNDKNEIALWLHDTAEAYKVEIYRWSLGKLVKAEDVYPYYFKKVIDFYKTKLQEEPDLPVYWYYLADAQIKGEMYEDALKSIDKALELPKAYPSKKELIKLRDYILYYKKCKNINLYSAPMNTIKGVRWGYINEKGEFLIKPLYNLALEFQCNGLAVVEIDNLYGIIDENQNYIVKHKYGFISDFSEERAIVIDNERFNIINEEGEELIPKTENYSYIGNFKEGRAQYGVIDSNKGYLYGYLDREGRVIIPAQYEYGNDFYEGKAVVRIKENEYALVNIKGEILNKYEYASVGNLREGLLSFKKDMGEKYGFIDEDGNVVIKPQFTYAHDFSEGRSVVNVSGNIMNNYGVIDKEGNYIITPKYNDIILLGENRVAVGVAIDKTSPFIGSKYAIADTEGNILTDFIYYEVSNYKNGIAFAYDDKNTFFIDKEGNKIENLPIVEGSGTLTVENELIKAYVDYKISYFDKEGNLIWEENSVISLNNQYKVIEEKYKPNKDYLVYYPKVQGMGDKDLEDEVNNRLKSLSEVKPIEENVQLEYSYLGDFKIEFFDNNLLELELDGYNFHFGAAHGIPSKIYTKIDLTTGEFYELKDLFKEDSDYVKVLSDIIGEQIKNNPEYSYIFPDSYNGIKEDQPFYVSEDTLYINFYPYEIAPYAAGFPTFKIPYKDIIDIINEAGAFWMSFN

SEQ ID NO: 52600 - protein, 433 aa, Clostridium botulinum
MEVKIDSIKLYIFGGDRMKVWENYKWSIILLISVIIGGIVGLIMGPRAEVVEPLGNLFLNLMFTAIVPLVFFSVASAIANMANMKRLGKILLSVFIVFTFTALIAAVIGVIGTLIINPTKGVDPSTMQKIMANTVNEIQNKEKVSMLQQIVNTVTVSDFALLFSRKNMLQIIIFSIIFGVSTAMVGEKGKLVAKFLEAGSTVMIKMIDIIMYTAPIGLGCYFASVIGQLGPQIIEGYVRVFILYLILTLVYYFIMFSIYAYMSAGKTGVQLFWKNALAPSITSLATCSSAACIPVNLESTKNMGVPKDIRETVIPLGANTHKDGSVIGGVLKITFLLGLFGHDMTSFKAIITIIIVSYLIGAVMGAIPGGGLIGAMLIISIYGFAPEVLGIVAVISTIIDAPATLLNSTGNTVCAMMITRLVEGKDWVKKIIA

SEQ ID NO: 52601 - protein, 300 aa, Clostridium botulinum
MIKMVEVRVPATSANIGPGFDCLGVAVNMYNKFFVEEIEEGLIFEGCADKFKNENNLIYVAMKKCFDKIGYKPTGLRIKIESDIPVSRGLGSSAACVVGGIVSANELAGGALNKKELLDLAVEVEGHPDNVNPAFCGGMTASISDNREVIYSKVKVSEGIKFCALIPDFTLSTEKARAVLPKSIDYKDGIFNVGRTALMISALNNGDFHLIKYACKDKLHQDYRAKLIENFYSIKKQCEKLNSLGVFLSGAGPTIMVMLREEDKDFSKNIKSFLETLKNKWEVRELKIDKLGTVVNNCKV

SEQ ID NO: 52602 - protein, 344 aa, Clostridium botulinum
MDYHKKLILNYLKNILTIPSPTGFTNHITNYLKKELDTIGIEYKITNKGSIIITLEGEDKSFERTLSAHMDTLGAMVKDINDNGTLSIVPLGGFMMNSIEGENCSIHTLNDEVYSGTIQTIKPSVHIHGKEAYDLKRSPENMEVILDEKIFSKKDIENLNINIGDFISFDTRNIFTENGFIKSRHLDDKASLAILLYAIKYIHVNNLPLSCTTNFLFSNYEEVGHGASYIPKNTKEFIAVDMGAPGENQNSSEYSVCICAKDSTGPYDLDFRKKLINICKTSNIPYKIDIYPSYGSDASAALKAGFDIKAALIGPGVYASHAYERTHMDSILATLDLIIKYCVS

SEQ ID NO: 52603 - protein, 704 aa, Clostridium botulinum
MSMTPEHAEALKNESAVVCCRAEEGTILTADNLEDPEIFPDMVDSGLLTIPADCLKVGEVIGAKLLKTVDSLTPLTPDIIEGAKTIGGSEEKAEEISEELTEEDEKAVLKYNLKAGDTIKASDLENPMHFEKLVDSLLLTLDERVLTRKEVVGATLSVDTPALTPVTPDILEGFEEEVNMSADTQATISGGTLRIRIAEGKGIDIEVPLNGNVGTGKSIAVPAVKAEKGTVTAAPVAVEAKKEVKLEEKIVRSVTRKHYKIDKVELAKETKIEGTTLYIRENICEDAFNVDQLVKDIKLEIITPDKYNTYSETIMDVQPIATKEGSDAKLGEGVTRVIDGAIVMVTGIDEDGVQVGEFGSSEGILEENIMWGRPGAPDKGEIFIKTQVTIKRGTGMERPGPLAAHKATDFITQEIREALKAVEDDSLVVNTETFEQVRRPGKKKVVVVKEIMGQGAMHDNLILPLEPVGVIGAKPNVDLGNVPVMLAPTEVLDGGIHALTCIGPASKECSRHYFREPLVMECMQDEEVDLAGVIFVGSPQINSEKFYVSERLGMMVEAMDVDGAFVTTEGFGNNHIDFASHVEQIGMRGVPCVAFSFCAVQGALVVGNKHMKYMVDNNKSEGGIENEVLSCNTLCKEDAVRGLAMIKAAMSGEEVKKPERAWNANVKENNIEMIEKSTGNKIDRVLNETSIPMSEKRKEKYATK

SEQ ID NO: 52604 - protein, 521 aa, Clostridium botulinum
  MISC_FEATURE (264)..(264): X=any amino acid
  MISC_FEATURE (269)..(269): X=any amino acid
  MISC_FEATURE (270)..(270): X=any amino acid
  MISC_FEATURE (277)..(277): X=any amino acid
  MISC_FEATURE (285)..(285): X=any amino acid
NILEVKGLRIEEEKNKKILVGNTNFEVEKGKITCIVGESGSGKTITAMSIIGMLPQGVRVIEGEILFNGKNTFNFSKEKLRDFRGKKIFSIFQNSINCFNPSVIMETQIYNMICSHYSIDKENFRNKLINIMKNINLKNPEIILKQYPFQLSGGMLQRMMIASAILMEPDIIIADEPTTALDLTSQKDILNQLKMIKEKLNTTILMITHDFGVVAEIADNVIIMQNGNIIEKGNVYNIFDNPQENYTKTLINATFKREVTYVCXKLKMXXKAIILNXGYLQKINXIFRAIDNVSFKLKEGEAIGIVGESGCGKSTLGRLILRLENTTEGSIKYKGKDIWNFKGKELKIFRKQCQIIFQDTYCSLNPNIKIIDSLMEPLDNYFIQLSREEKINKIENIIGFAKLDKDILEKYPSSISGGERQRINICRALLLEPKLLVCDEIISSLDVCTQVSIMSMIKELREKSNTAILFISHDISVVDYLCDKIIVMESGRIIETIENKKLGLYSYKKEYTEKLLSSVPI

SEQ ID NO: 52605 - protein, 457 aa, Clostridium botulinum
MYNCAIILAAGKGKRMKSSMPKVVHKVCGKEMVNHVIDNVRKANIKDVNLVIGKGSETVKEHTKDRNVTYSMQEEQLGTGHAVICAEEFLKDKKGTVAIFTGDAPLITNETIQQLFEFHNSGKYAATLISSTVQDPTGYGRIIREASGEVKKIVEHKDCNEEELKVNEINSGMYCFDIEVLLNSLKNLNNDNSQGEYYLTDVIEITKKSGDKVGAIVVPYEEIMGVNSRVQLSEAEIVMRKRINHKHMVNGVTFIDCESTYIDVDVEIGNDTIIYPGCVIQGNTRIKEECTLYSNSRICNSVIGSGVIVENSVILESHVGEGTTVGPFAYIRPETKIGKSARIGDFVEIKKSTIGDNTKVSHLTYIGDAEVGSKCNFGCGTVVVNYDGQKKQKTIIGNNAFIGCNTNLISPVKVNDNTYIAAGSTITKEVPEGSLAIARSKQINKEGWLDKKGLLKK

SEQ ID NO: 52606 - protein, 623 aa, Clostridium botulinum
MAKIIGIDLGTTNSCVSVMEGGEPVVIPNAEGSRTTPSVVSFQANGERLIGQVAKRQAITNPEKTIISIKRYMGTDHKVNIDSTEYTPQQISAMVLQKLKADAEAYLGEKVTQAVITVPAYFNDSQRQATKDAGKIAGLEVLRIINEPTAASLAYGLDKMDTNEKILVYDLGGGTFDVSILELGDGVFEVKATNGDTKLGGDDFDQKLIDYIAETFKAENGIDLRNDKMAIQRLKEAAEKAKIELSSATQTNINLPFITADATGPKHIDMNLTRAKFNELTHDLVQRTLEPIKKSLEGSGYAMSDIDKIIMVGGSTRIPAVQDAVKDFTGKELSKGVNPDEVVAMGAAIQAGVLTGEVKDVLLLDVTPLTLGIETFGGVSTTLIEKNTTIPTRKSQVFSTAADGQTSVEIHVVQGERSMAADNKTLGRFTLSGIAPAPRGIPQIEVTFDIDANGIVNVSAKDKGTGKEANITITASTNLTDDEIEKAVNEAKKFEAEDKKRKESIEIKNNADQIVYQTEKTLTDLGDKVSAEDKAQIEEKVKAVKDVKDGEDLEAIKKATEDLTQTFYGISSKIYQQANPEGAQGAGFDPNNMGGANAGNASAGNDKKDDNVVDADFKVEDDK

SEQ ID NO: 52607 - protein, 294 aa, Clostridium botulinum
MNEDLNFINSFPKSVPGQEQSKQPGIEAIMNPKPIFDNPNYKASAKLMDRVALITGGDSGIGRAVAVTFAKEGADISIVYFDEHEDAKETQAIIEGLGRKCLLIPGDITDDNFCNNAINQTINTFNKLDILVNNAAVQYVQNSIEDITKEQLEKTFKTNIFSMFYLVKAALPYLNRGASIINTASITAYKGQKLLIDYSSSKGAIVSFTRSLALSLWSKGIRVNAVAPGPIWTPLIPSSFDTNHVETFGSTTTMGRPGQPVELAPAYVYLASNECASFVSGEVIHINGGEIING

SEQ ID NO: 52608 - protein, 319 aa, Clostridium botulinum
MENENLIEVRNLKKYFKVGKDAILKAVDGVSFDIRKGETLGLVGESGCGKTTCGRTILGLYEATEGEVRFEGINIHDFNKKEKREFTKEAQIIFQDPYASLNPRMTVADIIGEGIDIHEIYTGGERLNKIYELLSLVGLNKEHASRFPHEFSGGQRQRIGIARALAIEPKFIVCDEPISALDVSIQAQVVNLLIDLQNKLGLTYLFIAHDLSMVRHISDRVGVMYLGNVVELSNSKELYEKPLHPYTKALLSAIPVPDPKLGRDRERIMLHGEVPSPINPKPGCKFAARCKYAKEICKKEKPKLKEIEKNHFVDCHLFD

SEQ ID NO: 52609 - protein, 371 aa, Clostridium botulinum
MAFYLFSYNKKPIYFLPNQLYNIINYNKLYDYLIFIWEVYVMNYNVAVVGATGMVGRKFIEILESRNFPIENIYFFASKRSAGKTLKFKTSEILVEELKEDNIKNKKIDFALFSAGGDISKDFAPVFVKYGATVIDNSSAWRMDPEVPLVVPEVNAEDIKWNKGIIANPNCSTIQALVALKPLHDKYKIKRIVYSTYQAVSGAGLSGFNDLKNGYTGESPKKFSYAIAGNILPHIDVFLENGYTKEEMKMIDETKKMLHDDTLKITATTARVPVFHGHSESINVELEKPFELEDIFEIYKNAEGIVLKDDVANLVYPMPIDVAGHDEVYVGRIRRDFSLDNGLNLWVVADNIRKGAALNAIQIAEHIIKSK

SEQ ID NO: 52610 - protein, 295 aa, Clostridium botulinum
MENMVKSMTGFGRGFLEQDKKSFTVEMKSVNHRYCDINIRMPKAFMALEEKMRATIQEKVHRGKIDIYITVNTYDKDDVELIYNETLSDNYYECLKKISGRYDVKNDISVSLIGRFPEVITVKQKEEDLEEVWKSLNTPLKEAVDALVSMREREGSKLYKDINIKCDEIKKMVDRIEEKAPKVVNEYNKKIHERVSELLSQSEIDESRIAMEVALFVDKSSVDEEIVRLNSHINQVSETLNLKEPVGRKLDFIVQEMNREANTIASKSTDLEIVNLVLNIKNYIEKIREQIQNIE

SEQ ID NO: 52611 - protein, 180 aa, Clostridium botulinum
MSRVGKLPVAIPNGVTVTVTPDNVVTVKGPKGELVKAMSNKINIAVEDNSVVVTRDNDHKDVRALHGLTRALVNNMVTGVNEGYVKTLELIGVGYRAQLQGKKLVLSLGFSHPVEMEAVSGVEFEVEGGTKVKVKGIDKELVGAVAADIRKWRKPEPYKGKGIKYENEVIRRKEGKTGKK

SEQ ID NO: 52612 - protein, 462 aa, Clostridium botulinum
MENIKLEEIIKAVNGELVITGEKDEYNSVSTDTRKIEKGDIFIALKGENFNGNNFVEMAIEKGAALCIVSEINFSEGKVSKSSYVIKVENTNKALLDLAKYYRSKLDIKVVAITGSTGKTSTKDLVAAVLSEKYKVFKTEGNFNNEIGLPLMIFKLDKSYDIAVLEMGMNHFNEIHNMAEAAKPDIAIITNIGISHIENLGSRENILKAKLEITDFFCKDSILIINGDDDLLSNFESDKFKVYKIGTDKKFDFNGDNLNLEAESIKFDILERGKTAYRCFSVNVPGKHNVLNSLTAIACGRVLDINYRDIQTGIKNLKATSMRLDIVKEKGFTIINDCYNASPDSMKAAIDVMKNIKGKRTIALLGSMRELGSEGYRAHREVSEYAREKGIDLLFSIGEFSEAYREGFEEINKENYKSFLNNEEAAKYIKNIIKDGDIILIKASRAMKLEEIVKELRIKQEK

SEQ ID NO: 52613 - protein, 201 aa, Clostridium botulinum
MKDLDFYPIAIEKLIEEFAKLPGIGYKTAQRLTLYVLNLPKEEVKEFSEALVKARGTIKYCSVCGNFTDKDPCAICSNPNRNKSIICVIEQPKDIMSMEKIREYNGVYHVLHGNISPMAGRGPEDIKLKELIRRIDGSVNEVIVATNPNVEGEATAMYISKILKPLGVKVTRIAHGVPVGGDLEYADEVTLAKALEGRIEL

SEQ ID NO: 52614 - protein, 337 aa, Clostridium botulinum
MAKDDKLTGVQKAAILFITLGPEASAGIIKKLPDSEIQKITYEIANITSVKSELKQDILEEFIQINKAKDYILEGGFEYAKNLLGKALGSQKAIEILDKVTEATQQFRPFAIARKADPSQLLNTISNEHPQTIALVLCYMQSDKAGQILSSLPEDLQSEVAYRIATMSATSPMVVKEIEKVLDSKLSSVVRSDATTIGGVQTIVEVLNQVDRTTEKNITEGLQREDAELAEKIKESMFVFEDIITLDDVAIQRVLREVETKDLALALKGSSEEVANVIFRNQSKRAASSLKEDIEFLGPVRIMDVEKAQQGIVSIIRRLDEAGEIVISRGGEDAIIV

SEQ ID NO: 52615 - protein, 633 aa, Clostridium botulinum
MFRKVGNYMKYSAGDFDVVVIGAGHAGCEAALASARMGCKTLICTMNLDSIALMACNPNIGGTAKGHLVREIDALGGEMGINIDHTFIQSRMLNTSKGPAVHSLRAQADKKRYSERMKHLLEKEDNVVLRQLEVIEIDVEDNEVKGVLTKNGAYFTTKAIILCTGTYLKGKIIIGDIIYSSGPSGLYPANDLSQSLLDLGINLRRFKTGTPARINKRSVDFSKMIEQPGDEKIVPFSFIHNKLDKDQISCYLTYTSEETHKIIHENIHRSPLYNGSIEGVGPRYCPSIEDKIVRFPDKDKHQIFIEPEGENTEELYVGGMSSSLPEDVQIKMYRSVPGLENAEILRTAYAIEYDCIDPQQLDLTLEFKNINGLYGAGQFNGSSGYEEAAAQGLIAGINAVLKIKEKNPLILKRSDAYIGVLIDDLVTKGTNEPYRMMTSRAEYRLLLRQDNADLRLTELGYKVGLVKEDRYNKFLNRKKNVENEIERLRNMQITGKREINEFLLEKGSTELKKPISLYELIKRPELDYFKVESLDDKRPSLSDDEKEEINIIAKYEGYINKQLEQVEQFKKYEDRLIPKSINYLDIKGLRLEAIQKLEKIKPINIGQASRISGVSPADISVLLIYMERKNREN

SEQ ID NO: 52616 - protein, 320 aa, Clostridium botulinum
MMLDKHGRKINYLRVSVTDRCNLRCVYCMPPEGIVKKEHDNIMRYEEIFKVVKSASLLGVNKIRFTGGEPLILKDIDKLIYNTSKINSIKDIAMTTNAILLEDMVEELKKAGLKRVNISLDSLKEDRFKSITRGGDINKVFKSIEKSLSIGMKPIKINTVIMKGINDDEIDDFMNLTKKYPISVRFIELMPIGEGRKLYKDGYISSEEIISKHSDLIPVETEKSSTALLYKFKESKENIGFISPMSCKFCSGCNRVRLTSEGTLKPCLHSEKEVNLKNYVGNNQALLSKINETIYNKPLEHHMIEEKESKSKKMMYQIGG

SEQ ID NO: 52617 - protein, 415 aa, Clostridium botulinum
MSLQAPKGTKDLLPTESYKWQYLENKFRNIAADFGCREIRTPVFEYTELFQRGVGETTDVVQKEMYTFEDKAGRSITLKPEGTSPAVRAFVEGRLFNETQPTKMYYFTPVMRYENVQKGRLRQHHQFGIEIFGAKDASVDAEVISIPVGIYKELGVEGVELNINSIGCPKCRKTYNEALKKYLSKNYDKLCSTCKTRFDKNPLRILDCKVDTCKEIVKDAPIILDYICDECKDHFEALKSYLDVLDIKYKVDPFIVRGLDYYSKTVFEFIIDDITICAGGRYDYLIEEIGGPSMPAVGFGMGIERLLLTLQEKAIEIPEEAYVDLYLGNMGDKAKLEVLKLAKELRDRHIKCEIDHMGKSVKAQMKYANRIGAKYSMVLGEEELNTGKVSLKRMEDGQQIEVDIKEIDTLIKVFK

SEQ ID NO: 52618 - protein, 155 aa, Clostridium botulinum
MRIGLGYDVHKLVENRPLIIGGVTIPHDKGLLGHSDADVLVHAIMDALLGAAALGDIGKHFPDSDKNFKNISSLLLLSKVKDLINKEGYKIVNIDCTIIAQKPKMLYHIDAMKKNICKCLKLDNNMLNIKATTEEGLGFTGKEEGISANAICLLD

SEQ ID NO: 52619 - protein, 245 aa, Clostridium botulinum
MIKISNLHKSFNGVEVLKGINLDIKKGEVVAVIGPSGTGKSTLLRCMNFLEKPEKGIIEIEDLKVDVEKATKQQIHELRLNTSMVFQSYNLFKNKTALENIMEPLVIVKKMEKDKAKERALNILKQVGLEDKKDYYPSKLSGGQQQRVGIGRAMAVDPKIMLFDEPTSALDPELVGEVLEVIKKLAEQDTTMIIVTHEMRFAESAADKVIFMDGGNIVEQGTPEEVFNNPKNERTIKFLNKVKDK

SEQ ID NO: 52620 - protein, 608 aa, Clostridium botulinum
MCGIVGYVGFRKASDVIVDGLSKLEYRGYDSAGIAVNDGKEIEFQKYKGRLNVLSENLESKPMEGTIGIGHTRWATHGVPSDVNSHPHLNMDETIAVVHNGIIENYMEIKDWLSSEGVKFKSETDTEVIAHLVDHYYEGDLLQAVFKAIKKLRGAYALGVVCKDNPEQLVAVRKDSPLIVGIGENENFIASDVPAILKYTRDVYFLDNGEVVTLEKDKIKIYNEKEEGITKEPFHVMWDVEAASKGGYDHFMIKEINEQPNGIKETLVRRLDENGKIKLDDIKLTKEDLDEINKVYIVACGTAYNAGITGRYAIERFAKIAVETDVASEFRYRNPFIDDKTLIIVVSQSGETADTLAVVREGKEKGARVLAITNVVGSSIAREADDVFYTWAGPEVAVASTKAYTTQLVALYMIALDMGIKRGTITEEFYNDIISELKLIPEKVQKILYQHDDIKEIAKEIKDNEHAFYIGRGLDYNLSLEGSLKIKEISYMHAEAFAAGELKHGTIALIEENTPVVATMTQTDLFEKSISNIKEVKSRGAHVIAITQEGNKEAEQVADKVIYIPRTNDILQSIIAVVPHQLLAYYVAILKDRDVDKPRNLAKSVTVE

SEQ ID NO: 52621 - protein, 269 aa, Clostridium botulinum
MNLNNLENIRYNEIKEFSDKIKKEFTFSQKKQVMDIIEKLNKDSRKNVIKLGQALEKFLNKYEEELKRTNNMYNFDRRYGNNYLIAGVDEVGRGPLAGPIVAAAVVLDLNVEEMQRIFNIKDSKKLSEKKREELDIIIREKAISYNIALVDNKTIDERGISWSNNEVLKRAVEGLKVKPDLVLSDGYAVKNLNIRNEFIIKGDSKSISIASSSIIAKVYRDSMMKEYSKGLNMYGFNHNAGYGTEEHVQAIKKHGPSKIHRMSFLTNIL

SEQ ID NO: 52622 - protein, 301 aa, Clostridium botulinum
MDILLAVLEQGFIFSIVCFGVYITYKILDFPDLSVDGTFPLGAAVAAAFLVKGYSPVLSSLAALVAGAIAGGITGILHVKFKITNLLSGILVMVGLYSINLRIMGKSNIPLFNKIHLFSDTMNPIIIITVFLLICKITLDLFLKTKAGFILKATGDNEQLVLSLGVNKDLVKIMGLMLSNALVALGGALMAQYQGFSDVGMGTGIVVMGLASVIIGESLFGRIKALNATTRVLLGALVYKLSVSIALTVGLAPTDLKLVTAIIVVIALSLNKNPLKIITKQKTKEGGILNASNTKSAQSVQ

SEQ ID NO: 52623 - protein, 249 aa, Clostridium botulinum
MAIIKTEDLNLYYGNVKALKNINIDIEKNKVTALIGPSGCGKSTFLRTLNRMNDLIDSVKIEGSVYYEGKDIYKDYDVIDLRKKIGMVFQNPNPFPMSIYDNIAYGPRIHGIKTKEKLDEIVEKSLKGGALWEEVKDRLKKNALGLSGGQQQRLCIARTLAVEPEILLMDEPTSALDPISTLKIEELMDELKNKYTVIIVTHNMQQAGRISDNTAFFLNGEIIEVGKTGELFYKPKDKRTEDYITGRFG

SEQ ID NO: 52624 - protein, 263 aa, Clostridium botulinum
MKNKNVIQKMREKTPLIHCITNYVTINDCANILLSFGASPAMCEAYDEVYDFVSISSALYINLGTLTKEQETAAVLASISAKNHNVPVVIDPVGCPAIKRKVEVINRIAEVGRIDIIKGNIGEIKFLAGMDSETRGVDSLDNGENALDACTQLAKKYNCIVAATGEKDFVSDGKRGSVIKNGTEMLTKVTGAGCMLGALCAATCANFEDKLVSTTAAILSMNIAGEKAYEEAQLPGSFRIALIDNIYMISDEEIWERGNVEWK

SEQ ID NO: 52625 - protein, 441 aa, Clostridium botulinum
MCMLEKKYGLWTTVSMVIGIVIGSGVFFKADNILMASGGNVKTALLAWLVGAISMIFGALVFAECANRFERSNGIVDYAEGMLSEKFAYLIGWFNGIIYYPAIAAVLAWAAGNYTAILFNKDGNFVWIMAAIYMIGIYILNYISPILSGKFQIASTAIKLVPLMLIAILGTFQGLNNGILIENFSKVSTIGDSGSGFAAAVLGAAFAYEGWIIATTINGEIKDAKNTLPKALVFGSLVIVIIYILYFLGIVGMIPTETILKQGDNTVNVAARTVFGNFGASILTTFIIVSCLGTLNGLILGGSRSFYSLAIRGQGIKPEAFSKLDSKTNIPTNSTIANFILICIYLVVWYMNFKGLFPNKMFVDISELPIALIYGIYIIIYIAYMMKMKDLSFIKRFVIPSLALMGALIVVYGGLSKPSVIIDLGISVFVFLSGLLFYNKK

SEQ ID NO: 52626 - protein, 112 aa, Clostridium botulinum
MRIMYKTLSRQLLNFKEVTKVNKSELITSMAEKSKLTKKDAETALKAFIESVEEALEGGEKVQLVGFGTFETRERAERVGRNPRTKEEITIPASIAPVFKAGKELKEKVNKK

SEQ ID NO: 52627 - protein, 107 aa, Clostridium botulinum
MSLNYDDNAKIIKALSDGNRLKIIDILSCGEKCACDILEHFQFTQPTLSHHMKVLIDCGLVKSRKEGLWSHYSLNITNCNKLILFFMSIITDTDDCICKNKSKCDCE

SEQ ID NO: 52628 - protein, 461 aa, Clostridium botulinum
MIWVSFDFIKDKNKHIHFIGIGGISMSGLAEILLYNNFSISGSDMNSSPITEKLKDKGAKIYIGHKKENVKDADLIVYTAAIASDNPEITKAKEKNIKLMDRADFLGNLMKGYKYNIAISGTHGKTTTTSMLSHVALKANVDPTILVGGNLDIINGNVRVGESDFFITEACEYKSSFLKFFPYIGVILNIDADHLDYYKDLDDIKNAFSKFIKLIPKDGYLVAYGEDKNIQSIIKEASCNVITYGINSGDIQAHNIEYDEKACGNFDVVKDNQKLFSVKLNVPGKHNILNSLASICIGLASNMKDKDIIEGIESFFGTHRRFELKGCKNNITVIDDYAHHPTEISATLDAAKKYPHNKLFCVFQPHTYSRTLTLFDDFTKCFDNADEIILADIYAAREKDTGIISSDMLGDKLRDRGLKCTNFHKFDDIKNYLIENTKDGDLILTVGAGDIYKVGEMYINL

SEQ ID NO: 52629 - protein, 79 aa, Clostridium botulinum
MDPKAFVSGMAALGAGIAALACIGAGIGTGNATGKAVEGVSRQPEASGKIMSTLVIGSAFSEATAIYGLIIALFLIFKI

SEQ ID NO: 52630 - protein, 150 aa, Clostridium botulinum
MGGVFMPNKFLIIDNSILPDIFEKVVKVKELLANGKVKDITEGVKTVGISRSTYYKYKDFVFSVSEGVKSQKATIGLLLGHERGTLSKILDRIAEYQGNILTINQDIPINNTANVSITFDISQMSIGLKELVEEIKNTKNVIKVDLIAME

SEQ ID NO: 52631 - protein, 376 aa, Clostridium botulinum
MYKLLKKSGKARRGEFTTPHGVIQTPVFMNVGTLAAIKGAVSSMDLKEIGCQVELSNTYHLHLRPGDEVVKKMGGLHKFMNWDRPILTDSGGFQVFSLSKIRKIQEEGVYFNSHIDGRKIFMGPEESMRIQSNLASTIAMAFDECVENPAPREYVEKSVERTTRWLHRCKDEMNRLNSLPDTINNKQMLFGINQGGTYEDIRIEHAKTIAKMDLDGYAIGGLAVGESHEDMYRIIDAVVPHLPEDKPIYLMGVGIPSNILEAVDRGVDFFDCVLPARNGRHAHVFTKEGKINLLNAKFELDDRPIDEGCQCPACKHYTRSYIRHLFKAKEMLAMRLCVLHNLYFYNNLMEEIRDAIDGNYFKEYKERKLKEWGGRA

SEQ ID NO: 52632 - protein, 967 aa, Clostridium botulinum
MRNKKYNLMPKIISLFFILFLFSIRVQAISNISIDLKTPIHKGIINDKKLNIDGEIKSILKLKSIYLYIDNKKIGQANLNELEFKENTYKTRLKYTKDISSLKNGIHNLRILAIDEQNNKKEKEISINIQENQEKSETDKNIIQNNLVDTNVKMGNIEKALTTVSNEAKLEKVEVSYNGNVITNGEIGVGKSYVIKGYGNSENGVLYQFWVKDLSTNSWTMIRDYGETNSFNYTPTKAGKYLIGIHVKDKYSKENLDDFIYENYTVTVSKAKLEKVEVSYDGNVITNGEIGVGKSYVIKGYGNSENGVLYQFWVKDLSTNSWTMIRDYGETNSFNYTPTKAGKYLIGIHVKDKYSKENLDDFIYENYTVTVSKAKLEKVEVSYDGNVITNGEIGVGKSYVIKGYGNSENGVLYQFWVKDLSTNSWTMIRDYGETNSFNYTPAKAGKYLIGIHVKDKYSKENLDDFIYENYDVSISKAKLEKVEVSYNGNVITDGEIGVGKSYVIKGYGNSENGVLYQFWVKDLSTNSWTMIRDYGETNSFNYTPAKAGKYLIGIHVKDKYSKENLDDFIYENYDVSISKAKLEKVEVSYNGNAITNSEIETGKNYTIKGYGNSKNEILYQFWVKDLYTNSWTMIKDYGEENSINWKPTIGGKYLIGIHVKDKYSADTLDDHIYENYTILSDNARLEKVEVKLDGNLISNNLNVGKTYTIEGSATSKNGVLYQFWVKDLSINSWAMLRDYGESNNITYTPTKSGQYLIGVHVKDKNSKESLDDFKYNQYSIIGYNKTVIVDAGHGGYDSGAVGPTGIKEKDVTLKVALKLGKILENSGVNVIYTRTSDNVSWPSNESQDLAARVAIANNNNTDLYVSIHANSFNGSANGTETYYYDGSAKGKETAEKVQKELVNSIGLYDRGVKTAGYYVLKNTISPSILVELGFIDNRNEEILLNSDWFQQKCAEAIAKGILSTSFM

SEQ ID NO: 52633 - protein, 281 aa, Clostridium botulinum
MKNIGININTDKDISRNILDKIFQYIHEECSEAKIKVFYDSKGLDNEESRALDAVMVLGGDGTILGTARALAKYDVPIFGINRGHLGFLAEIELEDCKKAIKNLFKGQYKIEDRIMLKCDLKGIDKKDDFLALNDIVLTKGNLSRIVKYSIYVDDVWYTTFVADGVIVSTPTGSTAYSLSAGGPIVYPDLDVLEIAPICPHSLGIRPILLNGNSKINIRVLKKYEDPVLTIDGQRYKKVTVNEVTISKSEYKCRLIKFKDKDYFKILRTKISYRSRECEGE

SEQ ID NO: 52634 - protein, 205 aa, Clostridium botulinum
MEINYELYLITDRRFLKGRQLKKVVEDAILGGVTIVQVREKDVSTREFYNVAKEVKEVTDYYKVPIIINDRLDIAQAIDASGVHLGQKDMHLNIAREILGKDKIIGISVGNVKEALQAQNNGADYLGIGTIFPTGSKKDVDAIIGIDGLSKIKDSISIPSVAIGGINKTNFKDVLKTGIEGISVISAILDEDDIKLAANNLLINK

SEQ ID NO: 52635 - protein, 317 aa, Clostridium botulinum
MKLGFLIPNHPNEKRVALLPEHVKGFNNELVIETGFGETLGISDAEYVKVGCTIASREEIFKTCEGIFSLKVLKPQDYKHIREGQIIVGWTHPEGSGKIFMEEQGIPKNLIIVDLDNIHPSIYYKDYVIPMEWIPSNFVRKNSYIAGYASTMHAVMNYGSIPTSETKVAILGSGNVSQGAFSAISKFNPDIRMFYRKTMNQLKDELEEFDIIINGIEMDNPNKHILTLEDQMRLKKNCLIIDAAANLGKAIEGARHTTASDPIYNKDGKYYYAVNNSPSIFYRQSSKAISEAFSKHVYSKELEFYLDVIAEVEEMIV

SEQ ID NO: 52636 - protein, 125 aa, Clostridium botulinum
MPTISQLVRKGRKTIASASDSPALKECPQKRGVCTVVKTTTPKKPNSALRKVARIRLTNGYEVTAYIPGVGHNLQEHSVVLIRGGRVKDLPGVRYHIVRGALDAAGVANRMQSRSKYGAKKPKQK

SEQ ID NO: 52637 - protein, 585 aa, Clostridium botulinum
MHIKGIFMLNKEVNMISQDIRKIAPEMDPLRRGMGWSVEDLSKPQIIVESTFGDSHPGSAHLIKFANNAVQGVAERGGKAARYFATDICDGMAQGHDGINYSLASRDTITSLIEIHANATPFDGGVFISSCDKAVPSHLMAIGRLNIPSIVVTGGVMEAGPNLLTLEQIGAYSAMYQRKEITEEELTYYKHNACPSCGACSFMGTASTMQVMAEALGLMLPGSALMPATCKDLEDVAVEAGKQVVELAKMNLKPKDIVTEKSFENAIIIHAAISGSTNSLLHIPAIAHEFGIKIDEESFDRIHRYAPYLLNIRPAGKWPAEYFYYAGGVPAIMEEVKHLLHLDVMTVTGKTLGENLEDLKKNGYYKNCDKYLKKVGLTRRDVIKPISEPIGENGAIAILKGNIAPEGAVVKHSAVPEEMHKGILKARPFDSEEEAISAIISKKINPGDAVFIRYEGPKGSGMPEMFYTTEAISSDKELSASIALITDGRFSGASKGPAIGHVSPEAAMGGPIALVEENDLIEIDIEKRILQLVGVNGQKLSEEAIDKVLVERKAKWEKRENKYKSGILKIFSERAVSPMKGGYME

SEQ ID NO: 52638 - protein, 197 aa, Clostridium botulinum
MEIRIHRILPKTEVEGPGTRCCIWVQGCPIHCKGCGAKETWDFKGGELLDTNEVFDIIKNSKEIEGVTFLGGEPFVQASAVYDIALRAKSIGLTVLTFTGYTYDHILKSNKKEWNDLLSVTDLLIDGPFDEDKFDISRPWVGSSNQNYRFLTPSYKHLENNLTSIKNKIEVRLHKDGAIFLNGMGDFNSIKSKLKNL

SEQ ID NO: 52639 - protein, 1432 aa, Clostridium botulinum
MENTSVGDLQKEINKERFDTDKEIKIVRVQYFRKKNKLRIILKSIGNFTKEKEDHIKNILKKRFSMVEDFEIICYKDLSNITLEELSKKYWVDIVNLASSSVPIARDCLLKSKREVLEDSINITYNNEFLCRFLSKNKFEGKLKSYIRDIFGIKCNIKLEYDKSFNEEDYFKTIETMEKSMIKNVLSEIKSKEKKVIRKENSPKTREEENKDTSVILGRSIKEDSIFMKDLNENSGIVVVCGDVFKKEVIETKTGRKIVTFFITDYTNSMTVKLFPRPRDADRIIEEIKEGIYCKVRGEVVNDPYARECVIMAKDIVKTTKIEKMDIAEEKRVELHMHSQMSAMDGMTPVSELVKRAAKWGHKAVAITDHGVVQAYPDAMSAAKKGNIKVIYGIEAYLVDDGVPIVSKAGDKTIEDTFVVFDLETTGFSSKNDKIIEIGAVKIEKGKIVDRFSEFVNPERSIPDKITELTSITDDMVDDKEAIDKILPRFIDFIGDSVVVAHNASFDVSFINKNCKDLKIEFENSVMDTVTLSRFLFPELKRYKLNVIAKHLGISLENHHRAVDDAKATADILLKSFEMLREKEIITLHSLNKEFLGNINIKKEPTHHLIILAKNAVGLKNLYKLVSKSNLEYFFKRPRMAKSLINEYKEGLIIGSACEAGQIYKEILKGKTKEELKNMIDFYDYLEIQPLGNNEFLVKNGSVKDEKELEEINKKICELGEFYNKPVVATCDVHFLDEEHEVFRRILMSGQGFSDADNQPPLYFRTTEEMLKEFEYLGEEKAKEVVIYNTNKIADMIDEIKPIPEETFPPKIEGAEEDIRRMTIEKAHSIYGDPLPEIVEKRLTKELNSIINNGYAVLYLIAHKLVAKSYEDGYLVGSRGSVGSSFAATMSDITEVNGLPPHYVCPKCKYSEFFTDGSVGSGADLEDKDCPNCGTKLIKDGHDIPFETFLGFEGDKEPDIDLNFSGEYQGVVHKYTEVLFGKGHVFKAGTIGTIAEKTAYGFVKKYLDEKNIKANNAEIERLSKGCTGVKRTSGQHPGGIMVVPADNEIFNFTPIQHPADDTESDVITTHFDYHSISGRLLKLDILGHDDPTVLRMLQDLTQVDPKSVPLGDPKVISLFTSPEALGVTEEDIDCPVGTYGLPEFGTKFVRQMLLDTKPKSFAELVRISGLSHGTDVWLNNAQYFIKEGYTTIKDCISTRDDIMVYLLQKELPPKSAFTIMEKVRKGKGLTEEQEALMKEHDVPDWYIESCKKIKYMFPKGHAVAYVMMAMRIAYFKVYYPRAYYATYFSVRADDFDADLIVKGEEKIKEKMNELYAMGNNITQKDKGLLTILEICYEMYKRGIKFLKVDLYKSNATKFLIEGDSIRPPLSALQGVGKNAAKSIEEARLEGEFISKEDLRLRTKATKTVIETLENHGCLRGMQETNQISLFSL

SEQ ID NO: 52640 - protein, 811 aa, Clostridium botulinum
MKKLSFNIEGMTCAACAKAVERVSKKLEGVQEANVNIATEKLSIIFDEKKCNTLDIEKAIEKAGYKAFLDGQHMNLKIEGMTCAACAKAVERVSRKLEGVIEANVNIATEKLDITFDKSKVSINDIKRAIEKAGYKALEEKNIEEEKKGKEDAIKSLWRRFITSLIFAVPLLTISMGSMMGLKLPKIIDPMHSPLNFGLIQLILVIPIILVGNKFFRVGFKSLVKGSPNMDSLISIGTSAAVVYGIFAIFQISKGNMHYAHDLYFESGATILTLITLGKYLESVSKGKTSEAIKKLMALAPKNATIIRDNKEIIIPIEEVKINDIVLVKPGEKLPVDGEIIEGSTAIDESMLTGESLPVEKHIGDIAVAGSINKHGLIKYKATKVGKDTTLAQIIKLVEEAQGSKAPIARLADKISAYFVPTVIALAIISSLAWYVSGKSLIFSLTIFISVLVIACPCALGLATPTAIMVGTGKGAENGVLIKSGGALETAHKVQSIIFDKTGTITEGKPKVTDILVSEGVDEKYLLQVAATAEKGSEHPLGEAIVKKAEEENLELFQGKNFRAIPGKGIEVIIGDKKVLLGNLRLMEEYEVEIKDFMDKSHKLSKEGKTPMFIAIENKIKGIIAVADTLKENSKKAIEKLHDMGVEVVMITGDNKNTAEAIGKQVGIDKIFAEVLPSDKANWVKKLQQEGKIVAMVGDGINDAPALAQADIGIAIGSGTDVAIESADIVLIKSDLMDVPTALKLSRATIKNIKENLFWAFGYNTLGIPVAMGVLYIFGGPLLNPMIAAAAMSFSSVSVLLNALRLRRFKS

SEQ ID NO: 52641 - protein, 757 aa, Clostridium botulinum
MKKIKFTKENIALSLILILSLILNLANLNIEGYANQYYAAGVKSMTLSLKNFFFISFDPASFVSIDKPPLGFWIQAIFAKIFGFSGWSIILPQAIAGVVSVGLIYVIVKRSFGTAAGLISAICLAVTPVFVAVSRNNTCDNLLVLTLLLACLVLSKAAEKGKLKYLLISLAIIGIGFNIKMLQAYMIIPAIYITYLLSNAVSFKKRIVHLMAGTIILILVSLSWAFIVDLIPEGNRPYVGSSTNNSVMELIIGHNGLERLGIGSKSTQGGGAPGGMDGKNQQKTDGTSSATKNKNSEQTSKENGQTGGETPSIDNDQMQGQPPSMDNGEMQGTPPNTQDGGKGNANPPNGDGKGPGGMPPGDNGMQKPNGGGMGETFGGQEVASITRLFSNNSLSDQIIWLFPLAVFGFIAAAIKEKLNKTSDNKRKLSLVLWSMWLLPEFIYFSFIKGLFHPYYLTMLAPPISALVGIGVVSMWKLYNENGWKSWILPVALIADGLTQILILSYYYNISNTAKILTTIVAVLCIVSSIILAIVNLRKNKKDILKFKNIKFKKSLVTIALMGLLITPLVCSATTIFYPVSGTFPSAGLSLMTNKEKDGFNMGDPNSGNTKLIEFLKSHKTNEKYLLVTSSTNGYASDIIINTGESVMALGGFFGTDKVITLDEFKKLVNNGEIRYVMVGGMGGNSSSDIMNWVKENGKVVSESEWKDSNEINSEGVNKDNNNKENSNSNTKQFGQEGKGNSEQLYDLKNYTDTTTKK

SEQ ID NO: 52642 - protein, 674 aa, Clostridium botulinum
MVQRNLRLYIKLKVLYRGFLYYKNEGGLIMSKGTYYVTTPIYYPSAKLHIGNTYTTVAADTLARFKRLTGYDVMFLTGTDEHGQKIQRLAEAKKVTPKVYVDEIVAGIKELWKMMNIDYDKFIRTTDEYHVELVQKIFKTLYDKGDIYKSEYSGWYCTPCESFWTETQLEDGKCPDCGRSVEKAKEEAYFFKMSKYAPKLIEYIESHPEFIQPESRKNEMLNNFLKPGLQDLCVSRTSFDWGIPVTFDEKHVIYVWIDALANYITALGYSTEKDELYKKYWPADVHLVGKDILRFHTIYWPIMLMALDIPLPKQVFGHGWLLVDGGKMSKSKGNVVDPVVLVNHFGTDPVRYYLLREIPFGADGIFNNEIFIKKINSDLANDLGNLLSRTVAMIEKYFDGEIPAGNCKEDIDEELIKLALETPKKVEENMEKLRIPEALEEIWTFIGRANKYIDETTPWILAKDESKKERLGTVLYNLAESLRIISVCISAFIPETSIKINEQINADVLNWDSLSKFNGTKVGTKVKKGEAIFPRIDVEKKIEELNKLKEEQLKQNKAKNIAPIKEEITIDDFEKIDLRVAKVLECEPIKGAKKLLKLKVSLGGEERQVVSGIAKYYKPEDLIGKKVVLVANLKPVKLRGELSQGMILAASTEDDSELFVASIDGDIEEGNIVR

SEQ ID NO: 52643 - protein, 349 aa, Clostridium botulinum
MMRKSTKKVKVGSIYVGGDSPISIQSMTNTDTRDVKSTLNQINKLEKIGCDIIRCAVPDIEASEALKIITKESKIPVVADIHFDHKLALESIKNGVDALRINPGNIGSMERVKMVAEAAKGKSIPIRVGVNSGSLKKDILDKYGRVCPEALVESALQHVNILEKCNFNDIVISIKSSNVIQMIESYRLISEKVNYPLHLGVTEAGTTFRGTIKSSVGIGTLLAEGIGDTIRVSITGDPLEEIKIGKEILRSLGYVNEGIEFVSCPTCGRTNIDLISIAEEVEKRLLNCNKNIKVAVMGCVVNGPGEAREADIGIAGGKGEGLIFKKGEVIKKVKEKNIIDELIKEIEKM

SEQ ID NO: 52644 - protein, 122 aa, Clostridium botulinum; identical to SEQ ID NO: 52191
  MISC_FEATURE (19)..(19): X=any amino acid
  MISC_FEATURE (106)..(106): X=any amino acid

SEQ ID NO: 52645 - protein, 407 aa, Clostridium botulinum
MNFMFEHSRPAWIEINLDNLIHNMKEIRRVARSKEIISVVKADAYGHGALEIASLLLENGANRLAVAVLSEALELRNSGITAPIIILGYTPLRYDERTICNNAETIIKNDLEVSVSSYKYAEQLSKKAQQLGKDVKIHVNIDTGMGRLGFLPTEENLEKIYQISKLPNIIFEGLFSHFSTADEKNKEYTNEQFKKFLDFYYKLRDKNVKVNIKHIANSAALIDLPYTHLDAVRPGIAQYGYYPSSEVNHKDINLRPIMTLKTNIVLVKDIKSGQSISYGRKFRTIRNSKIAVLPIGYADGYERELSNENNVYKAQVIVNGRRAPIVGRITMDMCMIDVTDIGDVKVGDEVILIGECNDERISVEDIANLLNTIPYEVTSRISKRIPRYYIKDGKIVKISQINKEVNK

SEQ ID NO: 52646 - protein, 356 aa, Clostridium botulinum
MKKRRRRKYMNENKKTPLLNDNMVLSSRIRLARNVDKAPFPNKIDNKNGRDIIYRIENEFYKEVGKDTFKTIYLWNLEKKEINSLLEKHIISFNLINNIDKAAIIIDSSEENSIMINEEDHIRIQSITKGFNLEKAFEKANQIDNMIEKNVNLAFDKDLGYLTSCPTNIGTGLRASVMIHLPALSMNNRISALLNAISQLGMTVRGIYGEGSKALGNIYQISNQITLGLDEVEIMNNLKAVIKQIINEENIAREKFIESYEYEIKDKIYRSLALLKSAILLDNLECLNYISNVKLGIEMSIIKDIDENIINQLIIDTQPANLNRIYDKEMTEKESKHYRAMLVKERLKKQKFKEGD

SEQ ID NO: 52647 - protein, 400 aa, Clostridium botulinum
MSRVSFKKENEVYNMLVKYKLCELGDILTGNTPSKKNGEFYDTKDIMFIKPDDINNNITEIECSKEYISNKAEKKARIIPKDSLLITCIGSIGKIAINKEKSAFNQQINSIVHNEKIICSKYLAYVLMINKQRLESISNAPVVPIINKTQFSEFEVYIHEEKEIQEKIVNVLDKARSLIDKRKAQIEVLDELVKSRFIDMFADLKGEKHLTLGECTNFIDYRGKTPVLSDSGIRIINAKSVGNGFFKYIDEYISEETFNSWMKRGFPVPGDVLFVTEGHTFGNICRIPSDLQKFAMGQRIITIQGNKEILNNAFLAQYMQTISFQIDIDKYKTGSSAQGIRSKELKKILIPIPQIELQNQFTDFVNQVDKLKFEMEKSLKELEDNFNSLMQRAFKGELFN

SEQ ID NO: 52648 - protein, 424 aa, Clostridium botulinum
MFIDTAKIFVKSGKGGDGSISFRREKYIAFGGPDGGDGGKGGNVVLVVDPNMTTLLDFTYKRKYKAEPGGNGAGSKCFGKNGKDLHIKVPMGTIVKDAETDKIMADLSKPEDSYVVAKGGRGGKGNCRFTTPTRQAPDFAEPGMPEEERWIKLELKLLADVGLIGFPNVGKSTLLSVVSKARPKIANYHFTTLKPNLGVVSIEGVNNFVIADIPGIIEGASEGVGLGLDFLRHVERTRVLIHVIDISSVEGRDPYDDFLKINEELKRYSVKLYDRPQIIAANKSDMLFDEEKFEEFKTKVEKHGYNKVFKISAATKQGVDDLMKEAARLLSTILVTDLEISEEDRFIEEEKRFTYSIRKEDNTYIVEGSFVDRLLNAVNVNDPDDLRYFHKVLKNKGVMEELMEMGIEDGDVVRLNDFEFDFLL

SEQ ID NO: 52649 - protein, 310 aa, Clostridium botulinum
MLQNCMYGRESAAMNKSKKNIIIGATILILITLGGFGSYKYIKYKDYKALLNKAEAYMEIENYDKAIENYEKTLDYKNNKDVLDKINLAKEIKESKANYEKAMESYNKKDYVGALELFKKVSKRDNKRFNLAQDKIKECIKIYVNENLDKAKALAKDKKYKEAYSYLDKVLSIDKENIVAKNLKDQYIKEEKELQEEIKKAGEEEKKVEEEQKKQAEEEKKIKEENKNLQGQVTTKKKAEEIVKNKIGTSNNNMKTICEGEEVRQGVSYYLVHVYEVVENHTATIGWYYVRKDNGQVFLWDLASDILKPI

SEQ ID NO: 52650 - protein, 439 aa, Clostridium botulinum
MKDAKEENLQKNLGLFDAIAIVIGMVIGSGIFFKPAIVFKNAGSPMLGILAWLVGGLITIASGLTIAEIAAAIPKTGGIFVYIKELYGEKFAFLIGWVQSIVYIPGSAAALSIILSIQITSFIPLTAIEQKVLAIVFIIFIMILNIISTKLVSKMQGIISIAKLIPIIAIIALGFIKGTAKGDILNISSSSTVSGFGAALLGTLWAYDGWISVGNMAGELKNPKKDLPRSIIIGLGTTIVVYVLINLALINIMPMSAIITSEKPASDAAVVLLGSTGAKIISAGILISIFGALNGYLMTGVRIPLAMSQDRSIPFSKYFSKVHEKSGTPVNAFIFETVLACLYVLSGSFNVLTDLVMFVLWLFFTMAVAGIFVLRTKFKHLDRPYKVPLYPLVPLIGIIGSSYIIISTLITNTFYALCGIGITLLGLPVYSYIKKQNKV

SEQ ID NO: 52651 - protein, 461 aa, Clostridium botulinum
MDRMKRVSVKEQDPNKRITNFDEVCLGYTEEDAIEEAKRCLHCKKPMCVGKCPVSVNIPEFIEHIKEGEFEKAAKAIAKDSALPAVCGRVCPQETQCEGKCVLGIKGEPVAIGKLERFVADWSRKNNVDLSSTEEKKNKKVAVIGSGPAGLTCAGDLAKKGYDVTIFEALHEPGGVLVYGIPEFRLPKDTVVKHEIDNVKKLGVKIETNVIVGRTVTIDDLVEEEDFQAIFIGSGAGLPKFMGIPGENLNGVFSANEFLTRTNLMKAFKEEYDTPIKVGEKVAVVGGGNVAMDAARTAKRLGAEVYIVYRRSESELPARVEEVHHAKEEGIKLNLLTNPVEILGDENGWVKGMKCIKMELGEPDQSGRRRPIEIPGSEFTIELDSVIMSLGTSPNPLIASTTEGLESTKRGCIVAEEETGATTKVGVFAGGDAVTGAATVILAMGAGKKAAKAIDEYLSDK

SEQ ID NO: 52652 - protein, 544 aa, Clostridium botulinum
MVTVGYTALYREWRPRTFKEVVGQKHITVTLKNQVIEKRIAHAYLFCGTRGTGKTSTAKILSKAVNCLNPKDGEPCNECEICNKINSGTLMDVIEMDAASKRKLEDIKEVIENVKYPPQEGKNKVYIMDEVHMLTQEAVNAFLKTLEEPPSNVIFILATTDPQKLPITILSRCQRFDFRRIRNEEIFERLRAIVSEQGIYADDKSLNLIARMSDGAMRDALSILDQVISTGDGKVEYDQVLDMLGLVTNENLLRITNSIIEKDVEKSMRIIEDIVLSGKDIYNFIKDMITHLRNILMVKVSKNPNEILDMSSENIDLVKEQSEKIRIEEIMRNIKILQEAEQQSKWVKQNRIYLELAVLKMCKIEYDTSKEVILSRLNKIEELIKSGNIKLAINEEKKKIEPKEFNLKREKESMQHSKIEKNSLEDYNKDSKLTVETVKKMWHDILEAFKARRLMVLYAALVTANITDCKEGIITLNYNKQYSFNKKRLEKPENNKVVQEIFSEVLKEKIRIIYIVEEKAKEENLPEEILKNTFGENILEIIDE

SEQ ID NO: 52653 - protein, 301 aa, Clostridium botulinum
MDFKQIEAFISVAKYKSFSKAANSVFLSQPAISSHIATLEKELSVQLFDRTSKEVLLTPAGNSFLKYALEILNARDKAVCCLSNFNNTVCGKLTLTASSTPCNTIIPDLVKGFENKFPDVAFNVLEQSSGEVLDNLLNFNSEIGIIGDLISDDKIKTYKLVEDNLVLISNPSLNIPDEIDAGSILKYKFVLRKKSSATRKTFESNLKKSGIDPSTLEVCCEVNNLDTIFQFVKTGVGISVISEKVYNGYLGLNSIKKSKITNLNLKRSLYLAICSKRTLTPTAKAFFDFCLDYFDIHKSNQ

SEQ ID NO: 52654 - protein, 327 aa, Clostridium botulinum
MMSNISVIGTGSYVPNNIITNDFLSTIVDTSDEWIRTRTGILERRISKGENTIYMATESAKEAIKNANIEANDLDLIIVATLTPDNFMPSTACSVQKEIGAMNALCFDISAACSGFIYGLEIACSMLKNSFRNKALIIGAENLSKIVDWEDRNTCVLFGDGAGSAILSKTKEEGILEFHSGSNGLKGEHLTCGVLKANNTPNKNDSLEKNNFIKMNGKEIFRFAVGAMNETIYNIQEKTKWDLNEVKYIISHQANSRIIEYTAKKLNTEKDKFYMNLDKYGNTSAASIPIALDEMNKRGLLNKQDKIILVGFGGGLTFGGVAIVWSI

SEQ ID NO: 52655 - protein, 503 aa, Clostridium botulinum
MGFETPSAIQEKSIPVVLEGADVIAQAQTGTGKTLAFGAPVISALCDKEKKKGVKALVLTPTRELALQIKDELKRLSKYSKTKVLPVYGGESIERQIKDIKSGVDIVVGTPGRILDHINRRTLKLGGIDFLILDEADEMLNMGFIEDIETIMESTSEEKQTMLFSATMPAPIKKLALNYMKKDVEHIAILKKSLTVDKIAQHYFAVKNKDKLEAICRIIDSEEPESAIIFCRTKRGVDELVEAMQSKGYNVEGMHGDMSQNQRINTLKKFKKATLNFLVATDVAARGIDVENISHVINYDIPQDAESYVHRIGRTGRADKEGTAYSLVTPREVSSIRQIERIIKSKITKKELPTLEDILEKKYDNLLNDITSKIEENKYEKFMPMVKTLEQNFDLSQVSAALMEMLFSKEMSFDYTNDKLEAEVPVRLFLSVGRKDSINVKSLLTFIQDEASVKNHEIGDIDILDKFTFMDVSSSTAEKIINKCSGKKLNRRKVNIEIAKSKK

SEQ ID NO: 52656 - protein, 150 aa, Clostridium botulinum
MSGKILDKMAGLLGLEDDLEEDLEEVEEETAEEEVTPLISSNTKRNNKVVSIHTAVSAKVKIIKPCSYEEAVDICDELKNRKIIIVNTTDLETKIAQRLLDFMGGASYALGGSLEEVEKSVYILAPSTVEVTNELKSQLISSKGIFNWNK

SEQ ID NO: 52657 - protein, 242 aa, Clostridium botulinum
MAMRIDVLTLFPEMFSIFNHSIIGRAIEKEILKINTVNIRDYTIDKHKKVDDYPYGGGAGMVMSVQPIVDSIKAVKKENKGKVIFLGPKGKTFNQNLAKELAKEEELIFLCGHYEGIDERAYEYIDMEISLGDFVLTGGEMACIPIVDSICRLVDGVLGSSESYEDESFYNGLLEYPQYTRPAIYEGKSVPEVLLSGHHENIKKWRKAKSLIITDKVRPDLFKKYKLTEEDKKILKDFNKKL

SEQ ID NO: 52658 - protein, 72 aa, Clostridium botulinum
MREGIHPEYNHDVVVKCACGNTFTTGSTNKELKVEICSKCHPFFTGKQKIVDAGGRVDKFMKKFNLSNEDVK

SEQ ID NO: 52659 - protein, 169 aa, Clostridium botulinum
MKYIFVDAYNVINSWKELKKIKDYNLEMSREQLLDILNNYATYNQYRIYVVFDAHQTEGVENTEKINDNLIVVFTKEGETADSFIERSINDLGRKIDVSVVTSDSLEQQLIFQRGATRISSLEFYSQVKETEKNIKDRIKREFSRKGNRLEEILQEDLLEKLEKIRRST

SEQ ID NO: 52660 - protein, 895 aa, Clostridium botulinum
MIIVKLYKKSLAIILLIFLVSIIITSILSKTYIMKKFNNIEIKYNVYKTEHLLKLINKDIQNIYNLNKDYAMWDDTYKFINDKNDNYIQTILKGSSIFKKFNIDLILFVNKNNDVVFEQYYNKNEKLNKKDINYLSSIATSNKKNTHPIKGLTKFDDSLFLITSSPITDSLNSKTPNGAMIFIKFLPKENINKIYGNNTNFQIIDFKNLYPVIYKKNNIFMIEHNDHLLESYGLIRDIFNNNTFMLKLNINRDIYFTAKENIKFFIFVIFILGIFMSILLIKILNELVLKKVHSIEKTLNYVAETADLSVRLDTTGNDEITSLNKNFNNMFDMLETSKEKIIENHKKYNYLFSSVITNFSYNKIIKNKDSDIVDFKVVEINNYFSELLNTDKENIIGENISSFIPSILNENPILIKSIKKISSIGGKETLEEIYIEELRKWFSAVVYSMEVDYFALLLTDITENKKDKEKILGLAYYDSLTGLSNRKKIIETINKTINNYENEKFAVLFIDLDHFKSINDTLGHDVGDYVLEKVSARFKMLLSPKHKIGRLGGDEFIIVQNITSISDAEKLACKICTTLNHSIKYKEDDLFIGASIGISIYPEDGKDTSTLMKNADAAMYAAKKNGGYKYEVYSRSMNERALDDLILENRLRRALEKNELLVYFQPIYHLKTSKIIAMESLVRWKFDNKIISPNQFIPLAKNIGEIANIDNWVLNKACSQCNLWQKQNNKPLYVSVNISFKQMKDKNFVDNVLNILRTTKLKPSYLCLEITEDEAMEDVDLSIKTLEALKRHGIKISLDDFGTGYSSLSYVTKLPIDNIKIDKSIIKNIHKDNKSLQIVKSIILMSKSLDINIIAEGVETIEQLEILQELGCDFIQGFYISEPLPIKTFQSKFIR

SEQ ID NO: 52661 - protein, 477 aa, Clostridium botulinum
MVNRTKEETNTYKNNWIILAIVVMSPFMACLDSSIVNVALPVMAKELYTSMAGIQQVVTSYLIVISAAILIFGRLGDIKGKTSVFKYGFIIFVLGSFLCGISTTLNFLIFSRIVQAIGAAMTMSTSQGIITHTFPPNERGRALGISGTSVALGTLLGPPLGGLIISVVSWEYIFLINVPIGLVAFIAAMKYLPKDKVKSDQSLDIKGAILFIICIVALFWAMLKGQQIGYNHISIIISFIVSAICFIVFIILELKIENPMLDLAIFKNRVFSVNIFSAFVMFIGISCINIIQPFYLQDVLKLSPGKTGLIMMAYPIVLSIVAPISGYLSDKMGSKKLTLAGIVVASIGLFCMAFLNEQSTFLMITLLLSVVALGNGLFQSPNNSLVMSSVEKTKLGIAGGVNALIRNLGFIFGVSISTTILYNRMSYKIGYRVLNYVEGRGDVFIYGMRWVYFIAAVACIFGFLVSLIDKTKLKSNN

SEQ ID NO: 52662 - protein, 476 aa, Clostridium botulinum
MDILLISGVILFLCVISSKVLYKYGVPTLIIFLAMGMIMGSEGLGGIYFDNSQLAGKLCNFGLLFIMFSGGFETNWKTARPVAFASTVLATIGVALTALLVGIFAHYFLGMTFLEGMLLGSIISSTDAASVFSILRSKNLNLKNSLAPMLEMESGSNDPMAYMLTTIFLGLITGNEQNIVMLITTQVLIGVLVGFLVGKVSLWLINNINLDIEGLYSVLAISVALLSYSIASAIMGNGFLAVYITGLVMGNSKLVQKVSLVRYFDGISWLMQILLFFTLGLLVFPSQLLKVALSGTATAAFIIFIARPIAVFLVLTLFKKSTKDKLLVSWVGFRGVASIVFATYPLIAGLSVADEIFNIVFFVALVSVLVQGTLFIPIAKKLDLVGEEETVLKTFNDYEEFAAELLEVNIDKNSKMVGKAIGDMNIPRDILIIMVRRGEKIITPNGATVIKANDTIVFSAEDKNKLLKINERLKLA

SEQ ID NO: 52663 - protein, 136 aa, Clostridium botulinum
MEKLKVLVPVDSSERSNYSLNLLENMFDKNQVEVTLINVKEVQVNNIFLIQQQIKKLKDKSEKIMKEAKQKIKNLGYEYEMYSCFGMPADKIVEKAEKDNFDMIVMAKSNKKGLEKIKGSVTTKVVKTSEVPVIVV

SEQ ID NO: 52664 - protein, 193 aa, Clostridium botulinum
MKYCILMGSPRKNGNTFKLLKPFIEELGLQQVQYDLIWLYDKHIEPCTACRNCQKDWTIFGCRYFDDVQEIFDKVYDSDVIILATPIYSWYCTPPMKSLLDRLVYGMNKYYGDEKGPSLWSGKKLAIITTCGYRPENGADLFEEGIKRYCKHSKLKYIGMLAERDFGYKSVFITDDKIEHSRSFARKLISNKV

SEQ ID NO: 52665 - protein, 112 aa, Clostridium botulinum
  MISC_FEATURE (19)..(19): X=any amino acid
  MISC_FEATURE (106)..(106): X=any amino acid
MLSAFIQSQHSYPAVPLAXQLVHQRLVHPGPLVLRTAPLKFPTPATDRDRTVSRRSEPSSRAALMGEQPNPWDLLQPQDATSRHRGAKPPRRCGLLGEISLLSPRXLLSVER

SEQ ID NO: 52666 - protein, 100 aa, Clostridium botulinum
MLVMNLQLFAHKKGVGSSKNGRDSEAKRLGVKCSDGQFVLAGNILVRQRGTKIHPGLNVGRGGDDTLFAKIDGVVKYERLGRDKKKASVYPVEVEEVVAE

SEQ ID NO: 52667 - protein, 132 aa, Clostridium botulinum
MVMSDPIADLLTRIRNANVVRHEVVEVPSSNIKKAIANIMLTEGYIRDLEEYRDGSVDMLRITMKYGQNKERIITGLKRISKPGLRVYCRKDETPKVLNGLGVAVVSTSKGIVTDREARKLGVGGEVLCYIW

SEQ ID NO: 52668 - protein, 332 aa, Clostridium botulinum
MKKKSLFIGLIIITIVASLVSITIGAASITPFKVIEVILNKFIGNINDSILQKIIWDIRMPRIILAALVGIGLSVTGTSFQGIFKNSMADPYVLGISSGAALGATISIVYKLETKGALVTTLCAFIGAILTIFIVYNIARVGNKIPTTTLLLAGIALNFFMSSLISMSMILHKEAIDRIVYWTMGSLGNASYKQIYFLSPIVVIITFIFYYNYRALNIMAAGEESAYILGIDSEKFKKKMIVLSSIMVAAIVSVSGIIGFVGLIVPHIARLIVGANHREVIPFSMVLGALFLIICDALARGIMPPIELPVGAVTSCFGAPYFMYLLWKKKRG

SEQ ID NO: 52669 - protein, 275 aa, Clostridium botulinum
MLKTRFRSYPVVDQNNKIVGTISRYHLISPKKKKVILVDHNEIGQSVPGLEEAEIMEIIDHHRIGGVNTASPIFFRNQPVGSTSTIIANMFFENNITPSKEIAGLLASAIISDTLLFKSPTSTELDKTILDKLAKIAEIDPKSYSVEMFKAGTSLKGKTVEGLFHEDFKNFTIGGGKIGVSQVSTMDPSSFDPLKKDMLNLMESKVKKEGYEGLILVLTDLLKEGSFIYVIGPKKEIIASAFGKSLDKDSSLYAEGVLSRKKQVIPPITNAIENK

SEQ ID NO: 52670 - protein, 427 aa, Clostridium botulinum
MVTLKRGENYMEDYVIGVDIGSSKVCAAAGKRDKYGQAKIIGVTSAECHGMKNGIIIDIDSTAESITNCITRLESIVDTNIKNFYISLPGRIGTLISSQGMVAISSDDNEITKKDVNRVKRATQIINVPNDKEIVDIIPKEYIVDGYSNIKEPIGMSGNRMELDAYLVLAETTIVNNLLKTVQKAGYNILGVVFAPMADAKAALKEEEMNQGSALVNVGADSMDISIYKDGILAQTDTVSIGGNSITNDISICLKIPFSEAEKLKIKYGVIGENNLDLEGQIKVNIGYNNDITINAETLTKVVEARVEELLVLIQKRLKESGQFQDISNIVIVGGGLSLIKGIEELGKYIFNKNFRVGSPEYVGAANPIYVSSVGVVKSLFTPGKIQNVNLKNKEAAITKEDTSHYKVENEGKGVLLKIKEFLTEFF

SEQ ID NO: 52671 - protein, 445 aa, Clostridium botulinum
MKLIDWLRPGIKVKRWVLLAIMGILLIVFGMLEFVRNRFYSNYYIAFYVFLIGSGVFVLYISVTQGMKAIIALVNKGYLNISLDSKKLENLIYEKRLLVKGPKIVAIGGGTGLSTMLRGLKYYTSNITAIVTVADDGGGSGELREDLGMLPPGDIRNCILSLSDTEPLMEELLQYRFTDGRLKNQSFGNLFLAAMDGISNNFEEAVQKVSSVLAVTGKVVPVTLENIVLKARLKNNMIVEGESNIPEKSLQYNSKIEKVFIEPENAKALSEAVTAIKEADAIILGPGSLYTSVIPNLLIKDITEALKKTKAPKIYISNIMTQPGETDNFTVSDHIKTINKHCHGKMVDYVIVNVGQIDKELEEKYKKKKSKLVKIDEEKIRELNVDVIGGNFLKVKNELIRHNSEKLASILIETIMEKKLLYDKKKIIEYFYLSERLKENKNKQR

SEQ ID NO: 52672 - protein, 477 aa, Clostridium botulinum
GDGVMRDIYNNPLNKRYSSKEMSYLFSEEMKFKTWRKLWVALAESEKELGLNITEEQINELKKYIDDINYEVAEEREKEVRHDVMSHVYAYGVQCPKAKGIIHLGATSCYVGDNTDLIIMKEAMILIKKKIINVINNLKKFALEYKHVPTLGFTHFQPAQLTTVGKRATLWMQDLVLDLEQLEFVIDTLRFRGVKGTTGTQASFMELFDGDESKVKALDKKVAEKMGFPKEFMVTGQTYPRKVDSTILNTLSEIAQSAYKFSNDLRLLQSMKEMEEPFEKNQIGSSAMAYKRNPMRSERMGALARYVIVDALNPAITSSTQWFERTLDDSANKRISIAEAFLALDGVLKLYMNISENMVVYEKVIESHVKTELPFMATENIMMEAVKKGGDRQELHEVIRTHSMEAARRVKQEGLSNDLIERIIEDESFELTKEEILALIDPKKFTGRAEGQVVDFIEEVVNPILEQNKAMIGEKAE

SEQ ID NO: 52673 - protein, 398 aa, Clostridium botulinum
MSRYKQKIIWLLIKILWLKRGEIVNILILANWYPNKNNPINGIFIKDQVRALMEAGLKPIVFFPYDNSIKRGKLLFNIEEGISTYRCNTDYLQSFKKSKINSLLLSYKWLKYIVKKEKINLIHAHVCYTAGILCSIFKRFNNIPYIITEHRSDIVNFSKKSYNRLISKYAYKRAEKVITVSKFLANELKNLGYKFNEEIIGNEVDIKEYSLSNTRNNSDVVKILFIGSMAENEIKGLQYFIPALAKYMKKNNNIEMTFIGNGINRVKYEKMCEDLNIKNKCKFLGTIDKQDIPIYIKRSDFLVLPSIKETFGCVLIEAMACGKPVLATKSGGPNEFVNNNVGILVEPKNEKALEEGIDLIIKRYDTFDPEYIRKYVVDNYSYNIIGQKIRKVYDDILN

SEQ ID NO: 52674 - protein, 1153 aa, Clostridium botulinum
MKFMSLRFIYGRAGSGKSQYCLNSIKNRIEEDIDRPLILLVPEQFSFQAEKNLIEVLDEKTGFKTQVLSFKRMAYRVFNEVGGITAKHMNESGKSMLLYNIIEDNKNNLKVFKKAAKRQGFITTISDIITEFKRYNITPEIILNNLENIEGDNLKYKMEDLALIFSQFETRLHKNYIDNEDDLTILAEKLNKSKQFDNAEIWIDEFSSFSPQEYSVLEKLLLKSYRINITLCTDYLNQGRFVDTTDVFSPIKNTENKLLQIIEDNNIKLDKPIALNCDPCARFKNSAELQHLEKNMFSFPYKEYKNETKDICMLKTLNQFTEIENTAKDIIKLCIDKGCRFKDIAVITGDLEGYENIISSVFLQYNIPFFIDKKREINNNPIIVLILSALEVLSKNWTYESVFRYLKTGLLDINNEEMDILENYVLANGIKGYQWTNDKPWEHKFFSNYELEDQVEKELLAKINDIRYKAMEPIVTLNKNFKSIDKAKEFCEVLYEFLCNINLPDKIQNMIEDFKVEGEIEKASEYNQIWNIVMEVLDQIVEVIGEEKISLKEFFKILQTGLSEYEIGLIPPTLDQVMVGSITRLRSHNINTLYIVGVNDGIFPSPLKEEGILSDDDRKFLGDKGLEIAKDTKSIAFEEQFLVYSTLTTPSKYLRLSYPIADGEGKTLRPSIIISRIKKIFTNICEENDIVKLNGEEEELKNISSAKPTFNYLISNLRKDVEGAKIDNIWGDTYKWYLENEFWIEKLNRLIKGFDYTNQSKYIETKKIRNLYGKPLKISVSRVEKFSQCPFAYFVQYGLKAKDRKIFNLSYPDLGIFMHSILEKFSHELEKQGLEWDTMDLNWAEEEIDKLINEELDNKSLDILNSSKRYEYVTKSVKKILKRSIWLIGEHIKRGNFKPSYYELSFDIDGDYPPIAMELHSGEVVNLIGRVDRVDLLQKDGATYLKIIDYKSGAKEFKLSDVYYGLQLQLLIYLDAILTELAERSGINGEPGALLYLKLDDPIVKNTVDMSDEEIEKSIIKNLKMKGLILNDPNVIRDMDNIISGISDIIPVMVKKDGGVSEGRSSVATKEEFETLRKYVRYTIIEICEEMLEGNIEIKPYKKKDGSSCDYCIYSSVCKFDTNIRGNKYNILIDKKDEEVWDAIKKKLEYKNI

SEQ ID NO: 52675 - protein, 93 aa, Clostridium botulinum
MDNDYAKYNDIAELLKVLAHPVRICIVKGLLEKGECNVSHMQNCLDMPQSTISQHLQKLKSAGIIEGDRNGLQINYHVSNKKAEQLIEILLNE

SEQ ID NO: 52676 - protein, 307 aa, Clostridium botulinum
MVRVKNLIKDMELEVLVEGLENNIIDVSDINRPGLQFSGFYNYFANERVQVVGKTEWSFLDVMKKELRIKRLNKFFEFKTPCTIITRNLAAHDEFINSAKEKGQWVLRTGEISTRFVSSLMSYLDEKLAPETRMHGVLLDVYGIGILITGESGIGKTETALELIKRGHRLVADDAVDIKEINGILKGTSPSITSGMMEVRGMGIIDVAALYGLSSILNEKEIDLMINLEQWKAEKTYDRLGVDREYIDILNIPVRKLTVPIRPGRNLAVIIEAAAANYRYNLVTKNCPADIINERISKEAVSSIEDE

SEQ ID NO: 52677 - protein, 285 aa, Clostridium botulinum
MLKLAYNTNGLRNMPLEEAIKQISNHNYDGVEISLHKQHFHPLDINIEEVKKIKSTLKSSGLVLSDIATGCDDILSDDKFEPSIICKDSIGRKKRIELLIKTAEIAEYLGVDVINFAAGFKSDKVSNSEAYDYLKQGINYLLVKCPNTTFALEPEPGMFIEKTEQAIKLINEINNPRLMLNLDIGHVYCCEENPILSIRRSIPYARHIHIEDIKNGVHYHQIPGTGDIDFNTIFKDLIKYNYKYYISVELYHHADDWNNALDKSIKYLKQIEQYIREFPSIKLVQ

SEQ ID NO: 52678 - protein, 289 aa, Clostridium botulinum
MKSSFKFDFDLSKGGIKIGDLPIKSDSVYHFISVVINIAIICAIMYLSIKIGNKIINRFVKKQSNLKFSLDDKKATTVGTILNSILRYTVYFVGIFAIIEILFGRIGSIFAGLGGAAIGLGAKDLIKDVISGFFILFEDQFSVGDYITVEDKSGIVDTIELRVTKLKDFNGDVHIIPNGLINKVTNHAKNDMRFKIEINVAYEVNIEEAINKINKVCLEYSKEREDIVVEQPAVYGITSLGSNGISIAVYGKTTPMNQWTAEIELRKKILIELKNANIEIPYNKFQIIK

SEQ ID NO: 52679 - protein, 347 aa, Clostridium botulinum
MMKEQQQIIEAYKRKIAIRNTLIVIGCILLLVISLIISMDTGYIKMSPLDVLRTLFGRGTDKEKLILFDFRLPRIIISMLVGSGLALSGCIIQSISRNPLADPGILGINAGASLMVILYVLIFSAESFLSVFTLPFLALIGAGATAVIVYLFSYKRDEGISTMRLVLTGVAVQAGISALTTLLVVKLDDTQYNFVVAWQAGSIWGSNWKFVMTLLPWLAILIPYILTKSSVMDILTLSDDIAYGLGASVEKERRKLLAAAVALAASCVAVSGSISFVGLIAPHLSRRLVGPRHGVLLSTSILIGAVLVSLADTIGRVIIQPSEIPTGIVVAIIGAPYFLYLISNSKS

SEQ ID NO: 52680 - protein, 378 aa, Clostridium botulinum
MRAIVNGKIIIGNEILENKVLLFEKRIVDILDRKNIYLSKDYQIIDAKGLYVSPGFIDVHIHGSGGKDVMDGELESIRVISNTITKRGVTSFLPTTMTMAKEHIYKALDVIKQAMNMDLGGAKVLGAHLEGPFINPKYKGAQKEDFIKNPSFDFIKGYENVIKIITLAPEKDENFEFLKDIKKNTDIVLSIGHSDATYEQAMAAIDNGISRATHTFNAMTPLNHRKPGIIGAIMNTDISCELIADNIHVHKGAVNILTKIKGKDKIILITDSMRAGCMNNGVWELGGQKVIVKNGSARLEDNTLAGSILTLDNAVKNMKNNIEASLCEVISMVTVNPAKDINIYDRKGSIEKGKDADIVIFDKDINISMTIVDGNIVT

SEQ ID NO: 52681 - protein, 275 aa, Clostridium botulinum
METKQFKAESKRLLDLMINSIYTHKEIFLRELISNSSDAIDKIYYKTLTDDSLKFERDNYYIRVVSDKENRILKIADTGIGMTKEELENNLGVIAKSGSLQFKKENEVKEGYDIIGQFGVGFYSAFLVSDDVTVISKAFGSNEAYKWNSKGAEGYTIEPCEKETYGTEIILKIKDNTEEENYDEFLEEYTLKSIIKKYSDFIRYPIKMDLTKTKPKEDNKEEFEEYKEEETINSMVPIWRKNKNELKAEDYENFYAEKHYGFDKPIKYIHASVDG

SEQ ID NO: 52682 - protein, 229 aa, Clostridium botulinum
MLIINALRKGGIMLDISIAIDGPAGAGKSTIAKIIGNKLNIMYINTGSMYRAVTLMALKNNIEPYDIESLKALINSMNISFNGNNIIVNGKDLEEDIRMPIINNNVSKYAAVEEVRELLVSMQQNISKKYNVVMDGRDIGTVVLKDAPYKFFITASAEVRAKRRLKELKEKGININFRDVLKEIKERDYIDSNRKVNPLKQSKDAILIDTSNFTIEEVVDKICTIIKKD

SEQ ID NO: 52683 - protein, 608 aa, Clostridium botulinum
MSLFVRNDIRNVAIIAHVDHGKTTLVDALLRQSHVFRDNEKVEERVMDSNDIEKERGITILSKNTAVNYNGIKINIVDTPGHADFGGEVERVLKMVDSVLLVVDSYEGAMPQTKFVTKKALELNLKPIVVINKIDKPDGRPEEVLDEIFDLFVELGANDEQLDFPVIYCSARDGIAKNEMEDESDNMEALFEAIVKNVKSPEGYIDKPVQMLVTTIDYNEYVGKIGIGKIERGSIKKNQQVALIRKDGKVENVKISSLYVYDGLARIETEEAKLGDIVAVAGIPDINIGETVADVNEPEALPFVEIDEPTLSMNFMVNDSPFAGQDGKFVTSRHLRDRLMKELETNVSLRVEDTDRAECFKVSGRGELHLSVLIETMRREGYEFQVSKPTVIFKEENGKKLEPIEKLTIDVPEEFMGVVMEKLGPRKAEMINMTSAINGYTRLEFKVPARGLIGFRNEFMTDTKGNGIMNHVLEDYEAYRGEIPERSRGSLVVFESGEAITYGLFNAQERGILFLEPGTPVYSGMIAGQCSRTGDIDVNVCKKKHLSNTRSSGADDSLKLVPVTKMSLEQCLEFVASDELVEVTPKNVRLRKKILDSELRRKATIRKK

SEQ ID NO: 52684 - protein, 589 aa, Clostridium botulinum
MRKINLLDLETTNKIAAGEVIERPFSVVKELVENSIDAGAKNITIEIEDGGQKLIKIIDDGEGIYPIDIKNAFLPHATSKINSIEDIYKISTMGFRGEALASISSVSKTKLKSRVDSYNFGKEIYIEGGKIEYLKDTGCNVGTTIEVSDLFYNVPARLKFLKSARSDSSSISDIVNRFILSHPDISFNLINKGKQSIKSYGTGNLKDSIRCVYNKTISENLINFESHKDIISVYGFIGKPEISRKSRTNQSIFVNKRYVKSKFITAAVENAFKSFLTVNSYPFFVIFIDIFPEYIDVNVHPTKSEVKFKDERAMFKTIFDAVHEAIKGELKESFTNFFNKEDINIYDSEKSITEPIKLEKEEVQIPIDLNSNNKIDIFGNNINKLPNNTELLKNIGIKEKNTLENNNDFYTSKQNEIYYANKNDECLNSCNKDNYSKIEKSLQKDNKNPDILYLNEHNRNSSPINIKENKSNNFYVDMKIIGQFNNTYILIEKDKELYIIDQHAAHEKVLFEKFKCEIEKGYVISQILLSPVVIELSEDEFNIYEENKDIFKLIEDMLILNNPYTCPHGRPTMIKFTLKDLEKKFKRIQ

SEQ ID NO: 52685 - protein, 490 aa, Clostridium botulinum
MGVKTMTNKVRTRFAPSPTGYMHVGNLRTALYAYLIAKHDNGDFILRIEDTDQERLVEGALDVIYNTLKITGLSHDEGPDIGGPVGPYVQSERRNIYIEYAEKLIEKGEAYYCFCSKERLDMLRANSEALKRPFRYDKHCIDLSKEEIDKKIAEGVPYVIRQKNPTTGSTSFHDEIYGDISVDNSELDDMILIKSDGLPTYNFANVVDDHLMGITHVVRGSEYLSSSPKYNRLYEAFGWDVPIYVHCPPIMKDEHHKLSKRNGDASFEDLMAKGYLKEAILNYIALLGWNPGGEKEVFSMEELIEAFNYRNINKAPAVFDTKKLKWMNGEYIRALSLDKFHEMALPYYEEALTRDLDTKKISELLHTRVEVLNEIPEQLDFFNNLLEYSPEMYIHKKMKTTYENSLKSLEEVLPKLEALENWTFENIKEVCMNLVKELEVKNGVVLWPIRTAVSGKQFTPGGAFEIADILGKEETLERIKIGIDKLKALQ

SEQ ID NO: 52686 - protein, 236 aa, Clostridium botulinum
MSYNLTDPYEIARYIKEAKKSTPIKAYIEGDLSNCDFTNIEKFNSGDLYILFGESEEILVIIEKNKDKIKNCRIEQDRRKSAIPLLDMLKINARIEPGATIRDKVIIGENAVIMMGAVVNIGAEIGEGTMVDMNAVVGARGKLGKNVHLGAGAVVAGVLEPPSSDPCTIEDNVLIGANAVILEGVKIGKGSVVAAGSIVTTDVPENVVVAGAPAKIIKEVDVKTKDKTKLLDDLRK

SEQ ID NO: 52687 - protein, 190 aa, Clostridium botulinum
MKIICIGDSLTFGYGINRNYCWVTLLKNILEYEVINKGINGDTTTGILTRSHEDIIKNKSTHTIILIGTNDFLLGRSLENVEQNLNLIIKECVENNITPIIGIPMEIEIAMAQKIWTSDLDYLSVNNKLTEYRKYILNISKENNFKYIDFFSAIKEHKSKCKASELFVDGIHPTPLGHKIMFNKAYEIFK

SEQ ID NO: 52688 - protein, 468 aa, Clostridium botulinum
MKKKIGLWDLVFMNVSALFGIRWIAKSTASSFGLGLGAIPAWVLFAFIFFLPSALICAELAATYPRDGGLYEWVKEAYGEKWGFMVSWLNWTAKLFWYSSFLTFLIVNVSYTLGKPELAGNKMFVLICSLVIFWILSLISTKGMAFAKIFTNVGALGSTVPAILLIVMAFVSVLVFGHKPASTYTVATLTPKLNMDTLAAISSVMFGLAGAETAANFVTEIDDAKKTFPKAILISAAIVGGLYVLGSIAITMILPVDKITASEGILAALGTVAANLGIGPWFIRIIALGISLSVFGAIILYIASPIKMLFGSVKKGIFTEKFTKVNEHNIPVQAVILQAVIVSIILLTTTLLPSVDAIYNVLVTMTALTSLFPYVLLFRSYIKLRQDRPNEVRPYEMSKNNRKAIFIANMVLIISVIGIVLSAAPVMPTLAENIVYELEMIGGAILVIGIGLWKWNNFAKKTGFREEK

SEQ ID NO: 52689 - protein, 1005 aa, Clostridium botulinum
MGDKMRPISLKKMITWTMEELKEKESIFGIHKNKFYKNDTGKYIELFGERLASPLGSAAGPNSQLTQNIVASYLTGSRFIELKTIQVIDGEDLPVAKPCIHAQDECYNVEWSTELTVPEAYDEYIKAWFLLHVLMKELNLSEERDFMFNMSVGYDLDGIKSPKVDTYIEGMRNASTTKIWNECRETLLSNIDLFSNFSIEDLDKISPVVCPSITLSTLHGCPPEEIEKIAKYLLEEKNLHTFIKMNPTLLGEKFVRDTFDKMGYDYIVLNPNHFINDLQYKDGVSMLKRLKYVAQKLKLEIGVKLTNTLPVKIENGELPGEEMYMSGRSLFPLTISLANKLASEFDGDLQISYSGGADFFNIEKILKAGIQPITFATTILKPGGYERITQMAQKVEEYLKGAFKGIDIQYLNELANSAVSDKYHLKDLRPVNSRKISLELPIYDCAVAPCTIGCPINQQIPEYVSLVGEKKYDEAFEVIAKDNTSPAITGTICNHNCQYKCTRLDYDESVLIRDMKKVAVLNAEDKYIEDIKESNIRSDKKVAVIGAGPAGLSVALFLRRNGIDVTVMDIKEKPYGVIEYVIPEFRISSEMIKKDFELVKKQGVKFKFGIDENLDLDALKKEYDYVVLAIGAWKPGKLTLKEGGEKAIDAISFLENHKKSKGDINLGKHVCIIGGGDVAMDAARAAKRTNGVEEVSIVYRRTKKYMPASLEEIELVQTEGILFKELLSPMSIKDSKLICEEMKLGKKDASGRRKPVGTGNTVELEADTVILAVGQQVDSDLLKKNKIELDAKEFPKINEARETNITNVYVAGDMKKGPATIVKAMADGKAVSKDILSKEGLSNDFDKKVFPINEKKVYSKKGILRDHNCLENESERCLSCSNICELCVDVCPNRANVVINVDAEFNSSHQIVHLDGMCNECGNCGIFCPYEGNPYKDKLTLFWTKEDFENSTNKGFLVIDKDKGICKVRREDTEIIDYTIGKENDVSKEMDSMIKTFVNEYSYML

SEQ ID NO: 52690 - protein, 361 aa, Clostridium botulinum
MKEKKNNAKDKNEKMKLVRRLIDKGKKSGSLSYKEIMDELEEIDLSPEQIEKIYDVLESMGVEVTGDMNDIDVKEEDIDLSVPEGIAIDDPVRMYLKEIGKVALLTSEEEIELAQRIEAGDMVAKKKLAEANLRLVVSIAKRYVGRGMLFLDLIQEGNLGLIKAVEKFDYRKGYKFSTYATWWIRQAITRAIADQARTIRIPVHMVETINKLIRVSRQLLQELGREPQPEEVAKIMEMPVDKVREIMKIAQEPVSLETPIGEEEDSHLGDFIPDDEAPAPAEAAAFTMLKEQLINVLDTLTPREEKVLRLRFGLDDGRARTLEEVGKEFNVTRERIRQIEAKALRKLRHPSRSKKLKDYLD

SEQ ID NO: 52691 - protein, 288 aa, Clostridium botulinum
MSIKIENLTHVYMEGTPFEKKAIDNINITIENGEFVALIGHTGSGKSTLIQHINGLLKPKSGNIIIDNVNIADKGVKLSSIRKKVGLVFQYPEYQLFEETIEKDIAFGPINLGLNQEEILNRVKRAMNIVGLDYEVYKDKSPFELSGGQKRRVAIAGVVAMEPKILILDEPTAGLDPKARDDIYSKIQALRKEYNMTIILVSHSMEDVAKFADKILVMHKGRCVLQGEPCEVFKEIDALESIGLAAPEVTYLVQKLRKKGFNLPDNIYTIEKAKKELLKSLKSEGIIK

SEQ ID NO: 52692 - protein, 552 aa, Clostridium botulinum
MLKPEILDILKCKKGGLTKEGLIKDFIAGIIVAIIALPLSVALGIASGVSPEKGLITAIIAGFLISFLGGSRVQIGGPTGAFVVIIYGIIEKYGIDGLVIATLMAGIILVIFGLLKFGSLIKYISYPITVGFTAGIAVTLFSTQVKDFLGLAINKVPSEFLPKWSMYISNIGTLSWQTLSLGIFSLLVLIIWPKFSKKVPGALVALILSTLIAYFLKLNVATIGSQFGEISSKIELPKLPGVDIITLQKLIKPAFTIAILAAIESLLSAVVADSMIGEKHNSNMELIAQGIGNIASALFGGIPATGAIARTAANVKNGGRTPIAGMVHAITLLLIMKIFMPLAKYIPLTTLAAILIVVSYNMSGWRIFKAMLKAPKSDVIILLATFFLTVIFDLVIAIEVGIFISMCLFMRRMALAIEVNELDENYCSKRLSLESIHTNKIGNEILIYDINGPLFFAGIDSFLSSIESLDTESKVVILRMKNMPVLDVTAYSELKKIEKLCIEEEIKLIMSEVQAQPMGVMKNMGMVSRLGENRFIKTLEEAIKTANNCCIN

SEQ ID NO: 52693 - protein, 352 aa, Clostridium botulinum
MKILTVVGARPQFIKAAAVSNIIRKEHTEILVHTGQHYDENMSKIFFEELRIPKPDYNLEIGSGNHGEQTGKMLIELEKIYLKEKPDLVLVYGDTNSTLAGALCASKLLIPVAHVEAGLRSFNMNMPEEQNRILTDHISKLLFVPTVTAEKNLHTEGVNNGVHNVGDVMFDAVLHFKKLAEEKESILDKISIKSGEYILTTIHRAENTNDINRLKNIIEALNESGKSIVLPLHPRTKKYIEDYNLQFNDNIKLIEPVGYLDMITLEMNSQKIVTDSGGVQKEAFFMEKPCVTMRDETEWVETVENGWNVIVGTDKEKILNAVVNFKPEKEQQEIFGNGHAAEKILDIINKMK

SEQ ID NO: 52694 - protein, 580 aa, Clostridium botulinum
MNKMSLVTLNINGKDLKVENGTTILDAAKLLNINIPTLCNFHLNDNKTENKPGSCRVCVVEVEGRKNLAPACCTPVGEGMIVKTNSIRAIKARRAIVELLLSDHPKDCLLCEKNTKCELQKLAADMGIREMKYQGDVSMYPIDISSYSIVRDMDKCILCRRCITICNEVQTVGTLSAIGRGFETVVAPAFSEAIKNTNCTFCGQCVSVCPTGALTEVNNTSKVWDALSQKDKIVIVQTAPAIRAALGEEFGLEPGTTVTGKMVAALRQLGFSKVFDTDFAADLTIMEEASEFIHRLEHGGTLPMLTSCCPGWIKFFEHNFNDLMDIPSSCKSPQQMFGAIAKSYLAEKMKVDPKDIIVVSVMPCLAKKYEAKREEMKRNGIPDVDIVISTRELAKMIVEAGIDFNSLQEEEFDNPLGESTGASVIFGTTGGVMEAALRTAYEWVTKGTLKDVEFIEVRGEDGIREATVNIKDTEVKVAIASGLGNARKLLNDIRNGKSKYHMIEIMACPSGCVDGGGQPYIYGDTNILKKRTEALYKEDSNKEIRKSHENPYIKKLYEEYLGKPYGEKAHELLHTKYRVR

SEQ ID NO: 52695 - protein, 609 aa, Clostridium botulinum
MISAAYATAIILISFRLFIFFSMVPIFFPKGTPVIGKVSLALIIAYMLVGSIDIRSINTINNSTALIFNIVNEILAGAILGYITNAAFVCARYAGNMMDLQVGFSMMTMFDPSTNSNVTFLERILYWFSTIVFFLIDGHHMLIRALVESFNVIKLGAFFLNQEGIKHVLNVFIQYFYISIKIAVPIVFIILITDLTLGLVARTVPQLNIMILGLPIKILVGLTAFVFALPLFLKVLNSAFGMLPDAIRGFYKTIPVLIIFASEEKTEEATPRKKMDARKKGQVAKSKELALAFTLLACTLVLVALGEYGANELKETMAGFLNNYLNMELNYNNLNSLAILTVLRVGKIVLPVALPIMCFGIAANYLQTGFLFTKEPLKPDFKKLNPINGFKRMFSLRTVMELLKDLTIITVVGIVGYKFLQDNYLKILNLGTLRPWYMITGLLSLAISIFFRITLIMLFIAVADYVYQKYQYNKDLKMTKQEVKEEYKQDEGDPQIKSKIKQKQREMAMQRMMQEVPKATVVVTNPTHIAVALRYEKGDTAPKVVAKGADYVAIKIKDIAKNNEVPVIENKPLARLIYEKVEIDSEVPQDMYEAVAEILAIVYTLKKKK

SEQ ID NO: 52696 - protein, 79 aa, Clostridium botulinum
MRLDKFLKVSRIIKRRTVAKEACENERVFVNSKIAKPGTEVKEGDILEIQYANKTMKYEIISVLEHVKKEDAENMYKII

SEQ ID NO: 52697 - protein, 145 aa, Clostridium botulinum
MMKSYIAKPHEVERKWYIVDAADKPLGRVASQVASILRGKHKPTYTPHVDTGDNVIVINVEKVVLTGKKLDQKLLRHHSLYPGGLKEIPYREAIAKKPEFVFEEAVRRMLPSGVLGRKMLKKLKVYKGAEHNQEAQKPEVLELRY

SEQ ID NO: 52698 - protein, 881 aa, Clostridium botulinum
MINKRKVNVQSIEQENTKKLFNLSKMNLQEVYKELNTDIKGLTINEVENRIEQYGLNQVEHEKPIPWYVQLFKAFINPFILVLLVLAGVSLITDVILVAPENRSFTTVIVVGVMVTISGLLKFSEELKSNKAAEKLKQLVRTTAAVYRKESDIKEIDMSEIVPGDIVYLAAGDMIPADVRIITSKDLFVSQSSLTGESEPVEKYSILKNRNEDLSVSELDNICLLGTNIISGSATAVVISTGNDTYLGTMASTLTETKNLTSFEKGINSVSMLLIKFMFVMVPIVFFINGITKGNWLEALLFAISIAVGLTPEMLPMIVTTNLAKGAVVMAKRKTVVKKLDAIQNFGAMDVLCTDKTGTLTLDKIVVERYLNIHGEQDQRVLRHAYLNSFYQTGLRNLMDIAILEHGNEKGFKELEKNYLKVDEIPFDFVRRRMSVVLKNNEGKRQLITKGAVEEMLSACTLAEYKGEVVELTEDIKNKVLRMVTRLNNEGMRVIAIAQKNNIADENNFTVKDESNMVLMGYVGFLDPPKDSAKDAIKALNENGVAVKILTGDNDAVTLKICEEVGLKITNVLLGNEVEKMGDDKLAEIVENTNVFAKLSPLQKSRIIKILQNKGHTVGFMGDGINDAAALRQADVGISVDTAVDIAKESADIILLEKNLMVLEEGVIEGRKVFGNIIKYIKMTASSNFGNVFSVLVASMFLPFLPMLPIHLLIQNLFYDISQISIPWDTMDKEYLRKPRKWNASDIGRFMIFIGPVSSIFDIITYLVMWFVFKANTPAMQSLFQSGWFIEGLLSQTLIVHMIRTKKIPFIQSRATAPVLLLTGIIMAAGICLPFTSFGASVGLQPLPFLYFPWLIGILLAYCVLTQFIKRLYIKKFNSWL

SEQ ID NO: 52699 - protein, 236 aa, Clostridium botulinum
MESKYLTIYNEISNKIENNKIQSGEKLSSENEMMKEYNVSRDTIRKALNLLESNGYIQKVKGKGSFVLDINKFDFPVSGLTSFKELSTRMGVESNTLVKELKLIKPDNFLMKQLNLSKNDDVWKVIRVREIDNKKIILDKDFFNKKYVPLLTKDICENSIYEYLENELGLKISFAKKEITVQQATQEDKSYLDFENYNMIVVVKNYIYLDDMSLFQYTESRHRPDRFKFVEFARRK

SEQ ID NO: 52700 - protein, 377 aa, Clostridium botulinum
MLLYIFLTMILVAVCDSTRGIFIPIFKNEFNINNTKIGLMITISTLGYTVFTYLGGILCQKKGQKRVYSIGLLIISISFLLLNFTPNYIILIILMFLINGGQAFLAISSNTIIPIIFISFQAIIMNLAHFNYGMGLALSQRISGMLLYRGITWRRIYLYLSIITFIVYLLLFFINIPVINKSKDDNKLKSKEIFKDKLLYFYIFALGFYVFSEIATGNWFVNLMENGYRYNKNQSSYYIFLFSALFALGRLLGGFLVEKFNYIKAVCTSLAVALMMYTIGITLGQKGLILISLSGIFFSIVYPTVVLTISKVYSTNSSYVTGIVVTLSSFVNMIISFLMGYLNDLIGIYTSYYLIPISLFISLMFMFLIHKNIKKLA

SEQ ID NO: 52701 - protein, 357 aa, Clostridium botulinum
MKAALWYEKKDVRVEEIEEPKVVEGSVKIKVKWCGICGSDLHEYLGGPIFIPVGQPHALSGTTAPVVLGHEFSGEIVELGQGVTKFNIGDRVIVEPIVACGKCPACMEGKYNLCSSLGFHGLCGSGGGLAEYTVFPEEFVHKIPDEMSYEDAALVEPMAVALHSARIANFNTGDTALVLGAGPIGLATIECLKAAGARLIVVLQRKSIRQKYAKRAGADVVLDPNEVNIPEEVKKLTDGLGVDVAFETTGAKIGFDTGIESLKFEGTMVITSIWEKDTSFNPNVLVFTEKKIVGTLAYRHEFPATMALMKDGRIKTDGYITKKIALDDIVEEGFGALTGPEKKKHVKIIVTPDKSLL

SEQ ID NO: 52702 - protein, 156 aa, Clostridium botulinum
MSKKKGSNTLAENRKARHDYFIEETYEAGIELVGTEVKSIRQGKANLKDSYAEIRNGEVFVRNMHISPYEQGNIYNKDPLRDRKLLLHKSEIYKLVGFTTQQGYTLIPLSLYLKHGRVKVSLAVAKGKKNYDKRDAMLEKAAKREMDRQIKERSRY

SEQ ID NO: 52703 - protein, 240 aa, Clostridium botulinum
MKSLIFYLGFALYMLLSLLRIIKLKHLKRKGNKEEIDRYINKSVVGWAKFIVNGIGIKINKKGLENVPDGPCLFVGNHQGLLDVPVIVSSLDRYVGFVAKKEMLKLKILTYWMKEMKCVFMDRQNVRAAVKTINEGVENLKNGYSMLIFPEGTRSRGENLGEFKKGSMKLGIKAGVPIVPIAIDGTYNVLEANGKKIKAADVDLIICPPIYPNELSKEEQNNLSVTIKDVIQKELEKTRN

SEQ ID NO: 52704 - protein, 1172 aa, Clostridium botulinum
MVVNMRLEGLVSPLSLSEDFKSLLNNINLNKFPIGAYGLSDSGKNYFISNIFANVDESLVIFTHSDVEARKIYEDLSLYTTEVYYLPTKEVVFYNIYAISGDLRWERLKVINEILSPKKKIIVTCIESLESAYIPKELYTKYTFKLSVGDIIEIKLLEEKLIKSGYERVDIVENKGEFSARGGIIDIYPPISSEPYRLEFFDDEIDSIRNFNVNSQRSIEKVNNINIFPAKEIILEEENISLGLKNIKTDLDKLVLKLNKKEDKEKIQSIINSNLEQLNESWSFENIDTFLPYFYNKTNSLLDYIEGSLIIIDDVKRCLGKLDSTYLEFNEDYDKFLEKGCILPKQAEIVHDKERMIEQLEFKKIINIENIKKTIDRLKPKSVLTFNQTTLQGYNGKIEFLIEDIKEKKKEKYKILILSGTRSRGERLVNHLRDMGVESSYKDIVREIKPGEVVITFGNQGNGFQYYDIKLSVISDKDIFGQFKKKGKKKQNKKGTGKIKSFTELKPGDFVVHANHGIGVFKGIKQLELQGNKKDYLELIYHSDDKLYVPVEQLDMVQRYIGSEGKKPKVSKLGSSEWTKTKNKVKKSIEEIAEDLVKLYAIRATLKGYKYSDDTVWQKQFEEEFPYEETPDQLLAIEDIKRDMESPKPMDRLLCGDVGYGKTEVAIRAAFKAVMDGKQVAFLVPTTILAQQHYNNFKQRFSDFPITVDVISRFRTLSEQKATIKSIKEGNVDILIGTHRILQKDIKFKDLGLLIIDEEQRFGVKHKEKMKNLKKNVDVLTLSATPIPRTLHMSLVGVRDISVIETPPEERYPVQTYVVEYNDQLIRDSILREISRGGQIYFVYNRVESIHEMASYISKLVPEGRVQIAHGQMKEKELENVVLDFTENKFDILIATTIIETGMDIKNVNTMIIYDADKMGLSQLYQLRGRVGRTNRMAYCYLTYKRDKILTEVAEKRLKAIKDFTELGSGFKIALKDLEIRGAGNMMGSAQHGHMASIGYDLYCRMLEDTIKLVRGDIDKEPVETSVELKIDAYIPNTYIKDETQKIEVYKKIASIDSKEEFMDIEEELEDRFSDIPISVYNLMNISYIRSLGKKVDIEEIKEISNEVVFQFEDKSSLREKIVKIIMDKYSKEVAFKLNEKPAIGYNIKNIKKEQLLPIIRNFLEHIVNNNQ

SEQ ID NO: 52705 - protein, 111 aa, Clostridium botulinum
MKENKIRKNKEFRHVYRRGKSYSNRLLVLYICKNRCNINRLGVSVSKKVGKSVIRNRVKRLIKESYRLNLDENMKKGYDLVFIARNSSNDRDYKDIESALINLLKKAGIYN

SEQ ID NO: 52706 - protein, 294 aa, Clostridium botulinum
MVNFMDRIKKMGEEIELWLKEYLDNKGNYDKNIYEAMAYSLEAGGKRIRPVLFLNTYSLYKEDYKKAMPIAAAIEMIHTYSLIHDDLPAMDNDDLRRGKPTNHKIFGEAIAILAGDALLNEAMNIMFEYSLKNGEKALEACYAIAKAAGVDGMIGGQVVDILSEDKSIPLDELYYMHKKKTGALIKASILAGAILGSDTYTDIELLGEYGDNLGLAFQIKDDILDVEGDTTTLGKKTKSDEDNHKTTFVKVYGIEKCNELCTEMTNKCFDILNKIKKNTDKLKEITMFLLNRNY

SEQ ID NO: 52707 - protein, 421 aa, Clostridium botulinum
MDAGMSKLKITGGNPLFGKVEISGAKNAAVAILPATIMASKGVCTIENTPNIEDVHCIERILNGLGCEIKRQSNSILQIDSTNITKTDANTEDVRKMRASYYLIGALLGRFKKARVELPGGCPIGVRPIDQHIKGFEALGAHVEIEHGAVIVKADKLIGTNIFFDVVSVGATINVMLAATLAEGNTVLENVAKEPHVVDVANFLNSMGANIKGAGTDIIRVTGVKELKGCTYSVIPDQIEAGTYMIATAACGGEVTINNVIPKHLESITAKLIEMGVDVIENGDSVTVKSKGNFKGANIKTQPYPGFPTDVQQPMSTLLTIAKGRSIVNESIWESRFKHVDELKKMGANIKVEGRTAIIDGVPKLTGAIVKATDLRAGAAMVIAGLLAEGDTEILGVEHIDRGYPNIENKFRSLGATIVRL

SEQ ID NO: 52708 - protein, 700 aa, Clostridium botulinum
MIAKSISSGVNNLAKIRVYELAKELNISSKELITLLEEEFSVEVKNHMSAIEDEDANLIKELLSGKEKSEKTKEEDDEIETTAKNPIKESMNNKKSNKRDDKNEKVNTENAEDMGIITMTSDTITVKEISDKLEKSYAEVIKELMLMGVMASVNQEINFEMAEKLAAKFDMEILKEDEDEKEDLEDILKDNEEEEYLQKRSPIITVMGHVDHGKTSLLDAIRKSKVTSTEAGGITQHIGAYTVELNGEAITFLDTPGHAAFTAMRARGAQVTDIVILVVAADDGIMPQTQEAISHCKAANVPLIVAINKIDRPGANIDKVKQELTEYGLVAEDWGGDTICVPVSAHTKEGIDDLLEMILLSSEILELKANPNRKAKGTVVEAKLDKGRGPVATLLIQNGTLRVGDSIVVGSTYGRIRAMFNDKGRNIESAGPSTPVEILGLSEVPEAGDKFYQVKEEKTARGIADKRKEKIRDEYLQSTHKVSLEDLYNQIQEGTVKELGLIVKADVQGSVEALKQSLEKLSTEEVKVRVIHGGVGAINETDVTLATASNGIILGFNVRPDNNAIIASERDGVDIKTYRVIYDAIEDIKSAMLGMLEPEFKEVVIGTAEVRQVYKISSVGTIAGAYIQTGKLARNAGARVIRDGIVIFESELASLKRFKDDAKEVAQGYECGLSIEKFNDIKEGDIIECFIMEEIKKKTL

SEQ ID NO: 52709 - protein, 233 aa, Clostridium botulinum
MSVISMKQLLEAGVHFGHQTRRWNPKMAPYIFTERNGIYIIDLQKTVKKVEEAYNFLRSVAEEGKDVLFVGTKKQAQEAIEEEAKRSEMHFVNNRWLGGMLTNFTTITARINKLEELDKMEEDGTFEVLPKKEVIKLKNEREKLEKNLGGIRKLDANNVGAMFIVDPRKEKNAILEAKRLGIPVVAIVDTNCDPDEVDFVIPGNDDAIRAVRLIAAKMADAVLEGRQGEQLAE

SEQ ID NO: 52710 - protein, 956 aa, Clostridium botulinum
MAKKIVIPKDNNIISFPLEEAMPENYLPYAVEVSKERALPDVRDGLKPVQRRIVYGSYMLKAFPDKPYYKSARIVGDILGKYHPHGDSSVYDAMVILAQDFTTRMPLIDGHGNWGSQDGDSAAAMRYTEARLTPIAMEMIRDIDKDVVNMVDNYSNSEKEPEVLPAKFPNILVNGAFGIAVGLATNIPPHNLEEVIDGTLAYIDKNEITTKELLNYIKGPDLPTGGVIIGKKSMLSAYETGEGRVTLRAKTTIEKLENGRLAIVITEFPFRKNKAKLLQFISEMTADKKHSKALENITDIRDESDRNGIRAVIEFKKIATQDVIEKTLKYLYKKTDLQSNISFNMVALADGKPKTLGLKAMLEYYVEHQKEVITRRTKRELEIAEKRFHIVEGFIKAIGIMDEIIKTIRESKSKKNARENLMEKFSFTDVQAEAILELMLYKLTGLEIVAFEKEYKELEKLINKLKKILNSEKELLKVIKKELIEVKETYNDKRRTSIIEDDEKAKIDIEEIIVEEDVVLTLSNEGFAKRISLKSYNRSSANVEDIEYREGDFNRFLIQCNTKDTLCLVTKEGNMYQIKVINIPEFKWKEKGVRLDEIIKTIDLSETIMEAFSIEDFTAQKDMLFITDSGYIKKTTLDKFNTNYTKIMALKLKKGEFLVKADLVDRTREEKFFNIKTQKGLSFNIEEPSLEPVDRNIIGYKLFDILPNDSIEKVDFCDNYEYKSFYVNISKEGLITISDLKDNKSHISLFTDSSKILVLFDDEGKAYYIPAFMLQSIKEEGINISAFTGDKISLLNAISTFRFEEDISIYFSSEKGLIKRTLLSELKIEGNSTQVYKFKHKEDKLVSILIKEHGEQKNILIITEKAMVIRFKSEAVNPMGKMASGVTGISLKDLDKVILASIIDENDTRKIKIKTKAKDKGTIEINKIKVQNRAGIGNSLMPLLLNDFVEVVELKK

SEQ ID NO: 52711 - protein, 697 aa, Clostridium botulinum
MLNKRCSNILQMIVNNEKPITIKEISKKVNKSPRTVRYDLDKIDDYLTEIEFPKLERKSNLGISLDLKDEEIKKLFKIIGKINNYDYVLSQKERVFYIIYELLNKSEFVTINMLSDRMMVSRSTIINDLIEVKKWLSENKITLESSKGQGIKILGRERDLRRAAVKLFFQSMDSINFFNVTTLKLFNDIDIDFIRNTIKIAEEQMETSFSDDAFNNLVIHIAIAIKRIELSKDIIMDSEELKNLRKTAEYAIASGIAKMLEDRFKISIPEDEIGYITIHILGSNTSTLENIVKDDWIYLHLIVFKLIENVENITGINFSKDNKLFDSLAQHIRPAIYRLKHDIKVKNPLIEEIKEKYSYIFESIEEGVKFIEEDIGDSVNQEEIGYLTLHFMASIERSKNKKHRKPNVLIVCATGIGTSKFISNKLKSIFDINIIDTISSHTMEKILKYNKNIDLIVTTIPLKVKGIKCIEVNTFLTEKNISELGLYFAKFIRNNSEECNGSCKYEERDKVQEILNIVKENCTIHDYYKLRNKLALYLNIKDPTLTEDHKPSLKELLKPDFIKLNEEAENWEDAVRKSGEILMNNGCVKESYIDAMVNTVKNMGPYIVIAPGIAMPHAAPEDGVLKTGISMLTLKDPISFGNSEHDPVSVIISICSIDKVNHMKALKELMSIMDQEDFISKVKNIKASSEIDSILYS

SEQ ID NO: 52712 - protein, 145 aa, Clostridium botulinum
MKIALGSDHAGLPLKNEIIKHLEGKGIEIKDFGTYTEESCDYPDYAQKVAEKVVAKEFDFGILVCGTGIGISIAANKVKGVRAALCSDTFSAHACREHNNANILALGQRVVGVGLALDIVDNFLNAEFQGGRHENRINKMMRIEK

SEQ ID NO: 52713 - protein, 372 aa, Clostridium botulinum
MLQTGKVGVAESNAENYGCTFKKHSLFTTIIIGLVTILILSIIISVSIGQVSIPFSQSYRILIYKLTGLQTGNLDQFMNGMFEEIIWQIRFPRVLLAMIAGIGLTLCGVVMQASVQNPLADPYILGISSGASLGATFSIMIGFGAAGTLSELGVAFWAFIGAFGAGALVMGLASIGGKMSSVKLVLAGTVINALCNAISSFIVYFAKDAEGIRSVTFWTMGSLTSAQWGKLPIITTIVMLAVVLFLSQARIMNTMMMGEETAVTLGINLNFYRRLYMVISVAVTGVIVATCGIIGFVGLIVPHIVRSIVGSDNKRLLPTSILFSAIFLIWADIFARTIIPNGELPIGIITSLLGAPVFMYMLVKRSYGFGGK

SEQ ID NO: 52714 - protein, 425 aa, Clostridium botulinum
MLSTLRNAWKVPDLRKRLIFTLFMIAIFRMGNYIPVPGIDTSKLANLTQNGSLFGFYDLISGGAFSRFSIFAMGVVPYINSSIIMQLLTIALPSLESLSKEGEEGRKKIQQYTRYGAVILAVIQAFSTYAIIARAGALRDGSKLNLFIIIITVTTASTFLMWFGDKITEKGIGNGISLIIFVNIVSRFPSTIYSIVGLQKAETVNFVEVIVFIVIALALFLLVVIMNLGERRIPVQYAGRAVGNKIYKGQSTHIPINVNSSAVIGIIFAISVMQFPITIGQFWPESAFYKFITLNQYSPFRDKSIAYIVLYFLLTVFFTWFYTVVTFKPDEMAENMHKSSGFIPGIRPGEPTAEYIERVITKSSIIGGTFAAIIAVFPIIMAAYSKFQGISFGGTSMLIMVGFALDTIRQIESQLVMRHYQGFLK

SEQ ID NO: 52715 - protein, 215 aa, Clostridium botulinum
MITLKNVKIALTKGRLEKKAIEIFKTININTRELEDKGRKLIFNCENEEYNIELFLVKAKDVETYVEYGAADIGIVGKDTLMETNKEFYEVLDLNVGKCKFALAALPSFKLDQGYNRKKIATKYPNIAREYFRKKGMDVELIKIEGSVELGPIVGLADAIVDIVETGNTLRENGLVVVEDICEISARMIVNKASMKTKKDEIIKIIENVSEVIRQ

SEQ ID NO: 52716 - protein, 229 aa, Clostridium botulinum
MGEVKLIHKIKENIVPLSLMLIIPVVNVFYAILNNSNRGVYTLVTDLDKSMPFIPAFSVPYMVWYPFIIISLIYMCFKNRKLYYKSLSSIIISLITSYIIFFFFQTTVPRPKVIGNDIFSDIVKFIYSTDIAYNCFPSIHVITTYIIMRYMLNHEMKNSKIINITVIILGILIILSTQFIKQHVLLDAIFAIILGEGIYNMINYYGLEMIKKCQQKKSLLLMMKKKSEI

SEQ ID NO: 52717 - protein, 291 aa, Clostridium botulinum
MKNIIENYIKDLQKKNLSKNTLEAYRRDVEKFSEFVRNREERILSVDTVTIMAFVQYLQREGRATSSIVRNIVSVRNFYKYLIKKNMVSEDPTLGYEIPKIERTIPKILSVEEVDKLLNSPNSSKKGLRDKAMLELMYATGVKITELLNLNIYDINLKFNYIKCRGSKKRERIIPIGSYAIKCLKNYLEVRPAINVYNLDYLFLNLKGTQMTRQGFWKIIKFYAKEASIDKEIDSYTLRHSFAVHLLQNGADIKSVQELLGHKDLAATQIYSSISKKSKIAEVYKNAHPRA

SEQ ID NO: 52718 - protein, 110 aa, Clostridium botulinum
MEEIVEMSLLLDFYGSLLTEKQNKIMDLYYNNDYSLKEISELTNTSRQAVHDIVKRCHKALLQYEEKLHMMERFINLENSKEKLLNMLNKVTKENIKEIDHIKKYIIDNI

SEQ ID NO: 52719 - protein, 189 aa, Clostridium botulinum
MVTIVFAHPWHGSFNKAILDTVTTVLEQRNNEYQVIDLNKENFNPIMTEGELALYSKGQHKDPLVTKYQNMLKKTDEIIFIFPLWWYDTPAIFKGFLDKVMLKNFAYTESNTGLKGKLTHIKSAKVITTGQSPRWYLKYFAGNLIQKTFINTTLKGIGIKNAKWLHCGDVSKGAQVKREKFLQRLAIDI

SEQ ID NO: 52720 - protein, 98 aa, Clostridium botulinum
MEEMILNIITHSGEARTYAMEAIQYAKKSEFDKAKKSIEKSNEELGFAHSYQTNLIQEEAAGNKAEISLLLIHAQDHLMTTMTLKDLAIELVEVYMRL

SEQ ID NO: 52721 - protein, 508 aa, Clostridium botulinum
MNKKGKVEFIMEKYIMSLDQGTTSSRCIIFNKKGEIVSVAQKEFTQIYPKAGWVEHDPLEIWGKQAGVAGEALNIARISPEQIAGIGITNQRETTVVWNKRTGMPVYNAIVWQCRRTAGYCDELREKGIDKTIKEKTGLMLDAYFSATKIKWILDNVEGARELAEKGDLLFGNIDTWLIWNMTKGKIHVTDYTNASRTMLFNIHELKWDEELLEILDIPKSMLPEVKPSSCVYGETDEILFGVSIPIAGDAGDQQAALFGQTCFNAGMAKNTYGTGCFLLMNTGEKAVDSKNGLLTTIAVGIDGKVEYALEGSIFIGGAVIQWLRDELRMVKTAQETEKYATEVEDNNGVYLVPAFVGIGAPYWDSYARGTILGLTRGAKKEHIIRAALESMAYQTHDVLKAMEEDSGIELKALKVDGGACQNNFLMQFQSDILGVEVDRPEVVETTALGAAYLAGLAVGYWKDRNEISQNWAISRSFAPAMEDEKKEKLIKGWHKAVTKAMDWEERE

SEQ ID NO: 52722 - protein, 369 aa, Clostridium botulinum
MLDFDVDVQQFAQIKVIGCGGGGNNAVNRMIIDGLKNVEFIAINTDKQALMLSQASQKIQIGDKLTKGLGAGANPEIGKKAAEESKEEISQAIKGADMVFITAGMGGGTGTGAAPVIAEIAKSMGILTVGVVTKPFPFEGRKRLLHAEMGINTLKERVDTLVTIPNERLLSIVDKKTSLMDSFKLADDVLRQGVQGISDLITIPGLVNLDFADVRTIMVDKGLAHMGVGKGTGDNRSQEAAKQAISSPLLETSIVGATGVLLNITGGNDLGLLEINEAAEIVQEAADPDANIIFGAVIDENLKDELRITVIATGFESDRLEKDNIEKEENNIPKEASKSEDREEQSSTYEQHIDENDLEIPAFLRRQRK

SEQ ID NO: 52723 - protein, 324 aa, Clostridium botulinum
MLNTDIAMGLARVTEAAALSASKFMGRGDKNAADQAAVDGMHKAFQIMPIRGKVVIGEGELDEAPMLYIGEEVGIGAEDMVEMDIAVDPVDGTKLIAKGLENAIAVVAMGPKGSLFHAPDMYMKKIAVGAGAKGAIDINKSPKENILNVARALNKDVTELTVIVQERDRHDYIVKDAREVGARVKLFGEGDVAAVLACGFEDTGVDIMMGTGGAPEGVIAAAAIKCMGGEMQAQLCPTSQEEIERCKTMGIKDHEAILYIDDLVKSDDVYFAATAITDCDLLKGVVYNRNEKAITNSIVMRSKTGTIRFVKACHNLAKSAIVVE

SEQ ID NO: 52724 - protein, 207 aa, Clostridium botulinum
MKNKKVKKPFYKKWWFWILILIVGIGIGAGAGTIIDEPQKVGQTNAKVQDKSTETNAKVQDKSAEANTEANKSTNKSKIFKIGDVVKLKDFKVTVNKVYKAKGDEFTQPQPGNEFIAVDCSVENISNEQQVVSSVMMFKVVDKDGRECEESIGGSTSANAGQMDGEVGPGRKITGVYVVEVPKGTNGLELEFNGSLLLGEQVIVKLN

SEQ ID NO: 52725 - protein, 471 aa, Clostridium botulinum
MKGYLIFIIIYAIILILAGFFVKKYVKGAADFFVAGRKLNSKLLCTTLIAANIGAGSTVGITGIAYKYGVSSYWWIFMSAIGTAVLAFLVGPKIWEKSMKYNLYTLGDYLDIRYSKYFKGAISIMMTIGTLALFAGQLMGIAWILDVTSGIDKNIGILIGAVVVVLYFSSGGLLSSAIVNVLELVIIILGFIIAVPFCIKSVNGFSGLHTAILNNLPANEGVNYFSLKGIGISTIVGWFLMLTPSFFISPGLIGKVYGAKDMKTIKKGAGICAVVQGLFAFLPTILGMCAFAVFPNLNQQELALPMVMKNLMPFSVSALALAAIFAAEVSTADAVLYMLTTTFTEDIYKTFINPKIEDKKLLKAGRIVTIVGGILGVAMAFILPNIITALSIFYTLMSVSLTVPLLFGLFSEKPNTKIAFTSSIIGIIVTLYLQFQNNDKGIWILNAQSTGILCSLIVMMIFLALKKKITT

SEQ ID NO: 52726 - protein, 511 aa, Clostridium botulinum
MKNTPIEILGVTSEEKISKYNIQYPYKEFCKSYIISLTKNKPKIGQILKVFLKPKINEWKYIFTQGQFKIFIEGSIKIRILFLENQSDQNIYSTEINKIISGFLPVESDCMDNLKPTLFIEEAFIDALNENKFSVSLLIAMGTISEEKCKNKEVIDKEENFEQDGDFKEEVQYENIEDSDLKEKAQYKDIEDGDLKEEAQYKDIEDGDLKEEAQYKDIEDGDFEEEIQYRDIQDASFKEEVQYENIEDTDLKEEVQYENIEDGDLKEEIQYENIEDTDLKEEVQYENIEDTDLKEEVQYENIEDGDLKEEVQYENIEDGDLKEEVQYENIEDTDLKEEVQYENIEDTDFKEEVQYENIEDGDLKEEVQYENIEDGDLKEEVQYEIVKDVDFKEEVQYGDIKDADLKEEVQYENIKDVDFKEEVQYGDTKDRDFKEKGQYENTERVENKNIEERDFSKDIYKINLQEINLEENDFNEIDMEKLKKNSINIDVEYDMNSKENDFYEIDMEKLK

SEQ ID NO: 52727 - protein, 423 aa, Clostridium botulinum
MINMESLNWVDYLFIFSLVSIWMLLFVNIILSLAGYRYYLKTLNSELKGLENEKYPKVSILVPAHNEEKVIGRTVKSILLLNYPKDKMELIVINDNSSDNTKEILKQIQKEYRSYNFKIINTDNITGGRGKSNALNIGYKHSSGDFIAVYDADNTPDKNALKYLMKTIIEDEGLGAVIGKFRTRNKDRNMLTRFINIETLSFQWMCQAGRWKLLNLCTIPGTNFVVRKNIIQELNGWDPKAIAEDTEISFRIYELGYKIKFVPYSVTWEQEPENLKVWFKQRTRWAKGNIYVLLKYFKNMFKGTSKDIIFDIFYFFSVYFLFLSSVIISDILFIVGIFLNINLHVTGNFNVLWILAYVLFVLEVSLTLTLEKGESNKENLILVPIMYFTYCQMWMIVALRGIIQYILDKLFKKEIKWYKTERF

SEQ ID NO: 52728 - protein, 358 aa, Clostridium botulinum
MVLKEDDKLKQLKELLEKTINFGASDLHLSVGVEPTIRINGQLSKIFKEKLTPEDTNNYAKEILGEEFEDLLKKGEIDTSYSISGLGRFRVSVFKQRGSIAISLRVVSLKIPNLNELKLPDIVKELTNKKRGLILVTGPTGSGKSTTLAAMINEINNTRSNHIITLEDPIEFLHKHNKCIINQREIGRDTFSYKSALKAALREDPDVILIGELRDLEDISIALTAAETGHLVFSTLHTIGGAKTIDRIVNVFPPHQQEQIRIQVASVLEGIISQQLVHKIDGGRIAALETMVTTNAIRNMIREGKTYQIESSIQTGSKYGMKTMDMSLAELYKREIISYDTALNYSVDKDLITKIINL

SEQ ID NO: 52729 - protein, 569 aa, Clostridium botulinum
MRVDKEKDKAKDRVKDKEKDKIKIIPLGGLNEIGKNLTAIEYKNDIVVIDCGLKFPDDDMLGIDVVIPDITYLKKNINKVKGIFLTHGHEDHIGALPYVLRAVNVPVYGTKLTLGIVETKLKEHGLLSSVELKCIKPREIIRLQNVSVEFIRTSHSIADTVAIAIHTPLGVVLHTGDFKIDYTPIDGHVTDLARFAEIGKRGVIAMMADSTNVERPGYTMSESTVGEAFLNIFSGVKGRIIVATFASHIHRIQQIIRAAEKFKRKVAVSGRSMENIMEVAMKLGYIKAEKNIFISIDAINKYPDDQVVIITTGSQGEPMSALSRMAASEHKKVNIKPGDKVIISATPIPGNEKLVSRVINQLFKKGADVIYETLADIHVSGHACQEELKLMHTLVRPKYFIPVHGEYRHLKQHGELACQLGLPENHVMVSDIGDVIEVSRECIRKNGSVVSGQVFVDGLGVGDVGNIVLRDRKHLSQDGILTVVVTIEKVSGSVIAGPDIISRGFVYVRESEDLMEEAKDLVKKALEECERNHITEWAAIKTNIKDVLRGFLYEKTKRKPMILPIIMEI

SEQ ID NO: 52730 - protein, 185 aa, Clostridium botulinum
MKGSKYMSNIALLVVDVQNALINVHPHNEQRVIENIKKLILTARDNKKEVVYVRHDDGKGTELENGTYGWQIYDKISPNSNKLIFEKQYNSAFHKTDLKEYLDIKNIDTIILVGLQTEYCIDATCKSAFDYGYKIIIPEETNTTFANDYLSGEKLYEFYNYKIWNKRFADVISVEEVIKILENDF

SEQ ID NO: 52731 - protein, 206 aa, Clostridium botulinum
MPKVDLFNQNGEKVGDLQLADSVFGVEVNTYAMHQVVKALLANKRQGTQSAKTRAEVSGGGIKPWRQKGTGRARQGSIRAPQWIHGGVVFAPKPRDYRMSIPKSMKKVAIKSALTSKVNENLMVVVDEIKLETPKTKEVVKMLNSFNAKKTLIITNNAEENVYKSARNIEGVQIIPVNNINVYDVLKYDKVVITKDAVSKIEEVYA

SEQ ID NO: 52732 - protein, 533 aa, Clostridium botulinum
MSTKYIFVTGGVVSSLGKGITAASLGRLLKNRGLKVSIQKFDPYINIDPGTMSPYQHGEVFVTEDGAETDLDLGHYERFIDENLSQNNNVTTGKIYWSVISKERKGDYLGATVQVIPHITTEIKSRVYRVAKEKEVDVVITEIGGTIGDIESLPFLESIRQIKYEVGRENVCFIHVTLLPFLGKAGELKTKPTQHSVKELRGIGIQPDIIVCRSEKQIPEELKGKIGLFCNVDKEDVIQNLDAENLYEVPLMLHKENLDTLVCKKLGLNYSKIDNTEWISMVNNAKNLSKNTTIALVGKYVELHDAYISIVEALNHGGYANDTKVNIKWINSEEVNENNFEQYLKDVDGILVPGGFGDRGIEGKIWAAKWARENKIPFLGICLGMQCAVIEFARNVLNYKGAHSAEIDPNTKYPVIDLMPEQKDIDNMGGTMRLGAYPCKLLKGTNSEKAYGQEIVYERHRHRYEFNNEYRSKLTEAGLILSGTSPDDRLVEIVEINNHPWYVAVQFHPELKSRPNKPHPLFKDFVKATLDKK

SEQ ID NO: 52733 - protein, 584 aa, Clostridium botulinum
  MISC_FEATURE (275)..(275): X=any amino acid
KNMKKNIEELQDIAKVIRKDIVSMLTESASGHPGGSLSAVEILTALYFNEMNIDPTNTRDLNRDRFVLSKGHAAPVLYSTLARRGFFNPEELKTLRKIGSILQGHPNMNDVPGIDMSTGSLGQGISTAVGMAVAGKLDEKDYRVYTLLGDGELEEGQVWEAAMAAAHYKLDNLTAFVDYNGLQIDGPCSEVMSAEPIADKFRAFNWNVIEIDGHDFNSILNAIESSKNIKERPTMIVCKTIKGKGVSFMENEAGWHGKAPSAEECEKAICEIRRXQIMGVKIATREAYGKTLAKLAEENSKIVVLDADLSKSTKTADFKKVCPERFINVGIAEGNMMGIAAGLSTCGKIPFASTFAMFATGRAFEQIRNSICYPNLNVKVCATHAGVTVGEDGASHQSVEDISLMRSIPNMTVICPSDAVETEAAIRAVAEYNGPCYVRLGRSGVPVINDNKEYKFEIGKGIKLREGKEATIIATGIMIDAALEAYNMLAVEGIKVNVINIHTIKPIDKDIIIDAARKTGVVITAEEHSIIGGLGSAVCEVLSENHPVPVLRVGIKDTFGESGKPAELLKKYELTSEDIVKAVK

SEQ ID NO: 52734 - protein, 793 aa, Clostridium botulinum
MKVPVKWLNDYIDIDISPKELGDRLTLSGSKVEEVVTTGDEIQNVVTGKIVEIRKHLDADKLSICQVDIGKEENIQIVTAATNMKEMDIIPVALHGSTLHGGLKIKKGKLRGEVSNGMFCSEEELGLAGDEPVYGLMILDQDTPIGEDIKKVLKMESSIIEFEITSNRPDCLSVIGIARETAATLNKKYTIPVVEFSPKCSESIEDSLKVEVKDALCRRYMARGIKNVKVEQSPGWMQERLLEAGVRPINNIVDITNFVMLELGQPMHAFDRKEIKTNTIVVERAKEGEKFTTLDETERELDVDILNIKDGDRTVAIAGIMGGLNSEVKEDTKEIILECANFDGTNIRISSKKLGLRTEASSRFEKDLDPNLVELAMDRACKLIQELGAGEVMEGSVDVYENKLEPHMLEVDSNWINKFLGTNISKEEMQEFLDRLDLNTEIKGEILEIHVPTFRCDLNIKEDIAEEIARIYGYNNIPITTIKSVTMQAGKNEKQHLDDKVIETLMASGLNQSISYSFVSPKVFEKINLKEDSNLRKVVKIKNPLGEDFSIMRTTTIPSMVEALSRNYSRNNDYASLFEIGKIYIPKEDPTELPDEKNILTLGLYGDVDYFNLKGIVENILDGLGIDNYKLKRQEENPTFHPGRTAELYIKKDYVGILGEIHPDVQDNYDIEERCYVAELNLDVLYKHSNVKKEYSQLPKFPAVTRDIAVIVDDTVLVQEIENIIKNGGGNILESIHLFDVYKGKQIPEGKKSIAYSIVYRNAQRTLKDSEVNKVHDKIVRTLEHKLGAQLRD

SEQ ID NO: 52735 - protein, 485 aa, Clostridium botulinum
MNYYMINIIGLGPGSKESITLGTIDSLKTVDKVFLRTEKHPTVEYINKLGITYETFDGEYEVGESFDDVYNSIAKSLIEASKNYSDIIYAVPGHPLVAEKSVDILIKLCRQNDIKFKILPAVSFVDALMESLLLDPVEGLKIIDAFDIKKQAMDKRIGTIITQVYDKFIASEVKLNLMNYYKDDTEIFFVRAAGIEGLEEIRKIPLYELDRQHNIDHLTSVYIPKVPNNNYDFMDLLDIMDKLRGEDGCPWDREQTHVSLKKYLIEESYEVIEAIDNKDVDMLIEELGDVLLQVVFHSQIGKEDGFFEIKDVIQSICDKMINRHPHVFGDLEINNSIEVLENWDKIKSKEQGTETYTDSIRHIAKTLPALMRADKVQKKASKVGFDWDNIEDAMKKIIEEYKEIEDVYKSKNKVKILEEIGDLLFSVVNVARFLDIDPENALNYSIDKFINRFQYIEDEAISMGRQLDNMSLEEMDKLWKEAKNK

SEQ ID NO: 52736 - protein, 228 aa, Clostridium botulinum
MDNNFKIKDLPKNERPQERLIRYGAEVLSNSELLAVILRTGTKNQNIMMLASSLIKETGGLDQLFNQSIEELTKIKGIGVTKAVQILALSELSKRFKTYKSGNEYKISTPLDVSNLVMEDMKYLKQEKLKILILNTKNIVTYIRDVFIGTLNSSIVHPREIFCEAIKKNGASIIICHNHPSGDPTPSKEDINITLRLKECGKLIGIDLLDHIIIGENKYVSMKEKGTI

SEQ ID NO: 52737 - protein, 1196 aa, Clostridium botulinum
MYYMFLKSIEIRGFKSFADKTELVFKQGVTAIVGPNGSGKSNISDAVRWVLGEQSVKSLRGSKMEDVIFAGTQYRKPVGLCQVSLILDNSDKDLSIEYAEVTITRRLYRSGESEYYINNTQCRLKDIQELFMDTGIGKEGYSIIGQGKIEAVLSGKPEERRSLLEEAAGIVKFKWRKEEADKKLSNTEQNLIRIKDILNTYEERMEPLKEESEKAKKFLNLSEELKRKEVNVMIYSIDKIEKDLKNISSNMLSLGENIDNLKNEKSQYKEIISKFNEKLELLDKNNSRNKEEYYYNKDKNKDIENENALLKEKIKNLKDNIKVKENTLKTNEERLQKYLKEKEALEKKINKLKEEESYLREEIGKKEDNVNNFNKELKEKEEKLKILKSEEIEILSNTSNLRNEISVMENEIVNLENKLDNIKNSCDSYISSININIKTKEDIEKEIKNIKENILLLENNLKENSRNISSLKISLNNKEKKLKEKNAAYSRLEANYHMLSNLEKHYEGYNRSVKTLMEHVSYGKVDNIKGGCEVLGDIIKVKKELETAMEIALGGAISNVITEDENKAKILINYLKKKSLGRATFLPLTTIQGRKAKINNVTREDGFLGIASDLIDYDVKFSNIIDYVLGRTLVAKDMDSALKIAKKLNYSFKIVTLEGEVINPGGSLTGGSIKHRAGSSIISRKREIEETKKELEETKNTIEEFMGNILENKNKIKTLDEENLNIKDEIYYNNIEITKFMGKLNAIKEDTERLRSSLNISREEIKLTKDKIKDIEENINESQKQLEELKLKKDLNHNDIKECEDFLQNEEENVKNIKDKLIEYKIEKAKLDEMLVSIKKELYSMDTNITNLNNENKNINKGNQEDRSNIEKFETNIKENENNIKDIKIYLENLEEKFKKYEVERIKLKEELEKNKNKEENLILILSKKEEEVHRQDIQKTRYITERDNLYNKLNEEFSLTYAESLSYKEDDINVMKYKEHAQNLKIEISNLGTVNVGSIEEYKELNEKITFMNNQKEDLVKSKEELLNVIEEMTNKMRTVFSENFNKLRKNFNETFIELFKGGSADLILSNGDELTANIEINVQPPGKKLQNINLMSGGEKGLSAIALLFAILKMKPTPFCILDEIEAALDDANVTRYAGFLKEFSESSQFIVITHRKGTMEACDALYGITMEEKGVSKIISVDLTSKDQVAATL

SEQ ID NO: 52738 - protein, 284 aa, Clostridium botulinum
MLNIEEGKLYVVPTPIGNLRDITIRALDVLEDVDIIAAEDTRQTLKLLNHFNIKKTLISYHKFNEEDKSINIINNLKEGKKIALVSDAGMPGISDPGYVLIKKCIEEQIIFEVLPGATAFTTALVYSGMDTTKFIFKGFIPRENKNRQKLIQDIKDRMETLIFYESPHRLKECLKFLRDSLGNRNISICRELTKLHEEIIRDSLEEVIKYYENKQPKGEYVLVLQGKSIEEIEKEKEMEWSSINIQDHIKKYINEGYSKKESIKLVAKDRKITKSEVYKYSIDI

SEQ ID NO: 52739 - protein, 486 aa, Clostridium botulinum
MFKNLYVENNLYKNFIGGQWVNSKTNNFIEISSPIDGSLVGKVPSMSKEEVDLAIKNAKKAQSHWNEIPINEKATILLKAANILDEKAEEIADIMTKEIAKDKKSSISEVRRTADYIRFSADTAKNMVGETLPGDSFPGNSKGKISIVNRVPLGVVLAISPFNYPVNLSGSKIAPALMAGNSVVLKPATQGSISALHLVKVFEEAGLPSGVLNTITGKGSEIGDYIVSHPMIDFINFTGSTEVGKRISHISVMKPMLMELGGKDAAIVLEDADLDLAAKNIVSGAYSYSGQRCTAVKRILVLEEIADTLVEKVKERVESLKIGNPLKEQVDIVPLIDDKAADYVEALMEEANNKGATLLVGGKREGNLIYPTLFDNVTLDMRLAWEEPFAPILPIIRVKDVDEAIRIANESEYGLQASIFTKEINKAFYVAEKLEVGTVQINNKPERGPDHFPFSGIKASGLGTQGIKYSIEAMSRPKAIVLNINL

SEQ ID NO: 52740 - protein, 49 aa, Clostridium botulinum
MRVKVTLACTECKRRNYNTMKNKKNDPDRLEMNKYCPHCHKHAAHKETK

SEQ ID NO: 52741 - protein, 144 aa, Clostridium botulinum
MEKFLDINEIKKIIPHRYPFLLVDKITELEEGKSAVGYKNVTANEYFFNGHFPEEPVMPGVLIIEALAQVGAVAILSKEEFKGKIAYFGGINKAKFRKKVVPGDVLKLSIDLTKIKGVAGVGKAVATVDGKVAAEAELLFVIGK

SEQ ID NO: 52742 - protein, 211 aa, Clostridium botulinum
TTLMKQIILPSLWQTIYMIIISTILSFVIGFILAIVLAVTDERGIKPNKIIYGILSTIINVLRSVPFIILAVAIIPFTRSIVGTSIGENAAIVPLTIASAPFIARLIESSLKEVNPSLIEAAKSFGASNIQIIFKVMVKEAIPSINLDLTLATITILGLTAMAGAVGAGGLGAVGLTYGYQSFNDTIMYTTLILLVIIVGIIQFVGNIIYK

SEQ ID NO: 52743 - protein, 485 aa, Clostridium botulinum
MITGELKSKIDRIWETFWTGGITNPLEVIEQFTYFLFIKDLDDNEILAESDAELLGIPFEGMFPSDKQYLRWSKFKNEPAGEMYRIVSEEVFPFIKDIHGDEQSAYSKYMSDAMFKIPTPLMLSKIVDSIDNINMNDKDTKGDLYEYLLSKIAQAGTNGQFRTPRHIIKMMAELMKPTPEDIIVDPAMGTAGFLVGAEEYLRENHNDLFFVQGLKEHFNNKMFNGFDMDRTMLRIGAMNMMLHGVDNPNIEYKDSLSETNKDSEKYTLVLANPPFKGSLDYEAVSADLLKVSKTKKTELLFLALFLRILKTGGRCASIVPDGVLFGSTKGHKDIRREIVDNNKLEAIISMPSGVFKPYAGVSTAIMIFTKTGTGGTDKVWFYDMKADGYSLDDKRNPIEDNDMPDIIERFSNLDKEEDRNRTEQSFFVPVEEIRENDYDLSINKYKEIEYEEVVYDEPKVILERVKKLEKEITEGIDELEKMIEG

SEQ ID NO: 52744 - protein, 232 aa, Clostridium botulinum
MKNTININQKLGEVVSIFPGSSRIFNDVKIDYCCGGHDTLGEALKEKGINSDEFIEKLNEEYEKFVESNEEYIDWRKEKPVNLMENIVDTHHDYTKRELKEIDALLSKILKVHFGHHGEELLKVHRLFGLLKIELEEHLIKEEENLFPLIKEYEVTKDENVKREIDKFIKETEDEHDKAGDILKELEKITRDFKAPEDACTSYRLTYDKIHSLEKDLFIHIYKENSVLFEMI

SEQ ID NO: 52745 - protein, 264 aa, Clostridium botulinum
MIKFIATDLDGTLVNSEGKIYNKVFNLINDLHKNGVKFAAASGRFYSQLNENFNSVKEDMILIAHNGALIKYSKNGQTLYANYIDKEYIKSVEKLKRNFGEELILAGENEAFVVNPSQSIKEEFNFYNVPYIEYKSFDEVDKPVQKISYYVKDGIKASMIDYLKENLNKNLQFVASGDKWIDMMNKEVSKGHAIKILQKKFNIEKDNTMVFGDYYNDITMFKQAYYSYAMENAPEDVKEKANFIAGNNNENAVYKTISKHMGFI

SEQ ID NO: 52746 - protein, 102 aa, Clostridium botulinum
MFTEKFLEVLKHELVKIDGFIHSEGFSSLVNERKILSLSVWEDDDAVSKWRNIVEHRMAQQQGRDSIFESYTITVVSSLRSYTDKERAEAPNYSNIFSQQAR

SEQ ID NO: 52747 - protein, 234 aa, Clostridium botulinum
MSIYMAEFLGTMMLIWLGDGVVASVALNKSKGKDGGWIVVTAAWGLAVAIPAYIFGGISGAHMNPAVTIGNAIAGNFPWANVAGYITAQMLGGFAGAVLVWLTYLPHWKATEDKATKLGVFCTAPAIRDTKANFVTEFIVTALLVFGLMGLGQVKMVDGFGPLTAGALIFVLGLSLGGPTGYAINPARDLAPRIAHAILPIAGKGDSDWKYAWIPVLGPILGGILGALLFMLVF

SEQ ID NO: 52748 - protein, 112 aa, Clostridium botulinum
MNRVMLIGRLTKDAELKQIEDRDVSLLRFVIAVNRYYNKENSKTDYIPIVVWGRHAEAIHKYMKKGKLISVVGRIQARNYEDKNGNKKYGIEIVSNEIKFLDPKKIDKVVSN

SEQ ID NO: 52749 - protein, 285 aa, Clostridium botulinum
MNKILEVKNLKKEYKDFSVENISFQLDRGYIMGFIGPNGAGKSTTIKLIMNLIKKDAGDIKIFGMDNVRYEKEVKEKVGFVYDENYFYDHVNIETMKKIIAPFYKEWSDETFSKYLRTFDLDPKKKIKNLSKGMKMKFSLALALSHNAELIIMDEPTAGLDPVFRREILDILYDLIQDENKSVFFSTHITTDLEKIADYITFINKGKLVFSENKDEIMGKYNLVKGGLDFLNEETKKYFVGINKNSFGFEGLTTSANIIREITQKGEIIIEKPSLEDIMVYTVRG

SEQ ID NO: 52750 - protein, 261 aa, Clostridium botulinum
MNFKEKTVIITGGAQSLGEYIAYSFAEKGANIVIADINYEQANKVSQNIINKYKVRSIAVKVDVCKEEEVKNLIKNTIDNFSKIDILICNAGVVYSTKVTELPKEKWDNILNVNLTGYFLCAKEAAKEMVKRKQGVIIDINSKSGKKGSLHNCAYSASKFGAIGLTQSLALDLAEDGIRVNAVCSGNLLDSPMWKNGLYEQYAKKLNIPKEKVRQAYIDKVPLKRGCTYEDVSNLVLFLSSKEASYMTGQAVNVTGGQEMR

SEQ ID NO: 52751 - protein, 238 aa, Clostridium botulinum
MNEPKYKRVMLKLSGEALSGEKGFGFDFDFTKEISEQIKKLVDMGIEVGAVVGGGNIWRGRSGSEMDRTTADYMGMLATCINALALQDSLEQLGVNTRVQTAIEMKEIAEPFIRRRAMRHLEKERVVIFASGTGNPYFSTDTAAALRAAEIEADVILLAKKVDGVYDKDPHKYDDAKKYNKLSYIEVLEQGLQVMDSTATSLCMDNDIPILVFGLDEPCNIIKAVTGEEIGTLVSNSK

SEQ ID NO: 52752 - protein, 526 aa, Clostridium botulinum
MITVTNLSLRYGDKKLFEDVNLKFTPGNCYGVIGANGAGKSTFLKILSGEIEANTGDVSIQPGVRMSILKQDHFKYDEFPVLETVIMGNERLYEIMKEKDAIYAKTPFTDEDGIKASELEGEFADLNGWEAEAEASSLLQGLGIGTELHEKNMKDLSGSEKVKVLLAQALFGNPGVLILDEPTNHLDIKSVNWLEEFLINFEGTVIVVSHDRHFLNKVCTHMADVDFGKIKLYVGNYDFWYESSQLALQMAKDQNKKKEEKIKELQEFIARFSANASKSKQATSRKKLLDKIDLDNIQPSSRKYPYIAFKPERKVGNDILRVEGLTKTIDGTKILDNISFIIGKDDKIAFVGDELSITTLFKIISGELEPDSGEYKWGITITNAYFPKDNSEYFNDVDLNLVDWLRQYSEEKSESYLRGFLGRMLFSGEEALKEVKVLSGGEKVRCMLSKMMLNNANVIILDQPTNHLDLESITALNNGLMDYKSNILFTSHDHQFIQTIANRIIEVSEAKFVDKKVTYDEYLESK

SEQ ID NO: 52753 - protein, 295 aa, Clostridium botulinum
MEVWILNFVIATRRSKLAQVQTEIIIDLLNKKHDIECEKLLIETVGDKILEVSLDKIGGKGLFVKDIEVAMLEQRADAAVHSMKDVPYEMPKGFEIIAIPEREDVRDAFISLDNIKFKDLRKGAKIGTSSRRRAAQLKLLRPDLDIVPIRGNVQTRIEKIKKENLDGVILAVAGLKRVNLDHLITDYFDTKEMVPAIGQGALGIEVMEEHPKKELFKDLDHYNSKICVLAERAFMRELDGDCHSTIGAYASIKDNIMHIIGIFERKNKIIKKEITGTKDQYEKLGISLAEHILKD

SEQ ID NO: 52754 - protein, 187 aa, Clostridium botulinum
MILMKIKINTPLTEDKIKSLKAGDMVLITGTIYTARDAAHKRLIDALEKGRNLPFEVKNSIIYYVGPTPAKPGMEIGAAGPTTSYRMDTYTPKLLNLGLKGMIGKGRRSKEVIESIVKNKAVYFGAIGGAAALISKSIKKSEVIAYEDLDSEAIRKLEVEDLPVTVIIDSKGNNLYEDGLEDYLKSL

SEQ ID NO: 52755 - protein, 217 aa, Clostridium botulinum
MSISNPRIPADLIMVDDFSSYAQGYLYEEIPITQIKIYGEHIEHFDFSKSEINTSIFENCTFLDCSFEGASFVDVVFQNCNLSNSNFTDAYFERCQFIACKCVGVNMIDTIFKQTSMQRSNFQYSYFDKAKMTDIAFEDIDFTEVSITEAKLKRFKAKNSHFIKNNFFKTMLTGVDFTKNELVAPTVSSPPIEFQGAKISMVQAADLIGIWGIIVDQ

SEQ ID NO: 52756 - protein, 322 aa, Clostridium botulinum
LRALSTIAVILIHVTGTILYNSNNKSLTYNSSLVLNQLARFSVPAFIFLSGFGLALSYKKESKYLAYLGHRLKKVVPDYFVWYIVYIFLLEDINLSYHDKIISIFHGTLYYHFYFVPIIIILYLIFPIFYNFFRTKLALFITFFLNMAYIYYLDTLIYRKVLVENLTRESVVSWIFYFVLGVYFCSNYDKIHIFIKKHRNKLLFLLLLSTYILLKDTFLCLRANNDLDYGTTFIRPSVMLFSIFFILYIMSFNFNNLSFKKIFYMISKHSYTIYLSHPLLLYWLKKYYIENKYIIGSYKFFIIVFFTCFIGGLLISILINKF

SEQ ID NO: 52757 - protein, 130 aa, Clostridium botulinum
MAKVQYFGTGRRKKSVARVRLVAGDGKVIINNRDIENYFPIETLRVIVNQPLVLTETKDKYDVLVNVHGGGFTGQAGAVRHGISRALVKADENMKSSLKKAGFLTRDPRMKERKKYGLKKARRSPQFSKR

SEQ ID NO: 52758 - protein, 227 aa, Clostridium botulinum
  MISC_FEATURE (67)..(67): X=any amino acid
  MISC_FEATURE (109)..(109): X=any amino acid
  MISC_FEATURE (125)..(125): X=any amino acid
GSFRPIAGSKHLHLTTISPDLLLRQCPNHYAIRAGRNLPDKEFRYLRTVIVTAAVYWGLSSHLRLRXVFPLTFQHRAGVSPYTSAFALAETCVFAKQLLGPILCGLLSXAPLLPKLRGQFAEFLXQQFFRWPLGFSPHLPVVGLRYGHLFTRRGFSWQCGIRYFAINGSPSHLSLARRICLSSMPKCLDAHPIVRTSYPTASPHFSNVNRWYRNINRLSITYAFRPR

SEQ ID NO: 52759 - protein, 541 aa, Clostridium botulinum
MAKSLLFGEQARRSMEAGVDKLADTVRVTLGPKGRNVVLDKKFGSPLITNDGVTIAREIELEDPYENMGAQLVKEVATKTNDVAGDGTTTATLLAQAIIREGLKNVTAGANPIQIRTGIRKAVEKAVEEIKVISKPVNGKEDIARVAAISAASEEVGKLIADAMERVGNDGVITVEESKSMGTDLEVVEGMQFDRGYVSAYMVTDTEKMEAVLDDVYILITDKKISNIQEILPILEQIVQQGKKLLIISEDIEGEALSTLVLNKLRGTFTCVGVKAPGFGDRRKEMLQDIAILTGGEVISEELGRDLKDVTIDMLGTADSVKVTKENTTIVNGKGDKVAIKERVSQIRVQIEDTTSEFDKEKLQERLAKLAGGVAVIRVGAATETELKEEKLRIEDALAATKAAVEEGIVPGGGTAYIDIIPKIADLTSDIIDVKLGIDIIRKALEEPVRQIANNAGAEGSVIIEKVKATEAGVGYDALNDKYVDMLKTGIVDPTKVTRSALQNAASIASTFLTTEAAVADIPEKENTPPMAPGMGMDGMY

SEQ ID NO: 52760 - protein, 431 aa, Clostridium botulinum
MKNYIEIVDVYARQILDSRCNPTVEVEVELEDGTVGVAAVPSGASTGAFEAVELRDGDKSKYLGKGVLKAVDNVNTIIADELVGMNVLDQVAIDKTMIELDGTDNKAKLGANAMLGVSLACAKAAANSLGISLYQYIGGVNGKVLPVPMMNIINGGKHADNNVDLQEFMIMPAGAPSFSEALRMCSEVYHALKSTLKAQGYDTGVGDEGGFAPNLKSNEEAIVVIIEAIKKAGYTPGEDIFIALDPASSEIFEDGKYNLAGEGRVLTPEEMANYYVELAEKYPIISIEDGMAEEDWDGWKILTEKIGNKVQLVGDDLFVTNTERLSKGIKLGVANSILIKLNQIGTLTETLNAIEMAERAGYTAVVSHRSGETEDTTIADLVVAVNAGQIKTGAPARSERVAKYNQLLRIEEELNDMGEYRGLKAFYNINK

SEQ ID NO: 52761 - protein, 617 aa, Clostridium botulinum
MYKNIQREIYKNTKGDGDMFNKFDTKPLWEVSKTLSSVAQGLEPADMVIINSRLINVCTREVIENTDVAISCGRIALVGDAKHCIGENTEVIDAKGQYIAPGFLDGHIHVESSMLSVSEYARSVVPHGTVGIYMDPHEICNVLGLNGVRYMIEDGKGTPLKNMVTTPSCVPAVPGFEDTGAAVGPEDVRETMKWDEIVGLGEMMNFPGILYSTDHAHGVVGETLKASKTVTGHYSLPETGKGLNGYIASGVRCCHESTRAEDALAKMRLGMYAMFREGSAWHDLKEVSKAITENKVDSRFAVLISDDTHPHTLLKDGHLDHIIKRAIEEGIEPLTAIQMVTINCAQCFQMDHELGSITPGKCADIVFIEDLKDVKITKVIIDGNLVAKGGLLTTSIAKYDYPEDAMNSMHIKNKITPDSFNIMAPNKEKITARVIEIIPERVGTYERHVELNVKDDKVQCDPSKDVLKAVVFERHHETGTAGYGFVKGFGIKRGAMAATVAHDAHNLLVIGTNDEDMALAANTLIECGGGMVAVQDGKVLGLVPLPIAGLMSNKPLEEMAEMVEKLDSAWKEIGCDIVSPFMTIALIPLACLPELRLTNRGLVDCNKFEFVSLFVEE

SEQ ID NO: 52762 - protein, 445 aa, Clostridium botulinum
MDAPIKSMPQSIDAEQNVLGAMIIDKTSIAEAVEVLSSEDFYKDSHKIIFSGIIELYQKDIAVDMLTLTENLKSRDKLEAVGGVTYITELCNSIVSTANIQSYIDIIKDKSTLRRLIKSSTEIIENCYNRQDNVEEIIDSAEKKIFHISNQNTTTDFEPLSNVLERGFIQIENLFKNKGETTGVASGFRELDAKTSGFQKSDMILIAARPSMGKTTFALNIAEYAALREGKSVAIFSLEMSKEQLSYKLLCSQANIDMLRLRTGNLEDKDWENIARVSGPLAAAKIFIDDTAGMSVMEMRSKCRRLKIEHGIDMVLIDYLQLMSGGKGSTESRQQEVSEISRSIKALAKEMDCPVIALSQLSRAPEARSDHRPMLSDLRESGSIEQDADVVMFLYRDEYYDKETEDKNMAECIIAKQRNGPTGTVKMAWLGQYSKFGNLDVIHQE

SEQ ID NO: 52763 - protein, 229 aa, Clostridium botulinum
MGKKYTESVKLVDKNTLYTVQEAIELVTKTSKAKFDETVELAVRLGVDPRHADQQVRGAVVLPHGTGKTVRVLVFAKGDKVNEAQEAGADFVGAEELVEKIQKENWFDFDVVVATPDMMGVVGRLGRVLGPKGLMPNPKSGTVTFDVAKAIADIKAGKVEYRVDKTAIIHVPIGKSSFGEEKLSDNFHVLMEAVVKAKPAAAKGQYIKSVAISSTMGPGIKINPGKVLE

SEQ ID NO: 52764 - protein, 334 aa, Clostridium botulinum
MSEHSVSKKELILFLVVTFGFTAIMGIAMAFTYPKYKVDTFPLAQMCYPATGVMMALLLNKKRRKELPIKFYGAYLFFTITLVLYILVQIFIFHKNPGWYVQYWTIIGSFALIIMYFSDEKDKIYAFGLKVGKNSRESIRYTLLFVILYLCAIFLGQLIFGNVKDFIAPFKDPKKLVGMFLLPLSFPLTFIVFFGEEYGWRYFLQTAFQERLGKRKGIIFLGIIWGIWHLPLNLFYYSPKTSFYSVINQLIVCIGYSVFFGFVYMKTKNIWAVSMIHFINNNLGAILYGGTGADVVLSGKAVLGNLFCIFVIYLPFLFSKEYSKKEAEVSNYSA

SEQ ID NO: 52765 - protein, 326 aa, Clostridium botulinum
MYPLKFENIYLNKVWGGRGLKKFRDNLPKGDIGESWDIAFHQDLISVIKNGKLKGKTLKDAIELYKNKLMGDCIFDKYKDFPLLLKIISAEKKLSIQVHPGEKDFLDLKESPKKEAWYVMEAKVGSYIILGSKIKDKTVLKQVIDDGTVEDYLYKVPVKKGDIFYIDSGMIHAIGKGVTLIEIQQNSDTTYRLYDYNRGRKLDLEKGMNCVNLDIKPNKKSGLKVQLKNCNKTYCFLSEAFAMEKYEVYYFLKEKSDKERFFIFTCVDGQGQINYGEGRQNLSRGDSILIPAYMGDYTLRGNMNLLKFYIPDIEKSINSIVNIIKC

SEQ ID NO: 52766 - protein, 795 aa, Clostridium botulinum
MRYVNIKDYIKENVLIFDGAMGTMLQKLGLKISDLPEELNILEPEKIINIHRKYIEAGAKVITTNTFGANEIKLKQSKFSLESIIDKAIDNVKKAGKNKEILIALDIGPIGQLLEPMGTLKFEEAYEIFKRQIVQGQKSGADIILIETMTDLYEAKAAILAAKENTNLPVFCTMTFEKNKRTFTGCTPLSMVLTLEGLGVDALGVNCSLGPNELGDIVDEIIKYSSIPIMVQPNAGLPTIKAGRTIYNIEPKEFADFQRSIVEKGVRIVGGCCGTTDEFIREIVYSLKDIKIKKLKENNIYGVCSSTKSVLIEGVKIIGERINPTGKKLFKEALRNNDTDYILKEAISQVECGADILDVNVGLPEIDEEETMKKVIKEIQSIIDTPLQIDSNNPKVIEKALRVYNGKAIVNSVNGEEKILDSVLPLIKKYGASVVGLTLDDKGIPKKAEERLKIAEKIVNKALDYGIKRKDIFIDCLVLTASAQQEDVRETLKAVTLVKEKLNVKTILGVSNISFGLPNRELINKTFLAMSLQSGLDLPILNPNNKEMINIINAYKVLNNEDKRAANYIERYTNEISNSREVKIPKNDLTLKEIVMKGIKEESYSKTKDLLKDRGELSIINEELIPALDEVGDKYEKGIIFLPQLIQSAETVKKAFTAIKEKLREDNSPKINKGKILMATVKGDIHDIGKNIVKVILENYGFDIIDLGKDVEAEKIVEEVKKNNIKLVGLSALMTTTVNSMRDTIKILKESGMDCKVFVGGAVLNEEYAKMINADYYAKDAKEAVDIAKGFFGGF

SEQ ID NO: 52767 - protein, 332 aa, Clostridium botulinum
MEDNKKVIFSGIQPSGNLTLGNYLGALKNWVKLQDEYDCYYCVVDLHAITVRQEPKDLRRRTLEVLAIYIASGIDPDKNTIFIQSHVPTHCEAGWLLNCNTYIGELFRMTQYKDKSQRYGESVSAGLLTYPVLMAADILLYNTDLVPVGKDQKQHLEITRDLAQRFNNLYSPTFKMPDPYIPEAGAKIMDLQDPTKKMSKSSDNENSYILIMDPPDAIRRKINRCVTDSLGIVKYTDDQPGIKNLMTILSTITGMAMEDIEKKYEGKGYAQFKNDVAEAIISELEPIQNKVNELLTNKEYLESIYKEGAEKAYKVSYKMLRKMQKKIGFIPR

SEQ ID NO: 52768 - protein, 438 aa, Clostridium botulinum
MKKTSSKDFIVIGFALFAMFFGAGNLIFPPFIGNLVGDKAPIAIIGFLITGVGLPLSAIIACAKINGTFSDISGRVGKYFSVISTTALILAIGPMLCIPRTAATTYELTVQPLFPSIGPLVSAIIYFAICLAFVLRPSGIVDSIGKVLTPCLLLMLAIIIIKGLISPLGPVVSTNFKGVFSTSLLEGYQTMDTMGSVIYASIILASVRSKGYTDEKDVISVTIKSGIVAIAGLGLVYGGLMVLGSQTSQIISGEEIGRTALVIEIVKRDLGNIGIVILGIAVGLACLTTAIGLLSTGAEYLSKLTKGKVSYNAFAIIISVVSGILGIGGVDKIIKFSVPILQILYPIVIVLIVITLLGKVVKNDSVVKFTVYITLIVSMIDTMNTLTGEKVAFIKSILGIIPLSSVGFAWLIPAIIAFIIGTIAFGNKQEKNPQAADF

SEQ ID NO: 52769 - protein, 294 aa, Clostridium botulinum
MRFVIVTGLSGAGKTQAIRSLEDLGFFCVDNLPPTLIPKFAEACYQTEGKIKKIALVIDIRGGKFFDDLFESLKYLKEEGYKYEILFLDASDEVLIKRFKESRRKHPLSPDGRILNGISMERNRLREVKDRADNIINTSELATRELREAINEIYGEHDQIENQLIITVLSFGFKHGIPLDSDLVFDVRFLPNPYYIKELKQYSGKDKKVSDYVMSFDVTNKFVNRLENMLDFLIPNYFKEGKRQLIISIGCTGGRHRSVAIANAIYEGLKSKGHKVNIDHRDINEDIHKGGKKL

SEQ ID NO: 52770 - protein, 38 aa, Clostridium botulinum
MMKVRPSVKPICEKCKVIRRKGKVMVICENPKHKQKQG

SEQ ID NO: 52771 - protein, 271 aa, Clostridium botulinum
MGFGGNSMKKYRIFDAHAHYDDEAFDEDRSEVIKELEDFGILGVLNCGSSLDTSKTSVELSNKYNFFYAAVGVHPENAEEINEKTLNKIEALSENKKVKAIGEIGLDYYYEENPKRDIQIKAFKKQMELAEKLNLPVVIHDRDAHKDTLDIIKQFPNIKGEVHCFSGSVEFAKQCVDLGYYIGVTGVVTFKNAKKIVEVIKSVPMDRILVETDCPYMAPTPLRGKRNRSEYIKYMVDKIAEIKEISSEEVTSQILINIKDLFNIDVIKNKD

SEQ ID NO: 52772 - protein, 300 aa, Clostridium botulinum
MLSNYEKIALKIILIRSDLMQDIKSYTILNNGVKMPWLGFGTYKVENGDTVIQSVKEALKIGYGHIDTASYYGNEEGVGTAIKESRIPRKDIFLVSKVWNSEQGYDKTLKSFEDSIKKLGTDYLDLYLIHWPQPLSKETWKALEKLYKEGRVKAIGVSNFLVDHLKWLLEDAEIMPIVNQVEFHPQLIQKDLIEFCSKNNIQLEAWSPLMRGKVFEIELLQDIARKYGKTISQIVLRWDLQMGVVTIPKSINPSRIKENADIFDFEISKEDMDKIQQLDKGLRVGSDPNKVYPCQSISNK

SEQ ID NO: 52773 - protein, 585 aa, Clostridium botulinum
MQKTKMIFTIGPASSTEEIVSKLIEAGMSVSRHNFSHGSHPEHKERMMMIKKLREKHNKHIAIMLDTKGPEIRTGNFSVDKVELKEGAEFTIYCREDIVGDETKCSITYDELYKDVVKGNKILIDDGLVELEVQSVEDNKIHTVVKNSGTVSNHKGVNVPGVSVSLPAVTEKDIEDLKFGCEVGVDLISASFIRKASDVLAIRKILEENGGNEIQIISKIENQEGVDNIDEIIKFSDGIMVARGDMGVEIPIEEVPIVQKRIIEKCNKAGKPVITATQMLDSMMRNPRPTRAEASDIANAIFDGTDAIMLSGESANGKYPVEAARTMSRIAKTAEAKLNYDAILNKMRESHILNVPNAISLSACTTASELNATAIITATQSGHTAKMVSKYRPQCPIIAVTPNEIVARKLALNCGVVPLLTETFNSTDELIDKSVNKSLEEGYVKNGDLVVIAGGIPVSYSGTTNMLKVHIVGDILAQGRGSGTRPTYGNVKIVNNPSEAENIVERDDILVVKNLDRRYMTILDRVSGIVAEEGGITSHLAIECIARDIPFICNAGGAMDILKTGTYVTLDTVRGIVYNGRANIV

SEQ ID NO: 52774 - protein, 222 aa, Clostridium botulinum
MCSMKITSMDITNKQFKKSMRGYNCDEVDEFLDKISDDYEELYKDNSSLRERVNTLEERLNHYDKMEETIQNTLLLAQNAAEQAKETAQKEADLIIKNANDSAKRVIEKSQEDVMKINDEFQYTKQEFNKFRNRYKTFMKTQMDMFYEMEKEFMKNYNLGTGIEEKFVPEKEIEVQDSRALANEIDNSETREHSFKVSDITIDNSSLNKNNNEIKSFYIKED

SEQ ID NO: 52775 - protein, 333 aa, Clostridium botulinum
MMKHNITLIPGDGIGPEVTEAARKVIDAVGADINWHVVEAGEKVLDKYKTPLPNYVLDSIKETKVALKGPVTTPVGKGFRSVNVTLRKSLNLYANIRPVKSYKGIKSRYENVDLIIVRENTEDLYAGIEHMIGDDIAESIKVITKKASDRIVDYAFDMARKENRNKVTAVHKANIMKLSDGLFLNCAKEVASKNKDIDFEDVIVDAMAMKLVLNPEKYDVLVMPNLYGDILSDMAAGLVGGLGLLPGANIGYEGAVFEAAHGAAPDIAGKNKANPTACILSGAMMLNYIGENEKAKKIENAIEKVFVEGKCLTEDLGGSSTTEEFTKAIIENL

SEQ ID NO: 52776 - protein, 465 aa, Clostridium botulinum
MKKIIAVTGCPTGIAHTFMAEEALKKAAKELGVDIKVETNGAVGVENELTEKDIEEAIGVIVASDKDVRADRFTGRPTIETSVADGIRKPKELIQAILDGKAPIKGGAAAKKTIKKSLEEVPGKKSVTRDIYKHLMNGVSHMLPFVVAGGVLIAISFLWGIYSFEPKSAQYNPIAAMIKGIGGEAFAIIVPIFTAYIADSISGRPGMVAGFVGGLIANTTGSGFLGGIIAGFFAGYLMLYSKKLLSGLPKQFEGLKSIFILPIIGILITGVLMTLLGEPVAALNKGVMAWLASLEQANPILLGIIIGCMSAFDFGGPVNKAAYLTGTMLLAQGNYYFMAGVSAACITPPLIIALATTFFKNRFDEEERAAGLVNYILGCTHITEGAIPFAAKDPLRVIPILMVGSSVSSVLTYLMKIQVPAPHGGFLILPLVSKPLLWVAAILVGSTVGAILYGIYRGHTQKKAQ

SEQ ID NO: 52777 - protein, 1144 aa, Clostridium botulinum
MNKFKRVLVANRGEIAIRVFRACHELGIRTVAIYSEEDKFSLFRTKADEAYLIGKNKGPIDAYLNIEEIIQLALKKGVDAIHPGYGFLAENSEFARKCREAGIEFIGPTAEMMEKLGDKIKSKIVAEKAGVPTIPGVQKPIKSEKEALEFARYCGYPIMLKAAAGGGGRGMRIVRTEEELISSFKSAKNEAKKAFGIDDIFIEKYLENPKHIEVQILGDKHGNIVHLYERDCSIQRRHQKVIEFTPAFALPKKKREEICNDALKIAKTVGYRSAGTLEFLVDTTGNHYFIEMNPRIQVEHTVTEMITGIDIVQSQILIAEGYKLDSEEVGIKSQESIQTRGYAIQCRVTTEDPSNNFAPDTGKIEDYRTGSGFGIRLDGGNGFTGSVISPYYDSLLVKTTSWSRTFNDAIRKSIRAIKEFKIDGVKTNIGFLINVLNHEQFRKGQCDTNFIEKNPELFDITSKTDDEVRILKFIGEKVVNETHGIKKDFDVPTIPIVDEGLSLKGTKQILDEKGPEGLVSWIKTQNKLLLTDTTMRDAHQSLMATRMRSVDMFKIAKAQSVLGKDLFSMEMWGGATFDVAYRFLKESPWTRLEELRKSIPNVLFQMLIRGANAVGYKNYPDNVIRKFIKQSADSGIDVFRIFDSLNWLKGMEVATDEVLKQNKVAETCMCYTGDILEEYRDKYSLQYYVDLAKDIEKTGAHILGIKDMSALLKPYAAVKLIKALKNEISIPIHLHTHDTTGNGVATVLMAAHAGVDIVDTAFNSMSGLTSQPALNSIVAALENTDRETGLDLTDMQKLSDYWSAVRPVYSQFESGLKSGSAEIYKYEIPGGQYSNLKPQVESFGLGHKFEEVKEMYKKVNEMLGDIIKVTPSSKVVGDLAIFMVKNDLTPENIYEKAEKMAFPDSAVSYFKGMMGQPMGGFPEKLQKLVLKGEDPITCRPGEMLPPEDFEKIREHLKEKHDLDATENDIISYALYPEVFDKYLDFLKEYGDLSHMGSDVFFHGLYEGETAEIELQEGKTFIVQLSEIGKVDSEGNRAVVFEINGNRREIRIKDKSSLMAQNITSNSTKMADPANKKHIGSSIPGTVIKVLVNKGDEIKEGDSLIVIEAMKMETNIVASLSGVVGSLLVKEGDQVKSGQLLLELE

SEQ ID NO: 52778 - protein, 146 aa, Clostridium botulinum
MKLHELKAAEGANKASKRVGRGTGSGLGKTSGRGQNGQNSRSGGGVRPGFEGGQMPLYRRLPKRGFKNIFAKEYAAINLDRLNCFEDGTVVTPELLVEKRVVKKVKDGVKILGNGNIEKKLTVKAAKFSKSAIEKIEAAGGKVEVI

SEQ ID NO: 52779 - protein, 317 aa, Clostridium botulinum
MSTIIYAVLFSFLLSTITSLFLIPLFKKLNLGQSIKNGIPISHKKKAGTPTFGGIIFIFSSIITMLFIIKNYNKELLLVISSLIAFGLIGFIDDTLKKIHKKNEGLTSKGKMILLLFVSSIFAIYSYYNPSIGSIIMFPFTKKLFDLRILYIPFIIFYYVSTTNALNLTDGLDGLATSITLLVVTFFIFLSFGMGHYTLSISCGCIAGALLGFLRYNCYPAKIIMGDTGSLALGGAIATIAMILKNPFIVIIVGGIYVIEALSSLIQIVFFKLFGKRIFKMAPIHHSLELHGWHETKIVSVFSIITTILCLIGFLSM

SEQ ID NO: 52780 - protein, 402 aa, Clostridium botulinum
MYIQNQYQNLCNLLMSGCIPQPIRDGAGDTDIGPRDILRDLENPDMLVPPSTDTGLIPNLKFSFSDTNMTIRPGGWSREITVRELPVATTMAGVNMRLTPGGVREVHWHQQSEWSYMLKGRARITAVDDRGRNFIADIGPGDLWFFPPLFPHSIQGLEEGCEFLLLFDDGNFSDLRTFSLSEFFAHYPKDVLAANFGVTKNCFNSLPEGQVYIYQDTIPGPLESEAIESPYGTIPQSYKHSLLAQKPMTTSGGSVRIADTSNFPVAKTTAAALVEIKPGGMREIHWHPNDEFQYFLTGQSRMTVFADTGASRTFDYRAGDVGYVPTGYGHYVQNIGNETVWFLEAFRSDRFRSISLSQMMAITPKQLITSNLNVGPGFLNALSRSKFQCSVGPCFHQTECSN

SEQ ID NO: 52781 - protein, 339 aa, Clostridium botulinum
MRQKLEEIKNSAINELKTTLSKDQLEAIRVKYLGKKGELTQILRGMGALSQEERPIVGKVANEVRSYIEETIKEAFSDIKNKEKSIRLENETIDITMPGKKQAVGKRHPLDLTLESMKDIFISMGFTIEEGPEVELDKYNFEALNIPKNHPARGEQDTFYINDNLVLRTQTSPIQIRTMENQKPPIKMIAPGKVYRSDSVDATHSPIFYQMEGLVVDKGITFSDLKGTLELFAKRMFGDKVKTKFRPHHFPFTEPSAEMDATCFVCNGEGCKVCKGSGWIELLGCGMVHPQVLRNCNIDPEVYSGFAFGFGVDRMVMMKYGIDDIRLLYESDMRFLNQF

SEQ ID NO: 52782 - protein, 171 aa, Clostridium botulinum
MNLRLAKEKDLNFIIEMITIVKKHMIENDNDQWDEEYPDMETLRRDIINEDLYTIIEENDCMAIIAINKDQAPEYKNVQWKLDDKSPLVVHRLAVNPKFQGKGVAKTIMSFVDEKAKEQNCKSIRLDTYSKNKVAINLYERLGYSIVGEVYFRGKELPFKCFEKIVENFVC

SEQ ID NO: 52783 - protein, 300 aa, Clostridium botulinum
MEEWKMNKLEIKNLNKRFGVKKATNDITITLENGVYGLLGPNGAGKTTLMKQITTLLTPDSGEIIFNGKNVKENEDEYRGYIGYLPQDFEAYKNFSAKEFLSYMAALKGLDKGQAKDKIDELLHLVGLYDVRNKKVGKFSGGMKRRVGIAQVLLNDPKIMVLDEPTAGLDPQERSRFRNLIADISRDKIIILSTHIISDIESVAKETIMIKNGALLMQGTHEDILGGMKNRVYLIRTKDEREIAQIQQKYKIVNFQRGIDHTEVRVVSETIPSFKDVDIATPKFEDVYMFYFDLEDTKEV

SEQ ID NO: 52784 - protein, 298 aa, Clostridium botulinum
MKGIYIKEAKHGEKIDSQFMILKKIYKDGDSIIAYMGDRTGDIKVKILDKKDVLDAGDVIECSFIFSNNSEILNFKKIDEFLLEDFLPTVDRPIEEIMNEIEQISKDEFKSKECIELNNYFFKDQKFLDKFKKGIGGVSQHHNYIGGLAEHTLNVMYLAKMLCYRYNVKNRELTILSAKLHDIGKTEELSTNGPFTYTLKGEMEGHIVIGAEMLQRAFNDNIEAYSEDFKQRVKACIIQHHGKVEYGSPRSPKLEESYVVHYADYIDANMNKIAIVKKDVEENTWSQYDRRIEGKIYV

SEQ ID NO: 52785 - protein, 290 aa, Clostridium botulinum
MKILYKFWDKVFYYIIKFFTFLSIVILSLILIFILKESLGIFKNISFIDFITKSTWEPLGESPKLSILSFIMSTIYVTFLAVIIALPIAIGTSIFLANIASERLRNILKPIIDMLSGIPSVIYGFIGLSVVVKFFERKLGVSSGECILSAAIVLAIMILPFIISNCTDTMIKVYDKYFIYSKSLGISKWYMMNNLIIPASKKAILASVILAVGRGMGETMAVMMVIGNSPLMPKLLGKGETIPSLIALEMGSAQVGSMHYNGLFASGLILMIMLFIINFIFYMLKKNMQQ

SEQ ID NO: 52786 - protein, 337 aa, Clostridium botulinum
MKKKGYSVSRGLTIILLLTIILLVVAVISVNSGKMNLSPSEVFNVLIGRGTDKQNLIVYNFRLPRIVLTMLVGIGMGTAGCVMQSLLRNDMASPGTLGISSGSGLFVLLFIVIFKVDSVSSAIALPLLAFVGGMTAAILIFLLSYRRGKSISPTGLILTGVAVGSGYSAVTMMLTLKLDEKQMDFVQRWSAGSLWGDNWTYISILAPWVLILFLYVFYKSRILNTLNLGNQTAKGLGVAVKREFIGLTVAAVALSSGSVALGGNFFFVGMISPHMARKFVGSNHKLLIPTASLVGSIIILLSDTITRTISFGSDIPTGIVITVLSTPYFLYLLVKSN

SEQ ID NO: 52787 - protein, 573 aa, Clostridium botulinum
MDYKKVYKEWLDNDYIDEDIKKELKEIINNEKEIEDRFYKELEFGTAGLRGKIGAGTNRMNIYNISKVTQGLADYITEKGEEYINRGVAIAFDCRHYSKEFAKTAALVLAGNGIKSYLFEDLRPTPELSFAVRKLNTAAGIVITASHNPKDYNGYKVYWEDGAQVLSKIANGITEKIKSIGKFSDIKTISEEKALKSGLLNILGEDIDFEYIERVKSLSIREDIDKDIKVIYTPLNGTGNIPVRRVLKERGFTNIIVVPEQENPDPDFTTVGYPNPEDTKAFRYAENLGKKVDAELLIATDPDCDRLAIEVKDKNGEYLAFNGNQTGAILINYIVSNMKEMGKLPKGAAIVKSIVTGDLGKVIGEEYGVETYEALTGFKNICGKIPNLKEEGKEFIFGYEESIGYVTGTFVRDKDGVSSSMLLCEAAAYYKTKGKTLIDVLNEIYEKHGYYREKQISLILEGIEGKKRIDRMMESYRKSFPKEIAGAKLLTYIDYQDRIEYDIIKNDRKPCKIPRSNVLRFFLDDGSWYAVRPSGTEPKIKLYVYTKGKSIKAAEEKIKAIEKEVLDKLNSVK

SEQ ID NO: 52788 - protein, 209 aa, Clostridium botulinum
KTIVLDAGHGGKDSGAVSSRATGNIHEADIVQKITIKLGNLLKKAGYNVIYTRDKVDNYNYTSVTQNLEDRINVANSINADLFMSIHADSFDIPSANGYSAHYSSYRPKLDNSGVYIEDDVYYDRTPCDAALKSKVLSQLIVNEMSSLGGSNRGISDHNLYVTKNALMPSVLVECGFVSNDAEVRKLNGDTYQNQIAQKLYNAVTKLFS

SEQ ID NO: 52789 - protein, 147 aa, Clostridium botulinum
MLMPKRVKRRKVQRGRMKGKATRGNFIAYGDFGIQATECGWITSNQIEAARIAINRYVKRGGKVWIKIFPDKPVTEKPAETRMGSGKGSPEYWVAVVKPGRVLFEISGVSETVAREAMRLASHKLPVKTKFVTRRDFEEMGGEVNEG

SEQ ID NO: 52790 - protein, 192 aa, Clostridium botulinum
MNSNIYYRKKHSYKNRPYYCPINNMWFYPYMYMNPYTSYMLNPFMTPYTDPYMNAYYGNMCSYKDKAQCRATRAYGADNYGFTKENIYPKQYEKEVYMKEENKKRFYEEDSLDDMVIFNEDDKNEHIKKEKKLDRAQEKIYDSDLESAFTEKKEIQLEKINKEAEVDESKEKEPYRGIKINMRKVPLKEITD

SEQ ID NO: 52791 - protein, 166 aa, Clostridium botulinum
MAKNRQIKEAKVKEIQEKMEKAQAIVFVKYQGLTVEEDTMLRKELREAGVEYKVYKNTLSTIAAKNLGYESCVNLLEGPVSVAFGYDDVTAPARVLNDFAKKNKNLELKGGIIDGELYDVDKIKKIASIPSKDILIAKLLGSFKAPVSNFAYLINAIKDKKESEEA

SEQ ID NO: 52792 - protein, 99 aa, Clostridium botulinum
MRDKMSVSKKDVEYVAELARLEFKEEEKDSFVNDLNKILNYMEKLDELNTDDVDIVVNPYYIENKYREDNVEKSMELKEVIDNAPESLEEYVIVPKVID

SEQ ID NO: 52793 - protein, 454 aa, Clostridium botulinum
MFVVPKGGATMEIILELINEKKYSEAREELLKLNSVDIATLLEEVDNKKNMLVLFRLLPKDIEIDVFSYMSNDMQQYIIQSITHEEMTTIIDQLYFDDVIDLLEEMPANIVKKILLNTDEKKRKLINQFLKYEEDSAGSIMTIEFVDLKKEMTVEQAIERIRKIGVDKQTINTCYVIDRNRKLEGIISIRRLILSNKDVLIKDIMKENYVSINTFDDQEYVASQFKKYDLVSMPVVDKEHRLVGIITIDDIVDIIDQENTEDFHKMAAMEPSEEEYLKTGVFELAKHRIIWLLVLMISATFTGNIIRKSEDVLQSVVILASFIPMLMDTGGNSGSQSSTLVIRGLALGEIKLKDIFKVMWKEFRVSVVVGIALSVVNFFRVYFIEKVSFMVSMTVCISLFFTVVLAKVVGGILPIVAKKLRLDPAIMASPLITTIVDAVALLIYFGIAKILLGI

SEQ ID NO: 52794 - protein, 63 aa, Clostridium botulinum
MSRKCEICGKGVVYGVQYSHSHRQSKRSFAPNIKRVKAIVNGTPKRVHVCTRCLRSGKVQRAI

SEQ ID NO: 52795 - protein, 146 aa, Clostridium botulinum
TLSMAREGEINQIKKITGRDNIRQFLAKLGFVEGESVTVISEISGNMIINVKDSRIAIGKSMANRIIIREEKLFMMTLKDVECGQKVTVVKLHGKGVVKRRIMDMGITKGVEIFVRKLAPLGDPIEVNIRNYELTLRKADAEMIEV

SEQ ID NO: 52796 - protein, 833 aa, Clostridium botulinum
MKNKGGLPVKKLKKSNLKNKMKLRVLSYIMILMFLTINTEIVFAKTSSNLKTENIKILLNAHRNLGITELKWNTIEGANYQLKRGENKDKLQVIEDNITENTFIDVNSIQDKEYYYCIIAKKDDKELYKSNVIQVKAFIDSDKDGLSDDEEKLYKTDPNNPDTDGDKLSDGQEVLLYHTNPLLKDTDGDRLTDSEELYLCDTDPLKKDSDGNGITDDLEDQDKDTITNYDEISLGSNPKLADSDFDNLTDDKELLYKTSLTDEDTDNDGLTDGNEIKYGTDPLNPDSDGDGIKDGDEVFTSNVGVGSLDKDEKVEPSVKMNLKGRNIGTVSISNVGKVNPYLNKNIPGYIGAPFEFASPERFNSAKITFTIDKDLFNKQDMKPSIYYFNENTKLLELLPNQTVDASSGTISTNVRSFGTYIVLNKNEVDKAWNKEMKAPQIEETSNAGLNRGVAIKYKGNIQYYNSNNVKKDIVKNLDKNVAESKLTLEETIELTTDSDGDGLSDYHEKKGFKTNIGWIYTDPNNPDTDGDGLKDGEEIQYCSDNGGYFIVKSNPLLYDSDGDGSSDKYDANPMKYELSDRQLAIFSRLAYSDLESSIGKTVKEIKDPKDIFNTVELQDWGNTEEIGDWKLIDAKDDTSYSKAGFAASTYKLGNNIIVAYRGSESNLELLSDIAILLNTHHEAGQAYAYTKDAFKSNVNSKMHLTGHSLGGFLALKTTQNSVKERDSEERNLYDSIERTVRFNAPNYGIVFGEDSKNLETIKDKIINYRTKEDKVSLLPWSSFVGVKYEYATRDELYKTKYDKSSMLDRYILAPHDMANFLYYLEPKPNIFKN

SEQ ID NO: 52797 - protein, 202 aa, Clostridium botulinum
MDKKKIIKEIKGWIFSILGAILIAGLVNSKVFAKVRVQQSSMENTLLTNEQLVVDKLSYNFVEPKKGDIIIFHENKEKGTIAEDTLEMVDNIISIFNNNNNSIEKDDRLIKRVIGIPGDEIHIKDGHLYLNGKRLEEPYVKGETIEREFKLPIQIPENKLFVLGDNRMISKDSRMFGLIDYKQVEGKAIYRVYPFDHIGNIK

SEQ ID NO: 52798 - protein, 231 aa, Clostridium botulinum
MEESLKMNEEVTLDLQEILNVLKKKKKMILITTLLFGIISAALSFFIIPPIYEIKASVVIGKTLDEKNENKNDYNDVMMYQKLVKTYAKIASSRTLAENVAAKTGELKPEDLQEELEVTPQQDTQILDLKIEHKDAAYAQKILTIVCDEFIAESKKIYPNNTIELLDKPVIPEKPIKPRKLLNIAIALFMGLLLSAGRAFIQEYMDKTIKTENDIDKYLELPVIAVIPKIK

SEQ ID NO: 52799 - protein, 276 aa, Clostridium botulinum
MKVFILGGGTMGAGIVEVFAKAGHEVVLKRFVGKGMDKIIKSFDKQVKKGKMTEEEKNDCINRITVTTDMDLAKDADLVVEASKEEMEMKKDIFSQLDKICKPETIFATNTSSLSITTIASSTNRPDKVIGMHFFNPAPVMKLIEVIKGIATSEETKNTVIEISKKLGKEPVEVEEAPGFVVNRMLIPMINEAIGIYAEGIATVEDIDLAMKLGANHPIGPLALADLIGNDVCLAIMDVLHSEFGDSKYRPHPLLIKMVRGNLLGRKTGKGFYEYK

SEQ ID NO: 52800 - protein, 509 aa, Clostridium botulinum
MCMSKKNKIMDFFSALGRSLMLPIATLAAAGLILGLSSALLKPQIQAALPFLQNSVGVYVLTLIKTITATVFGMIPVLFAICIAFGLAKEEKEIAAFAGFIGYYTFLLSASIIINSGAFNFASLKMSNILGIEKTIEMGAFAGILTGILTSMLHNKFYKIDFPIAIAFYGGKRFVAIVVIGAMTLLGQVMPFVWVPISSGINSLGSLIASSGHTGVFLFGFLERILIPTGLHHVLNGVFRTTSVGGVYQGVEGCLNIFLQFFDKVDISQLKQFTAFLGQGKMPFMMFGLPAAAYAIYKTSPDNKKPKVKALMVAGVAASIVSGITEPLEFSFMFIAPQLFLFHAIMGGISFGILSLLGVAIGNTGGGIIDFLIYGVLVPGSRWYIVILVGIVFAVIYYMVFKWYFTNKNISIDVNEDVEEEDFSKDSSGKTNLAVKIINGLGGIDNIVAVNNCISRLRVDIKDMSLVNEDLLKKTGSMGIVKPSSTHIHVIYGPKVEKVAKQVKEAMKY

SEQ ID NO: 52801 - protein, 172 aa, Clostridium botulinum
MNYIVKAIIPIIILLIIAYGMIKRVKVYECFVEGAKDGISICIKIFPYLLAMMVAIAVFRESKALDCLINILRPVSNLIGLPGELVPLVLIKPLSGSGALGVFADILKQFGPDSNVGKMASIIMGSTETIFYTITVYFGAVGIKKIRHTLWAAIFADMVAIIMAVLVTNIIL

SEQ ID NO: 52802 - protein, 159 aa, Clostridium botulinum
MCSNELANTKFKELEEYINNISNKKGSLIEVLHKAQHIFGYLPNEVQEFVAKKLDISVSKVYGVITFYSYFTTEPKGENVINVCMGTACFVKGAGDVLSEFENKLNIKVGETTKDGKFTLQVLRCVGACGLAPVVTINDKVYGHFTKNEVDKVLEEYGA

SEQ ID NO: 52803 - protein, 148 aa, Clostridium botulinum
MNKVVLIGRLTKDPELKFTPGNGTAVATFTLAVDRRFSKDGQREADFIPIVVWGKQAESTANYMSKGKLMGVSGRIQTRSYEAKDGTRRYVTEVIAEEVKFLEWGNKPTTDSTYNNGSEPSYQSGQGFGNGNSFDDDIIPVDDGDIPF

SEQ ID NO: 52804 - protein, 354 aa, Clostridium botulinum
MKKIIMTGGGTAGHVTPNLALVPELKKLGYEIKYIGSIEGIERKIIEKEGIEYFPISSGKLRRYFDLKNFSDPFKVLKGVFQAKKIIKREKPDIVFSKGGFVTVPVVIAAHLNKIPVIAHESDITPGLANKLATPYCTRVCVTFPESVKHIKGDKAVLTGTPIRRELLEGNKLEGIKLCGFKDNKPILLIIGGSLGSKIINEIVRKNLDNILSKFNIIHICGKSNLDENLENRKGYAQFEYVNEELPDLMKASDLVISRAGANVIYELLALKKPNLLIPLSKKSSRGDQILNAASFEKSGYSLVLKEEELEDKTLIKKLNYLYENRNVYINNMSKSKMDNGVKNITELIKKYTK

SEQ ID NO: 52805 - protein, 474 aa, Clostridium botulinum
MKMGTQDKKLGLGLLITLGIGSMIGGGIFNSPTDLITKANPQAALIAWIIGGFGIICLALVFQFLANKKPDLKGGIYSYSQDGFGDFMGFNSAWGYWLSAWLGNIAFIVLMFKTINSLLGPGRELKPIVSFIAASLLLWSVHYIQTKGTKNAGIINAVVTIGKLLPLTLVVILGIFIFKPELFTVSNWSTILASSGKATSTFKQVNGAMGTIIWCFIGVEASVVLSEKAESQAIVGKATVISLLITLLIYVSISLLAMGIIPAKDLVVSGTPLADVLSKTVFGGAGSVIVKLGLIISLFGALISWVMLAAEIPYVAAKDGVMPKWFAKENAAGVAINSLTFTNIITQVFLCTLLSDKLQSAYSLVFAIATTCMLIPYTLSSFYAIKVCNEEKINGKDKIIAILASIYTIYGIYAGGIKYFALAFIMYAFGVIVFNKAKKEKKQKYTSIEKIGTAVVVFVGGVMIVLLSIGKISL

SEQ ID NO: 52806 - protein, 621 aa, Clostridium botulinum
MRKDRELILYDILLIILSLYLAILLRFDFGMASMASEFKKYMIFFKLSVIPVIIIILFFNKIFNLYSSIWKYASVEELMSIIYSVSISNIIFIIYSYFINYKVLESNYYRFPFTVHIIFWILSIVSLGGTRFIYRVIEDKECNKNKCNCDSKEKKLLIIGAGDAAALIIKEIKRNKELNYSIIGLVDDDIEKLGKRINGIPVLGGRESIIKISKNKKIDEIILAIPSAASSTKSEIVSICKETSCKLKTLPSMDKVIQGKFNMSKLRDVSIEDLLGREEVKLDDSGINRYIKDKVVLVTGGGGSIGSELCRQIVKFSPKKLLILDIYENNAYDVQMELNYKYPELDKAVIIASIRDEKRLRNIFSLYKPDVVFHAAAHKHVPLMEENPAESIKNNVIGTYNLIKCAHEFGIERFVQISTDKAVNPTNIMGATKRFCEIMIQAFDKISKTEFVAVRFGNVLGSNGSVIPLFKKQISHGGPVTVTHPEINRYFMTIPEAAQLVIQAGAMAKGGEIFVLDMGKPVKIVDLAKDLITLSGYKPEEDIKIEYTGLRPGEKLYEELLMDEIALTSTGHNKIFVEKPMENNIDFVEKSIEEFKKVVYNDEEEIFALIEKKVPTYIRKK

SEQ ID NO: 52807 - protein, 875 aa, Clostridium botulinum
MLKNKLLLKEVLLMKITTTEELIRKIEKIKEAQKIYSTYSQDKVDKIFKAAAIAANKERIKLAKMAVEETGMGIVEDKVIKNHFASEYIYNKYKDEKTCGVIEKDEAFGLTKIAEPIGVIAAIVPTTNPTSTAIFKALIALKTRNGIIFSPHPRAKKSTIMAAKIVLDAAVQAGAPKEIIGWIDEPTLELSNAVMSNSNLVLATGGPGMVKAAYSSGKPAIGVGPGNVPAIIHETADIKMAVSSVVLSKTFDNGMICASEQSVIVMNSIYEEVKKEFVIRGAYVLNKEEIEKVKKIILVNGNVNAKIVGQTPQKIGEMAGIQVPDWAKLLVGEVQSVELEEPFSHEKLSPVLAMYKVKTYEEALTKAERLVELGGFGHTSSLYINTVKCKEEVEKFSNNMKTGRTIINMPSAQGGIGDIYNFKLAPSLTLGCGSWGGNSVSENVGPKHLLNIKNVAERRENMLWFRVPEKVYFKYGCLPIALKELKRMNKKKAFIVTDKVLYELGVAKKATDVLDEIGINYKVFFDVAPDPTLETAKKGAKEMVDFNPDTIIAIGGGSAMDAAKIMWVMYEHPEVEFEDLAMRFMDIRKRVYEFPHMGDKAMMISVATSAGTGSEVTPFAVITDEKTGVKYPLADYELTPDMAIVDADLMLNMPKGLTAASGIDALTHAVEAYVSVMASEYTDGLCLEAIKTIFEYLPKAYKEGAQDIEAREKMAHASTIAGMAFANAFLGVCHSMAHKLGSMHHVPHGIANALLINETIKFNSEDMPRKQTAFPQYKYPNAKAKYANIADYLSLGGKTPEEKVELLIKAIDKLKAEVNIPTSIEEAGVSKDKFFKTLDEMSEQAFDDQCTGANPRYPLISEIKEMYTNVFSTKK

SEQ ID NO: 52808 - protein, 303 aa, Clostridium botulinum
MFGKFFDKLKEGLTKTKDGFTDKISSVLNLAVTIDEDLYEELEEILVTADIGVDTSIKIIDRLRERVKEEKIKDPAEIKPCLKRVILEILGEEKGSITPDTTPKVMLIIGVNGVGKTTSIGKVSAKLKNQGYKVIMAAADTFRAAAIDQLEVWSSRAKVDIIKHQEGSDPGAVVFDAVQAAKSRKADVLICDTAGRLHNKKNLMNELSKINKILEREYGDASKETLLVLDATTGQNAVIQAKEFMSACPIDGIILTKLDGTAKGGVVISIKDQLDIPVKLIGVGEGIEDLQEFNSEEFVEALF

SEQ ID NO: 52809 - protein, 403 aa, Clostridium botulinum
MFMHIKTLTVSQLNRYVKNTLDADFILNNASVKGEISNLKIHSSGHIYFSLKDGGSKINCVMFKSYAYNLKFAPENGMDVVALGNVSVYEKEGSYQLYVKDMKREGIGDLYVAFEKLKEKLKEEGLFDDVHKKEIPKFSKKVGVITSPTGAALKDIINVTKRRNKGIELLIYPALVQGTDASRTLIEGIKILNKVEDVDIIILARGGGSIEELWAFNNEELAYAVYNSKKPIITGVGHETDFTIVDFVSDRRAPTPSAAAEIAVFDREVLINEILNYKYNIKNYMENIIKEKRNYLNLYKQKIEANSPTNIIVNEYKNIDNLKELLNMKIEGKLNKEKNNLSRLSSLLEAHNPLNVLKKGYTLIEDEGNNLITEKEALKELNKINIIFKDGRAKLSIEYIEEF

SEQ ID NO: 52810 - protein, 511 aa, Clostridium botulinum
MGGIVVTKKKKKISFPTAFTVLFIVLIIAAILTYVVPAGSYSKLSYDNDSKVFVVTKPDESTNELPATQKTLDKLKIKVSVEKFKDGSINKPVAIPDTYEQVEQKPQGFFEVIEAPIKGVYDTIDIIMFVLILGGVIGVVNSSGAFDAGIAKLSVATKGKEYLLIVIITTLIALGGTTFGLAEETIALYPILVPVFIAAGYDALVCIAALYMGSSIGTMFATVNPFSVVIASNTSGISIASGFIFRIVGLILAVAITIVYIVKYGVKVKKDPSKSIIYEQRKEIQEKFLKDYSKDDVTLKFSLGRKLMLIIFALTFVVMIWGVAYKKWWFTEMTALFLVVGIILGVISRMGEKNFVDKFVAGSADLVGVALVIGVARSINLVMENGMISDTILYHSSNMISGMNSSVFIIFMLIVFIGLGFFIPSSSGLAVLSMPIMAPLADSVGLPRETIVNAYMFGQGLISFITPTGLILATLAMVDVTYDKWIKFIMPLMGYIAALSAIMLLIQSFVA

SEQ ID NO: 52811 - protein, 688 aa, Clostridium botulinum
MPREFVEYTNDLPIKVSMQNIKKSPIHWHNAMEVIYVLEGSIKITIETESHRVNKQEIGIINPEEAHSIKSITNNNKVLIFQIDTSFFNKYYDIENMFFYTDFSAPEAQKHEKYDVLRKYLSTLLCEIAQKGDNYEDVVEEILVDLLYHLINNFHYLIYDEEELKENEVQFERYDRIIKYIYSNYNNKISIQDIARLEFLSSHYLSNEMKNKVGYSFNDFVNLTRVEEAIKLLLDTDKTISEISEELGFSHTRYFNKHFKKHYKCTPMQYRKKYKVDEETYESLKVYEKLKLKDAYEYLMHYLEDYPRFNYEGKIIKIHVDLSKDTEELDENWHDIINLGSAKEVLKGNHGKLIKELQKHVECEYAIIQNIFSKDMNVFSTEKDRFFNWYEIRQVFEFIYDLDLKPAILIDFHKYKVEFFLALFKDFIDYFTDFFGDKEIKKWRFYLKNSLDENKKSLENFLKEYEDIEFINWDLDYKEVNNIYDTAYMVPYILNQYLNKNSNVIFLTTFDEIYGGEYINNELFYGGSGIINRQGIKKPSYYAYYLLSKLGNEVIEKGDGYIVTKEDDDIQILVYSHSEELESLISLDDLYKRRGLKETAEKKFSINIAALPYNYKIVTYKIDEGKGSSYNNWLSMGKPKRIDEYERDLLIKSSVPNIKLGFAKKSPIYNIVSKIEGYGAFLFILQRV

SEQ ID NO: 52812 - protein, 249 aa, Clostridium botulinum
MRCVFMRIIVVDNYEEMSKKAAAMVASQVILKPDSVLGLATGDTPIGMYKEIINIYKNQKMDFSKARTFNLDEYYGLNRENPQSYYYYMMNNLFNHVNIDKNNINIPNGMADNIEIECKEYERKIDKAGGIDLQILGIGVNGHIGFNEPNISFESETHLVNLNEKTIESNSRFFSSKEEVPTKAISVGIKSIIHSKKIILLACGSAKSDAVSKTINGKINPNIPASILQLHRDVVVIIDKEAASKLNLK

SEQ ID NO: 52813 - protein, 504 aa, Clostridium botulinum
MNIKPEEITSIIRQQIENFNTNIETIDSGTIIQIGDGIARVYGLEDCMEGELIEFPNDVYGMALNLEQDNVGCVLLGSEEGIKEGNVVKRTKKVVEVPVGEALVGRVVNSLGMPIDGKGPVLTTETRDVEVPAPGVIDRQSVKEPLQTGIKAIDSMIPIGKGQRELIIGDRQTGKTAIAMDTILNQKGKDVICIYVAIGQKQSTVAHIVNDLTKMGAMDYTIVVSSTASDSAPLQYLAPYAGCSMGEYFMHKGKDVLIVYDDLSKHAVAYRTMSLLLRRPPGREAYPGDVFYLHSRLLERSARLSEKLGGGSLTALPIVETLAGDVTAYIPTNVISITDGQIFLESELFNAGQRPAVNAGISVSRVGGNAQIKAMKQVAGTLRLELAQYRELAAFSQFGSDLDKESVKRLEKGKRLVEILKQPQYSPMPVEKEIIILYAAVSNHLIDIPVNKIKEFEKELFNYIDTHYRDIGKDILEHKQLTDELKSKLDKAINDFKNVFLSEI

SEQ ID NO: 52814 - protein, 180 aa, Clostridium botulinum
MMPRLQEKYEKEVVSALMDKFGYKNIMEVPKLEKIVINMGVGEAKENQKSLEAAVEDLAKITGQKPILTKAKKSVANFKIREDMPLGCKVTLRKQNMYEFADKLINVALPRVRDFSGVSSKSFDGRGNYAIGIKEQLIFPEIEFDKIDKIRGMDIIFVTTAKTDEEARELLRFLGMPFAR

SEQ ID NO: 52815 - protein, 248 aa, Clostridium botulinum
MKMNYISSKSKLGNNVEVGKFAVIEDDVVIGENCIIGHNVIIHKGTIIGNNVRIDDNTVIGKEPMRSVNSIFKDDKEFEPCKINDECLIGAGVIVYIGSKIGNKTLVADLAVIREDVTIGERTIIGKGATIENFCKVGSNCKIQTNVYLTAYSEVEDYVFIAPCVVTSNDNYAARSKERFGKFKGVTIKKGGRIGAGAVILPGKIIHEDGFAAAGSLVTRDIEKAKIVAGVPAKIFNDVPKEQLLENQ

SEQ ID NO: 52816 - protein, 462 aa, Clostridium botulinum
MKDIIVIGGGPGGYVAAIRAAHLGADVAVVEMDSFGGTCLNKGCIPTKTLYRTAEMMNILKHIEDFGIEAENYNLNVEKVQERKNNVIKELVGGVEKLLKGNNVEIIKGKAFLKDKNTVLVETKDGQVTLEGKNIIIATGSNAEMPDIKGIKNKNIIISDDILEFDRIPRHLVVSGGGVVGMEFANIFKAMGSEVTVIVARDSILYDIDREISKRYKVIAKKSGINILTSTKILEFAQDDNNVTIKCESKKGEFELNSDMVLMAKGRRGNFTGMNLEELGIEHDKKKIIVDDNYKTNIDGIYAIGDVNGICLLAHAASHQGIEVVEHIMENKECHKSVIPNCIFTFPEIATVGMTEEEIKEKGIEYIKNKFLFGANGKALALGEGEGVVKVICEKESKKILGIHIMGPHASDLIHEGVVAIEKGMTVNDFKEVVHAHPTLGEAFYEAIMGLNKEAIHSINKK

SEQ ID NO: 52817 - protein, 216 aa, Clostridium botulinum
MRIILLGPPGAGKGTQAKLISEEFSIPHISTGDIFRANIKEKTPLGIEAKRYIDNGQLVPDEVTIGIVKDRLTKDDCDNGFLLDGFPRTVAQAEALDEFLKGINKELDVALLIKVPEEFILERMTGRRVCTSCGASYHIRFNPPKIEGKCDICDNELIQRKDDTEATVKERLEVYSKQTYPLINYYKDNGIISEVNGTESINEVFGNISNILGRDK

SEQ ID NO: 52818 - protein, 366 aa, Clostridium botulinum
MYDYLIVGAGLFGSIFAYEATKRGKRCLVIDKRNHIGGNIYCDNIEEINIHKYGAHIFHTSDKDIWNYINRFIEFNRFTNSPIANYKGELYNLPFNMNTFNKLWGVITPKEAKEEIEKQKKEAGIKEPKNLEEQAISLVGTDIYEKLIKGYTEKQWGRSATELPDFIIKRLPVRFTYDNNYFNDTYQGIPMGGYNLIIEKMLENCEVRLNVDFFKHRKELETIAEKIVYTGMIDEFYDYKYGVLEYRSLIFETEVLDLENYQGNAVVNYTDKETSYTRVIEHKHFEFGTQQKTIVTKEYPSEWKKGDEPYYPINDKKNIGLYEKYKDLAMKEDKILFGGRLADYKYYDMHHIVYKALKKVKEEFRD

SEQ ID NO: 52819 - protein, 423 aa, Clostridium botulinum
  MISC_FEATURE (403)..(403): X=any amino acid
  MISC_FEATURE (413)..(413): X=any amino acid
  MISC_FEATURE (418)..(418): X=any amino acid
  MISC_FEATURE (422)..(422): X=any amino acid
MRMYDLILKKRNGGELSKEEIDYFILEYTNGNVPDYQASALLMAIYFQKMKRRETVDLTMAMVNSGDILDLSKIQGIKVDKHSTGGVGDTTTLVLAPMVAALGIPVAKMSGRGLGHTGGTIDKLESFKGFSVNMTEDKFINNVNNIKIAVGAQTADLAPADKKLYALRDVTATVDNISLIASSIMSKKIAAGANAIILDVKVGEGAFMKTPETAKELAEEMVNIGKSVGRNTVAILSDMDQPLGYAIGNALEVKEAIDTLKGKGPKDLLELCLTLGSNMVILSQKANTIEEARKMLLSTIEKGLAIEKLKEFIRSQGGDGTLVDNTEKLPKAEYIIPVICDRNGYINKIHAQNIGIIASELGAGRVTKDSIIDLAVGIVLNKKRSDKVKKGDIIAYIHANDKXKEKRLQKIYXIIMLXKKSXK

SEQ ID NO: 52820 - protein, 359 aa, Clostridium botulinum
MVIRMNNNKQILKCKNNCTLKFILLIIALFVITTVCITFGSVKIDVGVTFKSLINNILNKEIFAKDWPNNIDNIVFKLRLPRLLLAIVSGGALALVGILMQTLTRNSLADPYILGISSGASAGATLSIVLGVLSSFGHFGIALGAFLGAMIASIMVFKISGVSKVYSKTKLILTGVAVSSIFTAVTNFIITFARNDSLVKSAVFWTIGSLAGANYNQVKFSLVIMVITAILSMLLYKDLDAMLLGEAVAKNIGINTKFIIRFIMIASTLLTGTIVAFTGIIGFVGLIVPHIARQMVGSSHKKLIPFGIVIGSILMVITDTIARTILSPQEVPIGVITAFLGGPFFLYLMQKSTYRFGGK

SEQ ID NO: 52821 - protein, 104 aa, Clostridium botulinum
  MISC_FEATURE (19)..(19): X=any amino acid
MLSAFIQSQHSYPAVPLAXQLVHQRSVHPGPLVLRTAPLKFPTPATDRDRTVSRRSEPSSRAALMGEQPNPWDLLQPQDATSRHRGAKPPRRCGLLGEISLLSP

SEQ ID NO: 52822 - protein, 357 aa, Clostridium botulinum
MHKRLFIPGPVEVERDVLEKMSAAMIGHRSKEASVLQKDISDKLRKVFNTKEEILLSTSSGSGLMEGAIRCTTVKRAAVFAIGAFGKRWYDMAVANNVPADLYEVPWGEAIKPELVEEVLATGKYDSIFITHNETSTGIMNPVEEISKVIRKYPEVIWSLDCVSSMAGTKIDVDKLGIDVCITSTQKALALPPGMAICSFSQRAVERAEKVTNRGYYLDLLSLYKYIQKKNYQYPSTPSLSHMFAMDYRLDKILEEGLEERYERHIEMAEYVRDWARKYFKIYGDEKYLSNTLTNIENTRNIDIKKLNEELGKRGFQISNGYGKLKDKGFRIAHMGQCTLKDIKELLENINNILDLK

SEQ ID NO: 52823 - protein, 709 aa, Clostridium botulinum
MLEDAKNLLKKHFGYNEFRKAQEKVIESILKKEDTVAIMPTGAGKSICYQIPALIFEGVTVVISPLISLMKDQVDSLKEVGIEATYINSSLNNLEIEERIFNAREGLYKLIYIAPERLESDSFVRSLNNLNIALVAVDEAHCVSQWGHDFRPSYTKISNFIRKLSKRPIVTAFTATATETVRRDILNSLELQNPKVFVTGFDRENLSFSVIKGEDKEKFIFGYLESNIGKVGIIYTSTRKEAESLYNKINKKGYKVGVYHAGLNDEERKKTQEDFSFDNIEIIVATNAFGMGIDKSNVRFVIHHNIPKNMEAYYQEAGRAGRDGEESECILLFSPNDIRLQKYFIDESFLSPERKNNEYNKLRAMVDYCYTSKCLRSYILEYFGEDALEEKCNNCSTCNDNREEKDITLEAQKIFSCVYRMKERFGVNMVADVLRGSKNKKLLSLDLDGLSTYGIMEESTQKDIVALMNKLIADDYMVTTDDKFPVVRLRQKSYDVLKGKEIVSIKVSKIEKKVKADNELFEILKQLRKTISQEESVPPFMIFPDATLKELSEYMPTKEEDLLKIKGIGERKAKVYGERFIEAITEYMNEKGIDINNMDSYGSAKSNKESKIKTHVLSYNLYKEGKTIKEISEERNLKAITIQEHLFKCLSEGMEVDLDNFIKKDYEKLILDTIKKVGGTKLKPVKDELPPEVDYMCIKSVWYKYKDII

SEQ ID NO: 52824 - protein, 405 aa, Clostridium botulinum
MLSYEFLLDLAIILLSTKVLGMVTKKLHMPKVVGALLAGLILGPCVLNIVHETDFLAKMAQLGVIILMFSAGLQTDLKELKKCGRASLIIAILGTVVPLLGGYFVSALFFDSNGIFDITSKAFIKNFFIGVILTATSVSITVETLQELGRLKTRSGTAILGAAIIDDILGIIILTMVTSSTNNSTSINLVLLKIVAFFILSTICGVVLHHIFNRIYKRYGNISGISAVTFSFCLIMAFIAEHFFGVADITGAFIAGVIISNTSFREHVEKNFEVISYMLLSPVFFASIGLNTTMKHMNNKMRLFTIALLLMAILAKVIGCFIGGRICKYTYAESLRIGIGMISRGEVALIIAKKGAALGLIEAQFFGSIVFVVIATTLITPILLKMVYSTKFNDIKAYDSLHSAA

SEQ ID NO: 52825 - protein, 389 aa, Clostridium botulinum
MDYIKTEEIISEKVKNIEISGIRRFFNKVSNYKDVISLTLGQPDFKLPSRIKDELINSIQEDKTTYTSNAGLKELRLEIARYLKTMNINYNSEEICITVGGSEGLMCVFSTLLNEGDKVLIPTPAYPAYESCVKLLGGQILNYKLKNDFSIDFSDLENIIEKEKPKVMVLSYPSNPTGAILSKEESCKLHKIIKENNIIVISDEMYASLCFEEKYYSIAQFEDIKDKVILVSGFSKMFSMTGLRIGYVCANDEFINSIIKVHQYNVSCAPSICQWGAYAGLKYCMKDVDCMKEEFIKRRDFVYDRLKYMSIDTYLPNGAFYMFPSIKKYNMTSEEFCERLLKEAKVAIVPGSAFGEMGEGYIRISYAYSMEELNEALNRMEAWLSKITM

SEQ ID NO: 52826 - protein, 113 aa, Clostridium botulinum
MARGGFPNMGGANMNNLMKQAQKLQQDMEKMQGEMEKKEFSATVGGGAVTAVANGKKQIVDIKIEPEVVDEDDIEMLEDLIMSACNEALKKAEEDTSSEVKRLTGGMNLPGMF

SEQ ID NO: 52827 - protein, 723 aa, Clostridium botulinum
MLEDLMIKIKYSFTEKEIEFIKKAYNFACNAHKEQKRISGEPYITHPEEVAIILFEMGMDVNTMIAGLMHDVVEDTQYTYEDVAKEFGNEVADLVNGVTKLGKIEYKTKEEQQADNVRKMLLAMTKDIRVILIKLADRLHNMRTLRFMPVEKQKEKAQETLDIYAPLAHRLGISKIKWELEDLSFRYINPNEYYFLVRKIAEKRAEREEHIKEIISNLQQNLKRSGIESEIDGRPKHFYSIYKKMHNKNKNLDQIFDLTAVRILVDTVKDCYAALGIAHTVYKPIPGRFKDYIAMPKPNMYQSLHSTVMGVGGRPFEIQIRTYEMHKTAEYGIAAHWKYKEGVENSNNIDLKLTWLREMLDWQKETTDPEEFMQGFKIDLFSDEVFVFTPKGKVISLPNKATPVDFAYKIHTDIGHRCIGAKVNGKMVPLDYELKTGEIIEVLTSTTPKGPNLDWLSMVKSNQAKSKIRAWFKKEDKEENITKGKDILEKETKKQGYNFGELAKGEVLETVLKRYNMSSIEDMFAAVGIGALAASAVVLRFREQYLKKNKPELNWNEVRDQINKSNKQKKKKSSSPGIIVKGEDNLLVRFAKCCNPVPGDNIIGYITKGRGISIHRTDCENMEQLVEEDPTKIVEVSWGKPKGGEYISELEVIAENTDGLLADIMLTINGSKTNLYAVNAKPIRNDSVVVNIKLKISNIEDLKSVMKDIRKLKGVLEVYRTKK

SEQ ID NO: 52828 - protein, 539 aa, Clostridium botulinum
MMKKGIAASKGYAIGKIFIKEDINIEVVEKSIDNIEEEKERFKSALSNTRDQLERIKDKAQKEVGAEKAAVFDSHIMLLDDPEFAGAVEMNIESNKVNSEKALQEVIDMYSSIFASMEDEYMRERGADIKDVGKRIMLNLMGKSVNSMDDLDKDTIIVAQDLTPSDTAQLDKEKVIAFLTNIGGRTSHSAIMARTLEIPAIVGMKDITESVKNGDVVIVDGIEGIVIINPDKETIEKYEESKRTFLKEKEELKKLINVETITREGKRVEVCGNIGKPQDVHQVLENGGEGVGLFRTEFLYMDRDNMPSEDEQFESYKYAVEKMEGRPVVIRTLDIGGDKKLPYLEMPEEMNPFLGYRAIRLCLDRKELFKVQLRALLRASAFGNLKIMFPMISSLSEFRAAKELLKECMSELKSEGKEFNENLETGIMVEIPAAAICADELAKYVDFFSIGTNDLIQYTLAADRMNEKISYLYDPMHPAVLRLIKMTIDAAHKEGKWCGMCGEMAGDENAIETLVEYGLDEYSMSASSILTAKKIIMNS

SEQ ID NO: 52829 - protein, 179 aa, Clostridium botulinum
MYEYLDRRYALALYEVAEENNKVDEYLRDLKEVVNIIKNSEDICKILKHPEINTSRKKEIFTELFKDKVDDKILSFLLVLIEKDRILYLEEKLKEMEKIYLEKNNMILANIKTVIPLLKEEREELIEKLGNKYNKKIILEEEIDKSIIGGVYVRVGDDVLDGTLSTRLKDIKKMMLKRE

SEQ ID NO: 52830 - protein, 561 aa, Clostridium botulinum
MAEKFYTLLTEIGKAKIANSAGFGSKVNFVKMKVGDGGGSYYNPREDQEDLINTVWEGNITHVAIDEKNPNWINVEMMIPANVGGFMIREYGVFDEDNNMLAIAKCAESYKPLAEDGSTKELIMKMVLTVSNTENITLKIDPTIIFAKKSEIEVLENKIKNIKVPVTKVNEKIGDVVLTASDIKTEDGKTVESQLADITKQIDNIDLSADKVTLNSSNIKSKNVKGALEELFTSASNGKNKIATAITGKGIQSSGNDSFDTLSNKIKQIPAYSPANLLIEVKRSSPITIPDYDTIEKIALDVYGKIYCKSTKILSKIDEDGYIYWQYTHDRIITSVTVKNGYVYIADWEGNRIIKINSSSGEIIWNNRYSSKYGTESIVIDDNNIIYAGTDNGKVIKIDSTGEVIWTYDKHKSRVDAISIDKNGYIYSGGGNRLVKLCSNGGEEWIRDFGRSIASIAIDSNGYIYIGFINYGIVKINPDNGEQIWHVDLGLNISANSIFVDDYVYVASSDKIIRKISLDGLQIWKYYCDYNLRSIIKRYSYIYIGHDKIVRKLTDEIYVKK

SEQ ID NO: 52831 - protein, 175 aa, Clostridium botulinum
MNFIQNMDIYLLDFIHKSIANDFLDKIMIFITSIGNLGLIWIAISVLLLISKKYRRVGMLCIATLILSSLIGEVVLKNLVQRGRPFTAIEGINLLVKAPKSFSFPSGHTASSFAVATVIGRKIKSFKLPIYILAFAIAFSRLYLYVHYPSDVLVGALIGIISANIILYIYNKQNF

SEQ ID NO: 52832 - protein, 174 aa, Clostridium botulinum
MSEEKAKWYVVHTYSGYENKVKVNLQKTVDNRNLHHWIFDIQVPMEEQVEVKDGKKKITLKKTFPGYVLVKMLMTDDSWYIVRNTRGVTGFVGPGSKPVPLTEEEVLSMGIKEKQPEVDVEVGENVKVVSGPLEGFPATIQEINVEKGKIKALVNMFGRETPVELDFNQIEKLD

SEQ ID NO: 52833 - protein, 344 aa, Clostridium botulinum
MEDVKVKDFDFYLPEELIAQHPIEKRDEARLLVLDKETGEIEHKIFKDILDYLTPNDCLVLNNTRVLPARLIGAKEETGGKMEFLLLKRKEKDVWETLVKPGKRAQIGARFIFGNGELKAEVIGMGEEGSRIVKFYYEGIFEEILDQLGQMPLPPYIKEKLDDKEMYQTVYSKEEGSAAAPTAGLHFTEELLKKIEEKGVKLAFLTLHVGLGTFRPVKVEDIQEHVMHSEYYKMDKKTAEIINDTKENGGRVIAVGTTSCRTLETIGAIEGKVGEQSGWTDIFIYPGYKYKVVDALITNFHLPQSTLLMLVSALAGRDNIMNAYNVAVEKEYRFFSFGDAMFIK

SEQ ID NO: 52834 - protein, 448 aa, Clostridium botulinum
MFKKILVANRGEIAVRIIRACREMGIETVAIYSEADKDALHVQLADEAVCIGPPSSKDSYLNMYNIISATVLTGSQAIHPGFGFLSENSKFANMCKDCNIVFIGPDSETIDKVGNKSNARDIMIRAGVPVIPGSNGVIHNEEEALNIAEEIGYPVVVKASAGGGGRGIRIVHSKENMIKAFNTAKSEAKGAFGDDSMYVEKFIKNPRHIEFQILGDNYGNIIHLGERDCSLQRRNQKVLEEAPSPRMNEELRKRMGDVAIKAAKAVEYKNAGTIEFLLDEDESFYFMEMNTRIQVEHPITEMVTGVDILKEQIKIAYGEKLNIKQKDIKIQGHAIECRINAEDYKNGFRPCPGKIENLYIPGGLGVRLDSSVYSGYTIPPYYDSMIGKLIAYGRNREETIQIMKRALGELIIEGVNTNIDFQFIILEDENFIKGEYTTKYIEKMLTDN

SEQ ID NO: 52835 - protein, 162 aa, Clostridium botulinum
MIKTAIVTISDKGSKGERKDETGKVLQDILEKEGYKVEYYKIIPDEINIISGELIKLCDEDKVNLIITNGGTGFSKRDVTPEATEKVIEKHVPGFGEAMRASSLSITPKAILSRGIAGIRKDSLIINLPGSPKAAAENLQAVLGAIPHGIEILLGEASECAR

SEQ ID NO: 52836 - protein, 484 aa, Clostridium botulinum
MKDYNKVIFELSSEGRKGYRLPNLDVPEVELSELLPKNLLREDEIELPEVSEVDVVRHYTALSNKNYTVDNGFYPLGSCTMKYNPKINEDIVALSGFSKIHPLQDENISQGALELMYDLKGKLCEITGLDDFTLQPAAGAHGEYTGLLIIKAYHEKRGDTKRTKIIVPDSAHGTNPASASVAGFDIVEIKSGEDGRVSIEELKKVLNDEIAGLMLTNPSTLGLFEKDIKLISELVHEAGGLLYYDGANLNAIMGIARPGDMGFDVCHLNMHKTFSTPHGGGGPGSGPVGVKKHLAKFLPVPTVEKENDKFILDYNRPDSLGKIRSLYGNFGVMVKAYTYILTMGKEGLKSASHNAVLNANYIKESLRDYYNIGKDDICKHEVILSTLKENPHHIATLDIAKRLIDYGVHPPTVYFPLIIEEALMIEPTESESKETVDEFIDAMKKIAVEAKENPELLHEAPVKAPVRRLDQVKAARKPILRWQK

SEQ ID NO: 52837 - protein, 463 aa, Clostridium botulinum
MKLVVIGGGPGGYVAAIRGAQLGAEVTLIEKEKLGGTCLNIGCIPTKVLLHSSELLNEIKEARTLGIEVNNEVKINWTQLQNRKNTVVNTLVSGVSSLLEHNKVKVINGTAAFEGKNSIKVTKDQGESGNIQFDNVIISSGSVPFIPPIEGRELEGVIDSTGALSLDSIPKSMVIIGGGVIGIEFANIFNSLGCKVTVIEMLPYILPPVDREISEILKEKLKKDGIDIYNNCKVTKIENNNENLNVSFEEDNDKLNIEAQKVLIAVGRRANIGNLNLESTGVSTEKGCILVNDNMETNIKGIYAIGDCTGKNMLAHVASDQGIIAVENIMGKNKKMDYKTVPACVYTKPELASVGLTEEQAKQKGVDYKVGKFPLIYNGKSLIMNDTEGFIKIIADKKYEEILGVHILGPRATDLITEAALALRLEATLEEIITTVHAHPTIGEAMKEAALAVNKEAIHMVNK

SEQ ID NO: 52838 - protein, 270 aa, Clostridium botulinum
MNKKRLLGITLSVFLTLGVVGCSSKESKETVNDKKTIVVGATPVPAGEILKVAQPLLEKKGYKLEIKEFTDYVTPNTALNDREIDANFFQHTPYLDNFNVEKKTELEAVKKIYISPLALYSNKTKKLEGLKDGATIAVPNDPTNETRALRLLEKSGLIKLKKGDTLTKGDIAENKKNIKIEEIDAPQLPRILNDVDAVVINTNYAIEAKLNPLKDSILIEDKDSPYANVIAVKKEDKDKAHIKALSEALTSKEVKDFINEKYKGVVIPTF

SEQ ID NO: 52839 - protein, 481 aa, Clostridium botulinum
MINKDYESMTVKELREIAKKLDIKNISKFKKNELIEEIKTSKSTAIEKDGKILVEKISPKIIKSENNIHSKITKENGINEEKTSSLMKNNEENKAERLKEMINESQRAKGVLEIIENNNYGFLRGQNYLSGPEDIYISPSQIRRFNLRTGDEVEGKVRIPKDGEKFKALIYVERVNGENPEKAVGRKPFESLVPIYPNERIKLETNSQDLSTRLMDIISPIGKGQRGMIVAPPKAGKTTLLKKIAQSISRNNPLCKLIVLLIDERPEEVTDMQRSIKGEVIYSTFDEEPEHHTKVTYMVLERAKRMVEQGQDVVILLDSITRLSRAYNLTITPTGRTLSGGLDPGALVMPKKFFGAARNIENGGSLTILATALTETGSRMDDMIFEEFKGTGNMEVHLNRKLQERRIFPALDIYKSGTRRDDLLFTDSLEKETAFNIRKLLYEENNVENVTEQVLSILSKTKTNEEFVNIISKMDMNKNNR

SEQ ID NO: 52840 - protein, 403 aa, Clostridium botulinum
  MISC_FEATURE (402)..(402): X=any amino acid
SNVKDIAQSIYDIIGGSSNIVSFTHCMTRLRLVLKDQNNLEMKAIKKIDGVIGVVQQQNQLQIILGPGRVNKVTEEFEKLCGIQIEAVTKEVEFGNGSKLREEIKEKNATPFKLFLKKLSNIFIPLIPAFIACGLVTAILNIVLKLDPAFAETTIGGLLKIAGNAVFWGLNLFVGVNAAKEFGGSPMLGGTMAAIISHPELAKVTLNGQKLLPGRGGIIAVLLVVAFSSFLEKKVRKIMPDALDLFMTPLIVILVSTFVSIFALQPAGGFISDAIGNGTKAAISGGGAVTGFILGGFFLPLVMTGLHQGLTPIHADLLKTTGLNPLLPILAMAGAGQVGAAIAVLLRTKNKRLKKTIISALPVGIMGVGEPLIYGVTLPLGKPIYRSMYRRSSRWCSSSFVXS

SEQ ID NO: 52841 - protein, 453 aa, Clostridium botulinum
MCKINIKSFFSIIISKMVLKLSKTLFKGGTNFPGKVALKLDKKILKTVAKDYKVILVTGTNGKTTTTSMIYNMIKDSNKFVISNSTGANMFPGIVACFVENFSFNNKEEKYAVIEVDEANVKFITEYVSPEIITITNLFRDQLDRYGEVYTTLKKILEGIEKSPNSKLILNGDESLLGDLNNSLPNKVLYYGFSHFKNADTVIDVNADSKFCKKCKHPYSYEFLTYNHLGSYYCENCGYKRPNITFSLDEVEDLTPEGSLVIIDNQEYYINQPGLYNVYNALCAYSMAKTLGIEKSIIFNSLKSQKSSFGRQESINIEGKDVKIILVKNPAGYDQAINTIVLDKKKLNLALLLNDNYADGRDVSWIWDVKFEKLKSLDIDNILISGVRLYDMAIRLKIAGLPNEKFKISQNHDDLLEDIKSCREETVYILATYTAMTSFRKFLNSKGYIKKLW

SEQ ID NO: 52842 - protein, 201 aa, Clostridium botulinum
MNYMKNPFKVLIYDLKNAKEKDPAARNILEVFILYPFIHALIGYRIAHLFYKAHLFFLARLISQISRFFTGIEIHPGATIGKGLFIDHGMGVVIGETAEVGDNVTLYHGVTLGGTGKDKGKRHPTVGNNVIIGSGAKVLGPINIGDNVKIGANAVVLRHVPANATAVGIPAKVVRYEKKSSVIEIRDYNGVKKVIYNDMII

SEQ ID NO: 52843 - protein, 65 aa, Clostridium botulinum
MTKTFDLGDIVEMKKSHPCGHNRWEIIRMGADIKIKCLGCSRIIMIPRSTFEKRLKNVLEHKQKD

SEQ ID NO: 52844 - protein, 378 aa, Clostridium botulinum
MRLNNSFKGGVFKMEDYNFYMEKALKLAERGEGKVNPNPKVGAIVVNNNKIIGEGYHKYFGGPHAEVYALKEAGEKAKGATIYVTLEPCSHYGKTPPCAESIVKMGISKAIIAMKDPNPLVEGRGIDILKQNGIEVITGIMEKESKKLNEVFIKYITKKKPFVVLKTASTLDGKIATKTGESKWITGEEARYKVHQIRNDLSGIMVGIGTIIKDNPLLNTRIERGRSPKAIIVDSSLRIPLESKILETLNERTIYIATTKKHNNFSKKNALENLGAKVLEFEENEEGKVPLNELMQYLGSEGVDSILLEGGSTLNFSALKEGIVDKVMCFIAPKIMGGQDSKNMIGGNGVESLKDIFNLQNLKFEKIGQDILIEGYVY

SEQ ID NO: 52845 - protein, 501 aa, Clostridium botulinum
MRVLDNTLNIIKNKTLTYEQKVLSLAREAENSLDVLNLPSDVQSLRDEGVICDLNEGNAPYRPRYICPDYEKFMKQGSEFLNLNPPKDIWEATNNLLILYKHVPSITSMPVYIGNIDTLLDPFISDENEAYNAIKLFLLHIDRTITDSFCHANIGPKETKAGRLILKAQRELQTAIPNITLKYGKETSKEFAIDSINTALITAKPSFANHEIFSKDFPYNNYGIASCYNGLYIGGGSFTLVRLNLYGAAKKASSIEDFLDNVLPNVMTKMSNYIDKRINFIVNESNFFESSFLVREKLIHKDRFTAMFGMFGLAECVNHLLKTSELKDRFGHSEKANELGIKIIEKMYNIVNSNVNEYCSATDGHFLLHAQVGIETDKGTSPGCRIPIGEEPNLPIHLLQSAKFHRYFPSGIGDIFPFESTAKKNPESILDIINGAFNEGMRYFSLYASDSDVIRITGYLVKLSDIKKLDKGEQVLQDTVALGLGAVKNSRILERKVRDDA

SEQ ID NO: 52846 - protein, 166 aa, Clostridium botulinum
MMHMKKKLILGAILILLAILDNSLMPFVAIKGVYPSLLFVFIVSYSIIKDKWEAIWIGIFAGMLQDLYFANVFGINSLINMFVCLIAAEIGVNIIKSKILIPVISSFALSIFKGVFIWVIAYFLKINISYSLIAFNSIYNGVITIIVYKLVYNLCRKKYMDKKWEF

SEQ ID NO: 52847 - protein, 264 aa, Clostridium botulinum
MVRLYNSQYEEYYNSLKNRKNNNLRNSNYMYGERNNRRENFNSNFFQKRIIRDLIGVFLLSVFVLGLKAFSNSQTQMVYNYSKKIVNENYDYKKVINKAKNLDVNFLEDKILKYIDTFKSKVTGEKTIEELISNDFVLPLDGKVTSTYGEREDPINKKKAFHKGIDIDAKENTEVLASFGGTVKECGEDKELGKYILLDHGQGIETKYAHLNKIKVKKGEEVKKGKDIAESGNTGKSTGAHLHFEIIYMGENKNPQDYFSNIKE

SEQ ID NO: 52848 - protein, 184 aa, Clostridium botulinum
MKKIKLQNRPFGPFPTILVGANVNGKPNYVTVGACGVVSLKPVLYVSLKDSHYTTLGIKENGYFSVNIPSADLVQKTDYCGIVSGHKTDKSNLFTSFYDELGKAPMAEECTMNFLCKVIQIIPVFDFQMFLGEIEAVYVNEECMTDGKPDPLKINPLMMMGSNYYDLSKTVGTLFKTGLEILPK

SEQ ID NO: 52849 - protein, 327 aa, Clostridium botulinum
MKKLNENSIVEMYKTMLKIRKFEQVAMNTFAEGKIPGFVHLYIGEEAVATGVCANLKDSDYITSTHRGHGHILAKGGDLKFMMAELFGKATGYCKGKGGSMHIADATKGILGANGIVGAGHNIAVGAGLSAQYRGTDQVCVCFFGDASTNQGTFHESLNMASVWKLPVVFVCENNLYGISMSQNRHQAIKDVADRGVAYNVPGIVVDGNDVFAVYEAAKEAIKRAREGKGPTLIECKTYRHRGHFEGDPCVYKPTEEQEEWLAKDPIPRFEKYLVENEILTEEKLKEVQNKVESQIDEAVDFANNSPYPELESVLEDVYTDIKEEVR

SEQ ID NO: 52850 - protein, 426 aa, Clostridium botulinum
MLDLKRIRNNSNEIKESLNNRGEKFDVTVIDEVLKLDEERRNILVKVEVLKSKRNQVSSEVPKLKKEGKDVSNIVAEMKNLSEEIKGFDTTLAKIDEKIQYIMLRIPNIPNPQVPDGDTDEDNIEIRNWSEPTKFDFEPKAHWDIGSNLNILDFERAGKVTGSRFTFYKGLGARLERSLISYFLDTHTEKHGYTEILPPYMVNRTSMIGTGQLPKFEEDAFKISEDDYFLIPTAEVPVTNLYRDEILKGDELPLKHVAYSACFRSEAGSAGRDTRGLVRQHQFNKVELVKFTKPEQSYEELEKLTNDAETVLKELGIPYRVVRICKGDLGFTAALKYDLEVWMPSYNRYVEISSCSNFEDFQARRANIRYKEDAKAKPQYVHTLNGSGVAIGRTVAAILENYQNEDGSVTIPEVLRPYMGGKEAIK

SEQ ID NO: 52851 - protein, 111 aa, Clostridium difficile
FEGYSFIDFLTGADWVPSANKFGISSMIVASIFATLGALVIGVPVGILTSVFIAEVAPKRLAKIMSPAVELLAGIPSVLYGVFGLAVIVPTIQSIFNLPKGQSLLAIVIVL

SEQ ID NO: 52852 - protein, 303 aa, Clostridium difficile
ISLMGGLGLFLYGMNLMGEGLQKSAGTKLKKIIKLLTSNLFMGVLVGTGVTAVIQSSSATTVMVVGFVNAGIMTLKQAIGVIMGANIGTTVTAQLVSFDLTGMAPVALGVGIILYLFGNKPRIKNIAEILIGFGILFTGMDFMKMAVEPLRDYQGFTDLLVTFGRYPLLGLLLGFGITAIIQSSSASMGMLVALAAEGLVPLSAALPILYGQNIGTCVTSLLSSIGANKNARRAAMMHLIFNVLGTVIFLIFLNKPVVSMVTSWDPSNVARQIANTHTLFNIISVLILLPFTNLIIKLAIKLV

SEQ ID NO: 52853 - protein, 122 aa, Clostridium difficile
  MISC_FEATURE (106)..(106): X=any amino acid
MLSALIHSVHSYPAMPLAGQLVHQRYVHPGPLVLRTGLLKFPTPATDRDRTVSRRSEPSSRTTLMGEQPNPWDLLQPQDVMSRHRGAKPPRRCGLLGEISLLSPGXLLSVERWPFHAEPPDH

SEQ ID NO: 52854 - protein, 96 aa, Clostridium difficile
MLSALIHSVHSYPAMPLAEQLVHQRYVHPGPLVLRTGLLKFPTPATDRDRTVSRRSEPSSRTTLMGEQPNPWDLLQPQDVMSRHRGAKPPRRCGLL

SEQ ID NO: 52855 - protein, 121 aa, Clostridium difficile
MLNIDEIKKLIPHRYPFLLVDKITELEVGKRAVGIKNVTVNEPFFQGHFPEYPLMPGVLIVEALAQVCGVAMMSVEENKGKLGVFAGIDKVRIKREVRPGDTLTMEVEMTTLRKNIAKADA

SEQ ID NO: 52856 - protein, 101 aa, Clostridium difficile
  MISC_FEATURE (31)..(31): X=any amino acid
KKGINFLEEVSRVLELDNITFIHGRAEDCGXNEDYSEKYDVATARAVAGLPILMEFCVPFVKVGGYFICLKGPNANLELEESQKAIDVLGLEYIEKIDVEL

SEQ ID NO: 52857 - protein, 231 aa, Clostridium difficile
MVKPRLYGEDANAKSAALYTLTYVLEKILKLLHPYMPFITEEIYTHLPTVEGCIIVSEWPKYNEEDNMAEEEDMMNLLMEGIRSIRNVRAEMNVPPSKKAKLIIIPSEEKIEAIELGKDYFITLASASNVEIAKDKSNVPEDAVGVVIDGVEIFIPLNELVDFEKEIERLSKEKKKLEGEIKRVNGKLANQGFLAKAPESLIEEEKAKKEKFEEMIKSVEERLTNLESKIK

SEQ ID NO: 52858 - protein, 160 aa, Clostridium difficile
MVRGGKDMKLEDKVITGLATSDDDSSITIKDFKAENISSLFEDIATIGISVDMISQTAPILDKISVSFTVPKEELGECKKIVSKYTDEEHVVIDNNITKFSLVGLGMKNTSGVAAKVFKIFNENGIMIKLITTSEIRITCAINSDDKQVAIEKIAEVFNI

SEQ ID NO: 52859 - protein, 106 aa, Clostridium difficile
  MISC_FEATURE (5)..(5): X=any amino acid
  MISC_FEATURE (6)..(6): X=any amino acid
  MISC_FEATURE (30)..(30): X=any amino acid
MNVFXXTHTAKHGYTEVLPPFMTNRNSFIXTGQLPKFEEDMFKIEGLEYFLIPTAEVPVTNIHANEILDVAELPIKYCAYTPCFRSEAGSAGREVLPLCNLEEVKV

SEQ ID NO: 52860 - protein, 299 aa, Clostridium difficile
MKKVKLIYNPNSGEKKILSNLDTIIELYQEKNYLLIPYRLTIKEPVKNAFKEVDSSYEHILIAGGDGTVDLVVNAMKELDIKIPIGILPTGTANDFSNALQISFDIKEAINEIINSKPKKIDIGKVNNKYFINVASAGMFTDVSQRINTDLKNSFGRISYYIKGIEEALYMRKFKIKVSSEEMYYDGDMYLMLIFNGKTAGNINLAYKAEIDDGYLDVIIFKGMPIPKSIPVLISVLRGDYLDQYNGNEILYFKTKKVHIECEDSLITDIDGEKGPDFPLNIECIKDGIEVMGICSEKS

SEQ ID NO: 52861 - protein, 554 aa, Clostridium difficile
MSNETNSSNFIKNIIINDLETGKHDSIITRFPPEPNGYLHIGHAKSICLNFGLAKEFNGKANLRFDDTNPLKEDVEYVESIKEDVKWLGFDWNELNFASNYFDEMYKRALILIKKGKAYVCDLTQEEMREYRGTLTEPGKESPHRNRTIEENLDLFERMKNGEFKDGEKTLRAKIDMSSPNINLRDPIIYRISHSTHHNTGDKWCIYPMYAFAHPIEDAIEGITHSICTLEFEDQRPLYDWFVKECEMENIPRQIEFARLNINNTVMSKRKLKQLVDEGIVDGWDDPRVPTISGIRRKGYTAEALRNFCSEIGVSKVNSTVDSQMLDYFLRENLQPKAPLTMGVLRPLKLIITNYPEDKIEMLEIENNAKDESQGKRLVPFSRELYIEQDDFMEEPVKKYFRFFPGNEVRLKGAYFVKCTDVIKDENGNVVEIHGTYDPETKSGSGFTGRKVKSTIHWVDAKSAIPCEFRLFEPLILDDIPENEGKHFLEQINPNSLEILQGFVEPTQIKDAKPFDKFQFVRNGFFSIDNKYTTDEKFVFNRIVPLKSSFKPGK

SEQ ID NO: 52862 - protein, 121 aa, Clostridium difficile
MRFFFQSQAKEEADKKSREIIGYAIQKCAADHVAETTVTVVSLPNDEMKGRIIGREGRNIRTLETLTGIDLIIDDTPEAVILSGFDPIRREIARIALEKLIADGRIHPARIEEMVEKATPK

SEQ ID NO: 52863 - protein, 117 aa, Clostridium difficile
MLYKQYGGYVMNNNKNKDSFLKGALILGLAGVIVKIMGGFFRIPLGNMIGSEGMGYYQAAYPVYTLFLTLATAGFPTAVAKLVSEKVAIGNFKGANIIFIGFVIKSFIHKKHHKIRL

SEQ ID NO: 52864 - protein, 494 aa, Clostridium difficile
LEGLGSKTLVELREIAKELKIKSITTYKKNELIEIINSKSKNEEKVNEETKEKNEDIKEDIKNRKENIERESIEKEVEYKSPTKSYNKKEIDTQNISQNQEHRNQRNDYNKTTSVNDSNKSSNISNRMVRNNNKNYYMPKQVDESKIVDEFNTSKEDEVVGVLEILPDGFGFLRGSNYLSTEGDVYVSPSQIRRFNMKTGDKIKGITRHPKSGEKFRALLYVQKINDENPDTAIQRNAFETLTPIFPEERLTLETNRNEIATRIIDLISPIGKGQRGLIVAPPKAGKTVLLKSVANSIAKNHPNVELIVLLIDERPEEVTDMKESIEGDVIYSTFDQVSSHHVKVAEMVLNRAQRLVEHGKDVVILLDSITRLARAYNLTISPTGRTLSGGIDPGALHGPKKFFGAARNIRQGGSLTILGTALVETGSRMDDVIFEEFKGTGNMELHLDRKLAEKRIFPAIDIYKSGTRRDDLLLDDEEKTALWRLRREMSNNS

SEQ ID NO: 52865 - protein, 326 aa, Clostridium difficile
MGDDSMQVKVKKAVIPAAGLGTRFLPATKAQPKEMLPIVDKPTLQYIIEEAVASGIEEILIITGRNKKSIEDHFDKSVELELDLEKKGKKELLEVVQNISNMINIHYIRQKEPKGLGDAIYCARHFIGDEPFAVMLGDDIVDNDVPCLKQLTDAYEEYRTTILGVQKVNQEDTNKYGIIEAKNIEGRVYKVKDMVEKPESGKAPSNIAILGRYIITPEIFDILKDLPPGKGGEVQLTDALKILSKKEAMYAYNFEGKRYDVGDKLGFLEATVDFALKKEDLKEDFIKYLKHVCSEFDKNNNVLYNNTDEKIDLIEVNEARELEIQK

SEQ ID NO: 52866 - protein, 143 aa, Clostridium difficile
MKSYIAKPADVQRKWYLVDAEGKTLGRLATEIATVLRGKHKPTFTPHVDGGDFVVVVNAEKIVLSGKKLDQKYYRYHTGYVGGLKEISYRDMMDKKPEEVISHAVSGMLPKNKLRSRMMTRLRVFAGAEHTHAAQNPEVLNFK

SEQ ID NO: 52867 - protein, 130 aa, Clostridium difficile
MANVQYYGTGRRKSSVARVRLVAGEGNILVNGRALENYFNYETLIRDVKQPLVLTGNENKYDVIVKVEGGGFTGQAGAIRHGISRALLKADLDLRPALKKEGFLTRDARMKERKKYGLKAARRAPQFSKR

SEQ ID NO: 52868 - protein, 131 aa, Clostridium difficile
  MISC_FEATURE (20)..(20): X=any amino acid
  MISC_FEATURE (104)..(104): X=any amino acid
  MISC_FEATURE (124)..(124): X=any amino acid
GISTCCPSPTPFGLSLGPDXPRADEPSPGNLGFTACGIPTHILATHANILTPILSTCPYGHASTRMGSSPTHHYDAVASVVSFSPGNLRRRITRPVSYYALFEXVALLSQHPGCLCNPTSFTTXLTFRDLS

SEQ ID NO: 52869 - protein, 169 aa, Clostridium difficile
  MISC_FEATURE (12)..(12): X=any amino acid
  MISC_FEATURE (23)..(23): X=any amino acid
VAVTSEVKEMKXQHKKINVGDQXVNNSKDNKSLDGSFVDEKTALEGVRRGTYYASLKIPKNFTKDLTSLITDDIKKGEIIYTVNEKINAVAPEITDKGASTIQLQVNQTIVKTVSEIVLGISNGVGAGIEHSLPKLTKVENSLIDLQKRFDHINKTVDLASDATSKLSD

SEQ ID NO: 52870 - protein, 118 aa, Clostridium difficile
MKKIELLAPVGSFDSLKAAVQNGANAVYLGGKDFSVRSANNFDRNELIEAVKYSHIRGVQVFVTVNTLIKQYEIEDFVEYVKFLYDIDIDALIVQDIGMARLIKKLLPDFELHESTQM

SEQ ID NO: 52871 - protein, 214 aa, Clostridium difficile
EEVLSESEHADIYKIKEELMTSYIHMVEKGMESIEVANFYDENCNDVIIELNTNLAPSENAQGYFKKYNKMPHAKVEISHLISLNKEDIDYLENIILSIENCENLGELQDMKEELAKGGYIKTQKKDSKKDTIPSTQPHEFVSSDAFKILVGKSNKQNDYLTLRLADNDDLWMHTKNIPGSHVIIKCAGKEVPDNTVFEGAMLAAFFSKSKLSS

SEQ ID NO: 52872 - protein, 115 aa, Clostridium difficile
LYANDLVEDAKKWIKVMEKESPDIIVAVVHSGEEPKTDRNPGNRIKELATTVDGIDAIVAGHTHEKIDEHKYKNKSGDEVIVTQPGWHGDRVSEINFKLNKENGKWDIKEKSSKL

SEQ ID NO: 52873 - protein, 88 aa, Clostridium difficile
MESIGSHLTNKYAEGYSGKRYYGGCEYIDEVETLAIDRIKKIFGAEHANVQPHSGANANIGVYFAMLKPGDVVYNYWYITRYATNYRV

SEQ ID NO: 52874 - protein, 147 aa, Clostridium difficile
ISIVGLGPGDYSLISQGVLESLINSPKVFFRTEKHPIIDKLKETIQYTSLDYFYEKEENFDNVYLKISEFIIEESAKGDLVYAVPGHPRVAEKTVSIIERLANEKHIAVEILPSMSFVDAMFNYLAIDPSEGFKLVDAFEIENSYID

SEQ ID NO: 52875 - protein, 191 aa, Clostridium difficile
MIFPYFSLFGSVPEDFDSLTVVIILTMVFISGTLRFVQESRSGNAAEKLLAMITTTCTVTRRNYEKKELPMDDLVVGDIVHLSAGDMIPADVRILDAKDLFVSQASLTGESEPIEKTPNVSAQKESVTDYTNIAFMGSNVISGSATAVVVCVGDHTLFGSMASAVAGEAVETSFTKGVNAVSWVLPLKHLI

SEQ ID NO: 52876 - protein, 96 aa, Clostridium difficile
VEVEVVLEDGAMARAIVPSGASTGAFEAVELRDGDKGRYLGEGVETAVANVNEIIARDIEGMDAFDQPAIDAIMIELDGTPYKGKLGANAILGVSM

SEQ ID NO: 52877 - protein, 198 aa, Clostridium difficile
MNFYRFVINIFKGFSKIFFKYEVIGAENIPDRGNIVIASNHKSNLDPIFLAAAIENREIAAIAKKELFKVKPLGFILKKLHVMPINREKPDVSTIKTILRSVRDGYVLGIFPEGTRIKGDSFGKAKAGLSVFTIKSKSKVVPVSIISKYKLFSKVIVYIGEPISFEEHFKEKLSNDDHERISQEILEVIKQNYFKYSK

SEQ ID NO: 52878 - protein, 216 aa, Clostridium difficile
MGNLVIAVDGPAGAGKSTIAKIVAKKLNINYIDTGAMYRAVTYKCLKSGIDVNNEKEVIQIAENSDIDFKDNNIYLDKEVINEEIRTIEVSNNVSNVAKIKEVRQLMVEVQRKIGMKNSVILDGRDIGSYVFPDADYKFFLVATPEERGNRRYKELCNKGYNTTLEEVIEDIIRRDEIDSNREFAPLVKANDALEIDTTGKTIEEVVEEVVSKINL

SEQ ID NO: 52879 - protein, 288 aa, Clostridium difficile
  MISC_FEATURE (218)..(218): X=any amino acid
  MISC_FEATURE (222)..(222): X=any amino acid
  MISC_FEATURE (241)..(241): X=any amino acid
  MISC_FEATURE (270)..(270): X=any amino acid
  MISC_FEATURE (272)..(272): X=any amino acid
MLDAFITIVSSIIEIWSCKKVFDYTSQSKTDLKKLNMYFLFSVFLIISSLYINIGANSRILICIFVMFVFYKSNYKVNIYKCLVISFFYWLILIGINGLSMLLVATVSNLDNMNVLLSGSLYRYEAIFLGKIMLGILLYVYKASFKNFKISKKEIYICIPMIANLLSFFVLYDYIINLVKISPERRTAFLVIVLLLILSNISIFVLIHIILKIKIRKXDKFXYDSFKLKVNNYFFMYNFTXISIKVILLKIDILIYTDIIKKSLFNFKNXCXKINLYININNNYLNIL

SEQ ID NO: 52880 - protein, 112 aa, Clostridium difficile
  MISC_FEATURE (99)..(99): X=any amino acid
MSLKHKLQEDLKSSMINKDTVRKSVVTLIRASIKQYEVDNMVELDEDGIIDVIAKQLEQRRDALVEFEKAGREDLIEDTECEDEVLEEYLLQHLGEEEXEDIVESTIPEVGA

SEQ ID NO: 52881 - protein, 178 aa, Clostridium difficile
LSSNSSTYRVLDIIGDVAFYFMPIILAINAAKKFNVNTSIAVIVVGVFLHPNFSAWVSSGDPISFIGVPIQGVIYAASVIPALLTVWMMSYIEKFIDKLTPSMLKTILNPTLVLLISAPIALIVIGPIGNFLGEGLASIINLLQGRLGFIMVCLLAAAMPFIVMTGMHHALTPIFISA

SEQ ID NO: 52882 - protein, 32 aa, Clostridium difficile
NPHLNLWGNVRVQVGDKGYNDTSAMLGVKYTF

SEQ ID NO: 52883 - protein, 186 aa, Clostridium difficile
MARDKVQKEAFRNAMFVNKSMNKDAVGQSVHTIAKIAGVEIPEDTKIIVIEADGPGEEDIIAKEKMCPVISAYKYKSFEEGVAIAKANLNVEGKGHSVSIHSNTVKNIEYAGENIEVSRFVINQCCATSAGGSFFNGLAPTNTLGCGSWGNNSISENLDYKHLINISRIAYYMPENEVPTDEELWG

SEQ ID NO: 52884 - protein, 122 aa, Clostridium difficile
  MISC_FEATURE (106)..(106): X=any amino acid
MLSALIHSAHSYPAMPLAGQLVHQRYVHPGPLVLRTGLLKFPTPATDRDRTVSRRSEPSSRTTLMGEQPNPWDLLQPQDVMSRHRGAKPPRRCGLLGEISLLSPGXLLSVERWPFHAEPPDH

SEQ ID NO: 52885 - protein, 293 aa, Clostridium difficile
MNFLSLAKTASTNSNITKRTLENMLDNFSDNIPNIIYAIIVFVIGIYISKIVRRMVSKFLIKYGMSKGVNNFIVYGIYISMLSIISLISLGIIGIQTTSVVAVLGAAGFSIGLAFKEILSNLGSGMIILFFKPFNIGDYIQGSGVEGTVSDIQIFSTVLKTPDNKTIIIPNFQLTSNNIINYTHQNKRRIDFSYNISYDSDIDVVKSTLNEIFTNEKRILNDPKPIIGLNSIGNNTMQIVARPWVKTDDYWDVYFDVMEKVKNKFDENDIKVPFVPSSLLFNNTGNLNTMDKR

SEQ ID NO: 52886 - protein, 423 aa, Clostridium difficile
MLDIKRIRENLDDIKKAMERRGEREFDLDAVVELDNKRREILQEVEVMKNELNVNSKKIPQLIKEGKDVTEEKARLKELSDKIKGIDEKVKEVEAKMEYTLMRIPNVPHPEVPQGETDEDNVQIRTWGEPTKFDFEHKAHWDIGTGLGILDFERAGKITGSRFTLYRGLGARLERSLMNFFLNTHTAKHGYTEVLPPFMANRNSFIGTGQLPKFEEDMFKIEGLEYFLIPTAEVPVTNIHANEILDVAELPIKYCAYTPCFRSEAGSAGRDTRGLVRQHQFNKVELVKFVKPEDSYNELESLTHDAETMLQMLGLPYRVVKICTGDLGFTAAFKYDLEVWMPSYNRYVEISSCSNFEDFQARRAGIRFKRDKKSKAEYVHTLNGSGLAIGRCLAAILENYQQADGSVVVPEELRPYMGVDVIK

SEQ ID NO: 52887 - protein, 552 aa, Clostridium difficile
MLKRGKKMHKALYRAYRPQKFEDVIGQDHIIKTLKNQIYSDNIGHAYLFCGTRGTGKTSTAKIFSRAVNCLNKINEEPCNECEICESVLKDNTMDVVEIDAASNNSVDDIRELRESVKYSPANAKYKVYIIDEVHMLSQGAFNALLKTLEEPPSYVIFILATTEPHKIPATILSRCQRYDFKRVTVKDMTLRMKKICEDEGIDIDDKALNLIARNSQGALRDALSILDQCMSFGESKIDYKDVVELMGSVNIEQLFELSQCIVEQDTKKSLEILNEFVLWGKDIRNLINDLIDHFRNLMVCKVSSELDEIISLPEETIEQLKIQSKNIDINDLIRILNILSITQDDIKSSSNPRVLVEITIMKIAQPMFDESKEALIKRVENLEKMIELGNFKSEKIGNNKEKEYEVDREIDVKQENVVYEDVKNEDVILIESSWKNILKQIKKDKKMPIYALLSEVKSFNVYSNMLYVIFDDKFDFAKTRLSSQDTINYLEKTIRDVLNRSFNVKIVLTSEVKDINLEVKEKKDIGEEILKNIVSEEILEIKDSIDENESK

SEQ ID NO: 52888 - protein, 126 aa, Clostridium difficile
MKISLGGIVFMAKKGFGGGMMPGGGNMNNLLKQAQKMQENMQKAQQELESKEVEASVGGGAVTVKVNGKKEVIDITIKPEVVDPDDIEMLQDLVLSAVNQALRNIDDIQASQMSKVTGGMNIPGLF

SEQ ID NO: 52889 - protein, 202 aa, Clostridium difficile
MVFMQVYTGPITRLIEEFSKLPGVGRKTAQRLAFHIINMNTNDVEALSKAIIDAKREIRYCSICCNITDTDPCSMCSNKSRDSSVICVVEDPRDVAAMERTREFKGQYHVLNGVISPMDGIGPDMLKIKELIQRLGNQEVKEIIMATNPTIEGEATAMYIARLVKPMGIKVTRIAHGLPVGGDLEYADEVTISKALEGRREI

SEQ ID NO: 52890 - protein, 401 aa, Clostridium difficile
MSKKVLIMSASTGGGHNRAALAIKEELTSKTLDGEPIECEIIDSLKLVNNTMDKIISRGYEKSAIYTPKAYGSVYRLSETNLLSKNEFKDNLLITFMAKKFKKLIRSEKPDLIIGTHPFPMIALSTLKKNFNLHNNESNAYTEHFYKHYTNTINVPPLISVLTDYTTHSTWIQNEIDYYIVGHEYVKELLVFDGVEPSKIRTFGIPVEKSFLSHRDKDIVLSELNLSPDKLTVLLMGGSFGAGNIKETLDELLDTDRDFQILVITGKNESLKEKIEKKLMSRYHDKNVCVLGYTDKMNDILASIDVLVSKPGGLTTTEALLKDVPMIVPYYIPGQEEENLDFLSNCGAALRTTKKYNLSILLKVLIDDPSRLEMLKRNIKSIRKSNSAQNIANLILNIISG

SEQ ID NO: 52891 - protein, 207 aa, Clostridium difficile
LRKLRPKMQMLYQDPYSSLHPRLYVEHIISELVIVHNLVPKNEIIDHILNVVETCGLDKYQLNSKPGEFSGGQRQRTGIARALALNPAFIVCDEPVSALDVSIQSQIINLLMDLQDKYKLSYLFISHDLSVVNHIAHRVCVMYLGSIIEIATKGELYLHSQHPYTKALMSAVPIQDPTIKKNRIILKGDIPSPTNPPSGCKFHTRCP

SEQ ID NO: 52892 - protein, 92 aa, Clostridium difficile
MIDNKYTTYSNPLTDRYCSKDMSYIFSPQFKFSTWRRLWVALAEGEHELGINITEEQLDELRANIDYIYFDEARRIEKEVTHDLLFYVLSYC

SEQ ID NO: 52893 - protein, 336 aa, Clostridium difficile
VTDLVNTINGIVWSPVLVAMCLCIGLYFSLKLKFFQIRDVKEMFTLLLEGDSSHVGISSFQGFATSMAGRIGTGNIAGVAVAIAMGGPGALVWMCIMATLGSATAFVESTLAQIYKDEHDGQYRGGPPYYFEKGLGWKKCSVLFSIVAIISYTFFMPGTQSNTLYLAMNQAFGFSKMTIAVASSIALAIIIFGGIKRIGLFAEKVVPIMGGAYLIMTLVIIITNISLVPEAIVTMFKSAFGFGSVFGGMLGSAISWGVKRGIYSNEAGEGSGTYGAAAAEVSHPAKQGLVQAFSVYVDTLLICMATGIMIVITGMYNVTGVCTALPGVEPGPQYVQ

SEQ ID NO: 52894 - protein, 119 aa, Clostridium difficile
  MISC_FEATURE (43)..(43): X=any amino acid
  MISC_FEATURE (46)..(46): X=any amino acid
  MISC_FEATURE (51)..(51): X=any amino acid
  MISC_FEATURE (66)..(66): X=any amino acid
MADDIEKECMNYEASIDAAGGIDVQVLGIGRNAHIGCNEPDTXIAXRTHVXELTESTIEANARFFXSREDVPKKAVSMGIGSILKSKKILLLASGEEKADAVYNTVYGDITPEVPGSLL

SEQ ID NO: 52895 - protein, 120 aa, Clostridium difficile
MLEGFDIEIIEKHHNRKEDAPSGTATMIANAIREVLPESENTHGRYGRDCKRKPNEIGIHSIRGGNIISDHDVIFAGDNEVLTLSHHSQSDEVFANGSIVAAKFLIGKQSGLYKMSDILG

SEQ ID NO: 52896 - protein, 329 aa, Clostridium difficile
MLLLKKDDIKKVFTMRDAIEADKEAFRIYCEGKSVNPLRTNISVPSQDASMLFMPGYVEELGCGGIKIVSVFPKNAQKGKPVIPATVLLLDGETGEVSAVLDGTYVTQIRTGAASGAAIDVLAKKDSKIGALIGLGGQGEPQLEAMIEARNLDEVRVFSRNKESREKFAEEMNLKLSKYNTKIVAVESSDEAIDNADVIVLATPSKQPVLNGNLVKKGALISAVGSYMPDMQELCPNCLTRASKIFFESTDAVLSESGDILIPLKEGKISKDDFSGDLGNVINGTIPGREDDDEIIVFKTVGIGVQDVVTAKRIYDKAKENGIGIDWKW

SEQ ID NO: 52897 - protein, 172 aa, Clostridium difficile
MRFPDDPYLDYGLIDEGIKYLKFKVDEQDFGVELEKIIEITGNQEIIFIPELPTYSKGIINLRGKIIPIIDMRLRLKKDELMTTNCMYIVVTEIKDLVVGFVVDRVDDIVSLEKSKISPPPRVTIEYSDYFVSGVGELEGKIITLLDLEKLLTDKDEVLIDELINGFDCTIM

SEQ ID NO: 52898 - protein, 326 aa, Clostridium difficile
MFKRGLYMKNKQQGTILVVDDSVLMCDLIDKTLTKDNFKVKKAFNAIEAKEFIEEFIPDIILLDIILPDNSGFEFCKEVKSNARTADIPIIFITSKNTDTDIVKGFGVGAIDYMVKPFSMTELKARVIAHLEVKKSQDKLKKINDELESSLEKLNRLVVRDYLTGLYNRRHIINQLMEQRRINKYSETSISLILGDIDDFKVINDTYGHEAGDFVLTVISSIIKKNCRQIDTVSRWGGEEFLIMLTNTPIEGAKILSERIRKEIKEFDFNYKEHKIKCTITLGVVEVNSNISLEENISLADKAMYEGKNLGKDCSVVSTMKGLKKI

SEQ ID NO: 52899 - protein, 305 aa, Clostridium difficile
DYTAVGNRSANTITITVSGTASQSIQNDLNNVSVLVKAGAVSGTGATDSIANTTFEIKKYVAPAIGQLTFDATDKQIKMASGDKTVDPSDDTYVLTLTKGTAKDGDVKANVEVTGLPSGLDYTAEGDSSTNTITITVSRTASQAVQTDLDNVSVLVKAGAVSETTATDSAANATFEVKKYVAAPAVGQLTFDATDKQIKMASGDKTVDPSDDTYVLTLTKGTAKDGDIKANVEVTGLPSGLDYTAEGDSSANTITITVSGTASQAVQTDLDNVSVLVKAGAVSETTATDSAANATFEVKKYVAAP

SEQ ID NO: 52900 - protein, 466 aa, Clostridium difficile
METQSNNKKGNLIIAIVMTGAFISSLSQTLLSTALPNIMSDFKITADIGQWLTTIYLLIAGIIVPTTAYLINRFSTRKLFITSMSIFSIGCIIALFSNNFSTMLIARVLQAMGSGSLMPLLQVIILYLCPEEKRGAAMSLVGITVGFAPAIGPTLSGWLVDSFGWHSLFLFLSPIAILDVILSFILLRNVGETQKLKLDIPSIVLSSLGFGGLLIGFTNQGNYGWTNIATYLPILIGIMSLILFTLRQLKSKEPFLELRVFKNKPFLISTILIMIVYASMMSATLMIPLYVQSVRGFSALSSGSLMLPGAILMVVLNPIAGRHLDKYGPHALSILGTGCLLLGTLSFAFLGRDTSLIHVSLMYCIRMIGISMVLMPLTTWGIKTLDRELISHATAINNTLRQISGAIGSAILITIMTSATKKAHMSSNMLSNIHGIDVAFSIAATLAFTGLIVSICFIKRHQIIRS

SEQ ID NO: 52901 - protein, 608 aa, Clostridium difficile
MLTQKITPEGDNMNDIKDIIEEIKARCDIASIISEYMNIKQSGANYKGLCPFHGEKTPSFYINTSKQIYKCFGCGEGGDVINFVMKMENLDFMDAVKILANKCGIEINTNMNEETRIKIEKSKKFQDIHTEAARFYLSNLLGSKNLGYEYLRIRGLDDKIIKKFGLGFSLDSWNSLMNTLISKGYKKQDLLECGLIAKNRDGTNCYDKFRNRVMFPIFDYRGNIIGFGGRVLDDSLPKYLNSPDTLIFNKKQNLYGLNFARKNLESKTIVLVEGYMDLISLYQYGIKNVVATLGTALTEQQGILIKRYADTAIISYDSDEAGIKATLRAIDILTKLGINVKVLDLKDAKDPDEFVRKYGLSDYKKAMDVSTHYIKYKIDHLKKEFNIQKDEERVKFAKEASKIIKQLTSPVEIDFYTKYLSNQIDINVESIKREVYGKNYNKPYNNKNQKKIEEKVIEKVEVRQDGKQLVEETLIKIMLEDKKIREIALLKVEESDFLLKESKEILNYMIKNQELDKITIDKLKSLNISEEYLKELNSISLNSINLENTKEIEGIITNIRKNSLEEQINSLLREQQELENNNDMKEVDGRVMEIALKIVEINKILKSL

SEQ ID NO: 52902 - protein, 361 aa, Clostridium difficile
MSEKEVADLNSDSTDLNYRVLYPNLNPKYTFDTFVIGNSNRFAHAACVAVAESPAKAYNPLFLYGGVGLGKTHLMHAIGHHIVSQKKDSKVVYVSSEKFTNELINSIKDDKNEEFRNKYRNVDVLLIDDIQFIAGKERTQEEFFHTFNTLHEANKQIIISSDRPPKDIPTLEDRLRSRFEMGLITDIQAPDFETRIAILRKKAQLERIDVPNEVMSYIAKNIKSNIRELEGALTRVVAYSSLSNRVISFDLATEALKDIITTSKNEEINVLRIKEKVSSVFNLKMEDFNSKKRTRSIAYPRQIAMYLTRELTDLSLPKIGEEFGGRDHTTVIHAHDKVSKDIEESEEIKTKIDKIISDLKG

SEQ ID NO: 52903 - protein, 633 aa, Clostridium difficile
MKQEYGASQIQVLEGLEAVRKRPGMYIGSTSPRGLHHLVYEVVDNSIDEALQGYCSDIYVSINEDGSVLVKDNGRGIPVEIHPKTGKSTLETVLTNLHAGGKFGGGGYKVSGGLHGVGVSVVNALSKWMVAEVYLNGKIYKQTYEKGLPTSKLEVVGESQDKGTMIQFMPDETIFDEIEFKYETLEYRLRELSFLNKGIKIVFEDKREGQEKRKEFHYTGGLVEYIKYLNKSRTGIHDDIVYIDKKVDDCFVELAMQYTDGYTENIYSFANNINTHEGGSHLSGFKAALTKTVNDYAKRNKFLKENDVNLLGEDIREGLTAVVSVKLPEPQFEGQTKTKLGNSFMRGIVDSVTVDELGSFLEENPSTARIIVDKALRAQRAREAAKKARELTRRKSVLESTSLPGKLADCAEKDPSKSEIFLVEGDSAGGSAKQGRDRNSQAILPLRGKILNVEKSRLDRILSSDEIKNMITAYGCGIGEDFDIDKARYHKIIIMTDADVDGAHIRTLLLTFFFRYMRPLIDEGYVYAAQPPLYKVTKQKKEHYVYSDKELNILLDEIGRNGVELQRYKGLGEMNAEQLWETTMNPETRTLLQVTVEDAAIADEVFSMLMGDKVAPRKEFIEENARFVRNLDI

SEQ ID NO: 52904 - protein, 808 aa, Clostridium difficile
MEENNKILPIEIAEEMKKSYIDYSMSVIAGRALPDVRDGLKPVHRRILYSMSELNLTPDKPYRKSARIVGDVLGKYHPHGDTAVYYAMVRMAQDFSTRALLVDGHGNFGSVDGDSPAAMRYTEAKMSKLSLELLRDIEKETVDFKPNFDESLKEPSVLPARYPNLLVNGSNGIAVGMATSIPPHNLAEVIDATVYLIDNPECSVDDLIKFVQGPDFPTAAIIMGKESIAEAYRTGRGKVKVRSRAFIEELPKGKQQIIVTEIPYQVNKAKLVERIAELVKEKRIEGISDLRDESNRNGMRIVIELKRDANANIVLNNLYKHSQMEDTFSIIMLALVDGQPRVLNLKQILYHYIKHQEDVVTRRTKFELNKAEARAHILEGLKIALDNIDAVISLIRASKTGQEAKLGLIEKFKLTEIQAQAILDMRLQRLTGLERDKIEAEYEDLIKKINRLKEILADERLLLNVIKDEITIIKENYSDERRTEIRHAEGEIDMRDLISDEEIAITLTHFGYIKRLPSDTYKSQKRGGRGISALTTREEDFVRHLVTTTTHSRLLFFTNKGRVFKLNAYEIPEGKRQAKGTAIVNLLQLSADEKIATLIPIDGNDENEYLLLATKKGIVKKTKREEFKNINKSGLIAIGLRDDDELIGVELTDGKQEVLLVTKEGMSIRFDENDIRYMGRTAMGVKGITLSKEDFVVSMNLCSKGTDVLVVSKNGFGKRTNIEEYRSQIRAGKGIKTYNISEKTGTIVGADMVNEDDEIMIINSDGVLIRIRVNEISLFGRVTSGVKLMKTNDEVNVVSIAKINIEEE

SEQ ID NO: 52905 - protein, 341 aa, Clostridium difficile
MKTRDFKFDLPQELIAQVPIEDRASSRLMVLDKETGNIEHKVFRDIIEYLNPGDCLVLNNTRVIPARLIGEKLETGGKIEFLLLKRTEEDTWQALVKPGKRAKVGTKFSFGNGKLIGEVVDLSDEGSRIIKFHYDGIFEEILDELGNMPLPPYITARLDEKERYQTVYSKHNGSAAAPTAGLHFTEELLNKIKEKGVDIAFVTLHVGLGTFRPVKVEDVLNHKMHSEYYMVSQEAADKINRAKENGKNVICVGTTSCRTIESACNEDGKMKETSGWTEIFIYPGYKFKVLDKLITNFHLPESTLIMLVSAICGKDNVLNAYNEAVKERYRFFSFGDAMIIK

SEQ ID NO: 52906 - protein, 301 aa, Clostridium difficile
MEGYKMKLGFIGLGIMGKPMAKNLLKDGCNLLVYDINKSAVDELISCGAKYASVLEMGQECDIVFTILPNGTIVQDILFGMDGLAKTLKEGSIVVDMSSVTPTESILCANKLKDMGLEFIDSPVSGGEPKAIDGTLAFMAGGKEEIYKKVEPFFNIMGSSSILIGDNGSGSVTKLTNQVIVNLTIAAVSEAFVLAAKAGADPEKVYKAIRGGLAGSTILDAKIPMIMNRDFKPGGKISINLKDIKNVMQTAHNLDVPLPMTSQLLEIMQTLKVHGHLEDDHSGIAQYFEKLAGVEIKKHDN

SEQ ID NO: 52907 - protein, 242 aa, Clostridium difficile
MKGDKKLTSICICDDEKQQRNMLNKIITREMDLWGYPYQIKEYSNGESLVYNLEHENYYIDIIFLDIELGKSNGVDIAKTIRKHSKDTIIIFVTGFSDYVFHGYDVGALNYILKPYKTEKICKVLKEALKKLEQWKENFITVQIGTNLCKINTKDILYFKSELRKLTVVTFDKTLEYYGKLNDMETVLPSNFIRTHQRYIVNLNHVDSITQTYAKVQNEKIPISRKKYQEVVGKFTRYMLES

SEQ ID NO: 52908 - protein, 177 aa, Clostridium difficile
MQYISYYHSPIGNILLASDNIGLTGLWFENQKYYAYNLDQEHQEKELPIFEQTKKWLDIYFSGKEPNFTPSLHMVGTPFQTTVWKILQQIPYGKTITYGEIAYKVAQQKGISKMSAQAIGGAVGHNGISIIIPCHRVVGTNGSLTGYAGGIDRKIKLLSLEKVSVQHYFIPKKGSAL

SEQ ID NO: 52909 - protein, 153 aa, Clostridium difficile
MKELAKEDLEDSREKLIDDIIEFSEFMGYKTIIVFDAYNVKNSREKVEKRKHITIVYTREHQTADSYIEKFITSLSKYDDVKVATNDYAEQQMILGKGATRMSARELKLELDRSKNKMKEKNIGLRKKIQRNWLEERLDKETLSKLENIRRKR

SEQ ID NO: 52910 - protein, 571 aa, Clostridium difficile
MKMSKMFMPTLKEIPADAEITSHQLMVRSGMIKKMTSGVYNQLPMGLRVFKKIEQIIREELNKKDCQEILCAALLPSELWKESGRWTAMGEEMFRLKDRTEREYCLGPTHEEAFTDIIRQEITSYKQLPLNLYQIQVKYRDERRPRFGVMRTKTFTMKDAYSFDVDDKGLDKSYQDMFDAYVSIFDRCGLENSPVQADSGAIGGSTSAEFMVKSEVGEDEVVFCSGCDYAANVERAESCNLASQKEEMKELEEVHTPGAATIKELEEFLKTSPDKFAKTLVYEADGKTVVVVVRGDREVNEIKVSNAIGSVIEFALATDDVVRKVTNAEVGFAGPIGINADYVFIDKEIVEQRNIVVGANKTEYHIKNANYGRDFEGIVGDFRNVQEGDKCIVCGKPLEIARGVEVGHIFKLGTKYSESMNANFIDKDGKSKPIVMGCYGIGVERTAAAIIEQHNDEKGIIWPLSVAPYHVVIVPANMKNEEQISIAENIYNDLQAMGVEVLLDDRDERIGVKFNDSELIGIPMRITVGKNINEGKVEFKLRHKEDKEIIDIEEINEKVKAEFIRNNVRLG

SEQ ID NO: 52911 - protein, 493 aa, Clostridium difficile
MNVRVRFAPSPTGFVHIGSLRTALYNYLFAKKMGGEYILRVEDTDQSRLVEGAIENMLNAMKWAGVNHSEGVILDDSGKVVQKGEYGPYIQSQRLDIYQEYIKQLLDSGKAYYCFCTKERLDEVRDAQRAAGETAKYDGHCKNLSKEEVEANIKAGIPYVIRLRLPENHTIKFTDLVRGDMEFNTNDLDDQVLMKTDGFPTYHFAVVVDDYLMKITHVIRGEEWVSSTPKHVYLYEAFGWEAPVFVHLPNILNKEKKKLSKRQGDVAVEDFKKKGYLPEGLVNYVALVGWSPEDNQELFTMEELEKAFSVERVSKSGGVFDTEKLNWVNQHYIKDGDDAYLTDLAIPFLIEDGFITEEEATNKYDFLKSMISVLKEKLQYVKEVTEHASIFFGDKIEVETEEGREFLRLEHIPTLIDALREKIEKTEVLNAEFVQAMLKEIQKEYKIKGKNLFMGSRIILTGQMHGPDLPKVMEVLGKETCLNRIAYVKNNIL

SEQ ID NO: 52912 - protein, 322 aa, Clostridium difficile
MYMSISKETLLEMYKRMNQARKFEEKVSWFFARGMVHGTTHLSVGQEASSVAAVMALEKGDLVSLTHRGHSQFIGMGIDLNKMMAELMGKETGFCKGKGGSMHIADIESGNLGANGVVGGGLTIAPGAALTQQYKKTGKIVLCSFGDGASNEGTFHEGINLSSIWKLPIIFYCENNLYGMSTSIKRHMNIESIATRAASYGIEGISIDGYNPIEVYETVQKAAEKCRRGEGPVLIESRTYRWLGHSKSDANVYRTKEEIESWKAKDPIEFLKNYLIENNLSNEDELDKIQEFAKQSIEDAVEFAQNSPNPKIESLLEDVYAD

SEQ ID NO: 52913 - protein, 313 aa, Clostridium difficile
MSEEMRRDENVIFMGEDIGIYGGAFGVSVGMIDEFGPERVRDTPISEAAIAGAAAGAAATGLRPIMEVMFMDFVTISMDAIVNQAAKMRYMFGGKAQVPMVVRCPGGSGTGSAEQHSQSLEAWFCHVPGVKVVAPSTPADAKGLLKAAIRDNNPVIFVENKLLYRKKGFVPEDDYVIEIGKADIKREGTDVTVITYGRMLQSVEEAAETLSKENINVEIIDLRTLYPLDKETIVKSVCKTGRVLICHEAAKTGGLGGEISALITESESFDYLDAPVKRICGKDVPIPYNPELEKAVVPRVDEIEEAIKSLIVR

SEQ ID NO: 52914 - protein, 348 aa, Clostridium difficile
MVANKIKATPAARSQARKDNIKLDRLIGSGENGRIHLVDVLNYLKDNKANTTPLARRIAEDLNIDLETIVGTGYNGKIRKCDVEKLTAKETIVSTNTSKSSEKKELKIENENSSMFNTVEGIFEKPNPMRATVAKRMSESYFSAPVFTFNIEVDATELKVLRAKLIDTVKESTGVKLTMTDLIVMAVSKILPNHQALNSAWTDEGIFRYKDVNIAIAVGLDEGLYVPVVKNANKKSLKEIAKESKELAEKVKTGKLMPADQEGNTFTISNVGMYGITTFTPIINMPSSAILGVGATQDKFVPVNGEAKIKPIMNLSLTSDHRVIDGTVAAKFLKDLKELLENPLSMLV

SEQ ID NO: 52915 - protein, 341 aa, Clostridium difficile
MKENIVMKSRVRLARNLNNYPFPNKLDKECAMEIIEKVKNAFINSNLEQKEEFDFYKIEDLDQSKKMLMVEEHIISPDLAENDKSAVIVKKDKTISIMINEEDHIRIQTICDDLNLEYAYSVANEIDDLLESSLEYAFNTKLGYLTSCPTNTGTGMRASVMMHLPALSQLGYMDELYKISSQIGIAIRGIYGERTEALGNIYQISNQLTLGRTESNIIENVSGLTKDAISKEIKAREILQKKLGIKLEDKIFRSIGTLENSRVMSSAEAMSHLSNIKMGIEMNYIDKLDLRAIEQLMIGIQPAHQSIMYKSDDVENRDINRATYIRETLEKLRGGMNCELQ

SEQ ID NO: 52916 - protein, 164 aa, Clostridium difficile
MLCQKCNKNKASVYYNKIVNGEKTEMYLCSECAKENTEMNFNLDMPFSMMDIFSNLGFQPKKELEEKLVCPKCNTTYSEFKNNGRFGCSECYNAFSSQVNPMLQNIHGHIEHTGKAPKKSFYKISVENEIKELKEDLDRAIKNEEYELAAQFRDKIKYLKGSID

SEQ ID NO: 52917 - protein, 1143 aa, Clostridium difficile
MLKKFNKILVANRGEIAIRIFRACSELGIKSVGIYSKEDKYGLFRTKADESYLIGEGKGPIDAYLDMDGIIDLAKRKKVDAIHPGYGFLAENAEFARKCEENGITFIGPSSKVMNMMGDKINSKKIAKEVNVQTIPGVEKAIRSTEEAKEVANKIGYPVMIKASNGGGGRGMRIVHREEDLELEYETACSESRKAFGEDIIFIEKYIADPKHIEVQILGDNYGNIVHLYERDCSVQRRHQKIIEYAPAFSLDDKVRKEICEDAVKLSKHVGYSNAGTLEFLVDANGGHYFIEMNTRVQVEHTVTEMVTGIDIVQSQILIAQGYSLDSEEINIKSQDDVEIRGYSIQCRITTEDPKNKFMPDTGKIQVYRTGSGFGIRLDGGNGFTGANISPHYDSLLVKTISWDRTFQGAINKTIRSIKELRVRGVKTNVGFLVNVLNNPIFSNGKCSTKFIDENPDLFEITESKDRGTKLLQFIGDVIVNDNACKEKPLFDALHDPRMDKDGSKSEGSKILFDKLGKSAYIEKIKNDKKLLLTDTTMRDAHQSLLATRIRTYDLLKAAKPTEKYQKDLFSLEMWGGATYDVAYRFLKESPWRRLQKLREEIPSIMFQMLLRASNGVGYKNYPDNVIEEFTKESARQGIDVFRIFDSLNWVENMKPSINTALETGKIVEATMCYTGDILDKTKTKYNLEYYIKMAQELESLGADIIAIKDMSGLLKPYSAYTLVKELKKNVKAPIHLHTHDTSGNGVATCLMASEAGVDIIDAALESMAGLTSQPSLNAIVEALKNTERDTGIDLFGYDELGKYYKDLRKVYNKFESDLTNSCAEIYNFEIPGGQYTNLKPQADSLGLVNRFDEVKEKYKEANEVVGDIIKVTPSSKVVGDLAIFMTKNKLDKDNIIEEGKNLSFPDSVVDYCKGMIGQPEGGIPKDLQEVVLKGEEAITVRPGSLLPAEDFDEIAKYLNEKYDINANIRNVISYALYPKVYEDYIKHLQHYNDISKLESDVFFYGLNKNEECEVEIEEGKVLTIRLVEIGEVKENGFRTIGFELNGMVREVEIKDKNFSGKINNVEKADMNDPLQIGASIPGKVIKIMVKEEDEVKANQPLIVIEAMKMETIIVAKTDGVIKSIKVKEDDMVEDKQLLMIMK

SEQ ID NO: 52918 - protein, 122 aa, Clostridium difficile; identical to SEQ ID NO: 52853
  MISC_FEATURE (106)..(106): X=any amino acid

SEQ ID NO: 52919 - protein, 148 aa, Clostridium difficile
  MISC_FEATURE (68)..(68): X=any amino acid
  MISC_FEATURE (126)..(126): X=any amino acid
MGSFRPVAGIRHLHRNTISPSLLLRQCPNRYAFRAGRNLPDKEFRYLRTVIVTAAVYWGLSSLLRLLXQIPLTFQHRAGVSSYTSSCDLAETYVFGKQSLGPILCGHLMVAPLIPKLRGHFAEFLXQQFSRWPLGYSPHPPVVGLRYG

SEQ ID NO: 52920 - protein, 131 aa, Clostridium difficile
  MISC_FEATURE (20)..(20): X=any amino acid
  MISC_FEATURE (104)..(104): X=any amino acid
  MISC_FEATURE (124)..(124): X=any amino acid
GISTCCPSPTPFGLSLGPDXPRADEPSPGNLGFTACGILTHILATHANILTPILSTCPYGHASTRMGSSPTHHYDAVASVVSFSPGNLRRRITRPVSYYALFEXVALLSQHPGCLCNPTSFTTXLTFRDLS

SEQ ID NO: 52921 - protein, 457 aa, Clostridium difficile
MAKIKTKYVCQSCGYETAKWLGKCPECTKWNTFVEEIDQKSTKKEVFIIDKSSSKPVSINSIESKEEERFTTDINELDRVLGGGIVKGSLVLVGGDPGIGKSTLLIQVSSNVANLGKTVLYITGEESESQIKMRAKRLGINSENLYIFAENNLSIIESYLESVNPELIILDSIQTVFSPEISSAPGTVSQIKEGTSKFMKISKKMGISTFIVGHVTKEGSLAGPKLLEHMVDTVLYFEGERYNTYRLVRAVKNRFGSTNELGVFEMRDLGLVELDNPSKILISEKPKDVAGSVIISTVEGTRPMLLELQALVSPTSFGIPKRTSTGVDYNRVGMLLAVLEKRVGLQIQNQDVYINIVGGIKINEPSIDLGIAISVASSFRNIPIDEDIAVTGEVGLTGEVRAVSFIEKRIAECKKLGFKKIVVPRSNYDVVKETKGIEIWPVDNLRQAINIVLGRNQ

SEQ ID NO: 52922 - protein, 815 aa, Clostridium difficile
MNFNRFTQRAKKAIDLAFESAKSLGHNIVGSEHILLGLLREEEGIAAKVLSKVGFTEAYLEGKIVDMEGKGEEISEDIVLSPRSKQILELSGMFANKLKTNYIGTEHILLAIIQEGEGIANKILNYAGVNDRTLAQLTIDMMGISDKNQYKAENSYTGNQNQAESKVLDKYGRNLTLYAKQNKIDPVIGREKEIQRVIQILSRRTKNNPVLIGDPGVGKTAIAEGLATNIALGNVPETLKNKTLYSLEMGSLLAGAKYRGEFEERIKEVVDEVVKNGNIILFIDEMHTIIGAGSTGEGSIDASNILKPALARGEIQVIGATTIDEYRKHVEKDSALERRFQPVMVDEPTKEDSIKILEGLRDKYEAHHKVKITDDAIKAAVELSTRYISDRYLPDKAIDLIDEAASKVRLKENTPPSEIKKLELEIENIDKEKEEAVRCQDFEKAAKIRDEQGLLKKQLEDVRERWNKSSKHSDLVDGEVIAEVVGLWTGIPVNKILEEEADRLLRLEEILHNRVIGQEQAVKSISKAIRRSRAGLKDPNRPIGSFLFLGPTGVGKTELSKALAEVQFGDENQIIRIDMSEYMEKHAVSRMIGSPPGYVGHDEGGQLTEKVRRNPYSVILFDEIEKAHPDVFNILLQILDDGRLTDSKGRTVDFKNTIVIMTSNVGASTIGRQKTLGFSIAKGDEEEKSQYEKMKENIMGELKQRFRPEFLNRIDDIIVFHSLNENHISKIVLLMAAKLQERLKEMDIKLEMSDEAVKLISKSGFDLEYGARPLKRALQKELEDELSEAILKGNVKKGSNVVAKVKDEKIVFETK

SEQ ID NO: 52923 - protein, 610 aa, Clostridium difficile
MCGIVGYLGSRKAAEVIVEGLSKLEYRGYDSAGVAVNSSNEKELNIRKFKGRLSVLAEDLEKNPIDGNLGIGHTRWATHGEPSDVNSHPHFNQAKTIAVVHNGIIENYMEIKEELISEGVKFESQTDTEVIAHLVDKYYEGNLLDAVYKTISKLRGAYALGVICKEHGNELVAVRKDSPLVVGVGEGENFIASDIPALLKYTRDVYFLENGEVVHLKDENVTVYDSNRNLVEKEVFHVTWDVEAASKGGYDYFMSKEIHEQPTGVRETLERRLDDNGNIILDSINISKEDLEKINKVYIVACGTAYNAGLLGKYAIEKFVNIPVITDIASEFRYSDPFVDENSLVILVSQSGETADTLAVLRDSKAKGARILSITNVVGSSIARESDDVFYTWAGPEVAVASTKAYTTQITSLYMIALDFAIKKGTITREFYDSMISKMKEIPSKIQEILDNEEYIKEVAKTVVSSEHAFYLGRGIDYSLAMEGSLKLKEISYIHAEAFAAGELKHGTIALIEKGTPVIAIATQEKLFEKMVSNMEEVRARGAYVVAIAQSHNKDVEKAADKIIYIPNSDDILSPILAVVPMQLLAYHVSVLRGCDVDKPRNLAKSVTVE

SEQ ID NO: 52924 - protein, 468 aa, Clostridium difficile
MNYKNIIQITSFSIMKGESLVRKYFGTDGVRGVANTELTCDLAYKLGRAGGFVLAQGDHRVKVVVGKDTRISGDMLEASLIAGLMSVGCDVITVGIIPTPAVAYLTRKYGADCGVVISASHNPVEYNGIKFFNKNGYKLDDEIELKIEEYIDDIDKIDCLPIGENVGRKLHEHCAQRDYVDYLKSIISTDFKGLKVVLDCANGASYKVAPIVFDELGASVISINSSPDGNNINYKCGSTHPEQLQRAVLEHNADLGLAYDGDADRLIAVNEKGQIVDGDHIMILSALNLKKNNKLAQDTLVVTVMSNIGLTIAAKENGINLSTTAVGDRYVLEDMVKNGYNLGGEQSGHMIFLDYNTTGDGVLSSLILANIILQEKKPLSEIASIMSQYPQVLVNATIKNENKNKYMEYPEIKTEIERIESILDGNGRVLIRPSGTEPLVRVMLEGKEEGQIKELATNLANLIQEKLS

SEQ ID NO: 52925 - protein, 448 aa, Clostridium difficile
MFTVNENLTNRKSKGDIQMSVIELVYAREVLDSRGNPTVEVEVVLEDGAMGRAIVPSGASTGAFEAVELRDGDKGRYLGKGVETAVANVNEIIAPEIEGMDAFDQPAIDAIMIELDGTPNKGKLGANAILGVSMAVARAAADEIGLPLFQYLGGVNAKQLPVPMMNILNGGEHADNNVDVQEFMILPVGACCFKEGLRMGAEVFHSLKKVLGEKGLACGVGDEGGFAPNLGSNREALELIVEAITKAGYKPGEDVMLGLDVAATEMYNKETKKYVLAGEGKELTAAEMVALYEDWSNNFPIITIEDGLDEEDWDGWKLLTEKLGNKLQLVGDDLFVTNTERLEKGIENGVANSILVKVNQIGTITETLDAIEMAKRAGYTAVISHRSGETEDSTIADLAVAVNAGQIKTGAPSRTDRVAKYNQLLRIEEMVGEQARYCGLKSFYNLKK

SEQ ID NO: 52926 - protein, 219 aa, Clostridium difficile
MKHILKTVDHTILKATTTWEDIKILCDEAVDMSVASVCIPPSYVKRASEYLKGKIKICTVIGFPLGYQTTATKVFEAKDAIENGADEVDMVVNISDIKNKDYDNIGKEIKEIKKAIGDKVLKVIIETCYLDEDEKIKMCEIVTMSGSDFIKTSTGMGTGGATLEDIKLMKEHVGKNVKIKAAGGVKSISDAEKFIEAGAERLGTSSICKILKNEDTTDY

SEQ ID NO: 52927 - protein, 399 aa, Clostridium difficile
MQNSMKQEPCDFSHGRFRTGIIFIGITSVMSAFLQIKENFIVVGFGSIPYNIVIIISIMLSTIFGPYILPIGAVVAMVVQLLFYMFFVKKTNYKYLYYLNFKDDSLIKLLALLSPVFIGVAVNQVNSLVDTTLASTLVKGSIPALTYADRLNGFVTGTFTASIVSVMYPMLSKLSAENNQKKFTSSVKSSINMIIISMIPISVASIFFATPVVRIIFERGAFDARATQMTATALIFYAVGMTAFGLRDILGKVFYSLQDTKTPMVNGIISVGVNIVLDLVLIKPMAHGGLALATSSSSIACILLLFLNLKRKVGYFGQDKIIKATLKSVVASLIMGVLSYFTYKFIFGILGVGTFNEFVSLAISVIVGGGIYTLLMTIFKVEEVDMILNIAKRKLHLKK

SEQ ID NO: 52928 - protein, 372 aa, Clostridium difficile
MIAVKKAYKFRIYPNKKQQELINKTFGCCRFVYNKYLAKRIDVYKNDKETFTYKQCSSDLTNLKKELNWLKEPDKFSLQNALKDLDNAYKKFFKEKAGFPKFKSKKINRFSYKTNFTNGNIMYCGQHIKLPKLGMVKVRDKQVPKGRILNATISKEPSGRYYVSLCCTDVDIEVFENTNNHIGLDLGIKEFCISSCGEFIENPKYLKKSLNKLAKLQRELSRKTIGSLNRNKTRLKVARLQEHIANQRNDFLQKLSTKLIKENDIICIEDLQVKNMIRNRKLSRLISDVSWSEFIRQLEYKANWHGRQIVKVGKFFASSQICNKCGYKNEEVKDLNIREWICPSCNETHDRDINASRNILKEGLRLITIQNK

SEQ ID NO: 52929 - protein, 135 aa, Clostridium difficile
MSKVAKATFYLMIVTIISKILGMGRELVLSSIYGTGLYTESYLTAMNIPNIIFAAIGTAIVTTFIPMYQDISSKQGEKQALKFLNNVLNIIVGICIVVAILGVIFSKQLVSIFAIGFEGERFLLTVKFTKILIKK

SEQ ID NO: 52930 - protein, 395 aa, Clostridium difficile
MRIIMKGVDDLIDEKELREKLIKSEKEGKPMIVKLGLDPSAPDIHLGHTVVLRKMKQLQDLGHQIVIIIGDFTGKIGDPTGKSKARKALTTEQVLANAKTYEEQIFKVLDKEKTIVRFNSEWLAKLNFEDVIKLAATITVARMLEREDFKKRYEGQMPISVHEFFYPLMQAYDSIALEADIELGGTDQRFNLLMGRSLQREFGMESQIVIMMPLIEGLDGKEKMSKSLGNYIGIDEEAGIMYQKSMEIPDELIIKYYNLVTDVHPDEVNKIESQLKEGSVNPRDIKMNLAREIVTLYHGEESAKEAEERFKSVFQKGQIPEDIQTIQVKEDGFDLIEVLVSNEIVKSKSEVRRLASQGGVKVNGEKVEDLSTIVKESELVVQIGKKKFVKIELVK

SEQ ID NO: 52931 - protein, 275 aa, Clostridium difficile
MKNTIQTFKNAKYEGKKLSMLTAYDYSIAKIMDECDINGILIGDSLGMVIKGEENTLSVTIDEIIYHTKAVKNGVKNALIVSDMPFLSYHVSIEDAVKNAGRLIKEGGAHAVKLEGGSNVIKQIESIVNAQIPVMGHLGLTPQSVNSFGGFKVQGNTSETARQLIEDAKLIEKAGAFSIVLEGVPTKIAEMVTNSISIPTIGIGAGINCDGQILVYQDMLGMFGDFVPKFVKQYANIGDIMKDSIKNYILEVNTGAFPQEKHSFSINESELEKLY

SEQ ID NO: 52932 - protein, 607 aa, Clostridium difficile
  MISC_FEATURE (458)..(458): X=any amino acid
  MISC_FEATURE (470)..(470): X=any amino acid
MSQKHKIINIAVIAHVDAGKSTLVDAFLSQSGVFRKNEVVKDCVMDSNDLEKERGITIYSKNCAINYEDYKINIVDTPGHSDFSSEVERVMKTVDTVILLVDASEGPMPQTRFVLQKSLEFGLKPILFINKIDKKDQRAEEVVNEVFDLFVDLNATDEQCEFPIIYGIAKQGIAKLEMDDDSEDLSPLFKTIVNHVEAYPNYDNEPLQFQISALAYDDYVGRLGIGRIYKGTLKNNTQVAICREDSVVSKGKVSKLSVYEGLKQVEVDEATSGEIVVIAGIPDISIGETICDLDSPLPMEMIKIEEPTLSMNFLVNDSPFVGKSGKFVTTRHLKDRLEKELEVNVGLKVEPLDTTDGYKVSGRGELHLSILLENMRREGYEVGVSKPEVLMHKEDGKLMEPIERVVVNCPEVYSGTIINELNMRKGMMESMSIEGDYVKIEFLAPTRGLLGYRSEFIXATRGEGTLVRSXEKFEEFKGEIPSRGNGVLIAQGPGVTMGYSLNALSDRAVMFVDPGVEVYEGMIIGMNSRKDDMVVNPCKNKKMSNVRASGSDDAIKLSPPRIFTLEEALEFIEDDELVEITPDSIRLRKRFLNEHDRLRYNKSRQGK

SEQ ID NO: 52933 - protein, 238 aa, Clostridium difficile
MVNLNDAYEIARYIKEVKKKTPVKVYVNTNSLHFQSTDKFKVFGSNGSYIFVGDYEDIMEVLDKHGNDITDTHVEYDRRNSAIPLKNTLSEHARIEPGAIIRDMVTIEKNAVVMMGAVINIGAVIGEGSMVDMNAVIGARGTLGKNVHLGAGAVVAGVLEPPSATPVIVEDDVLIGANAVILEGVRIGKGAVVAAGAVVTTDVEAGAVVAGSPAKVIKMKDEKTADKTKLMEDLRNLD

SEQ ID NO: 52934 - protein, 181 aa, Clostridium difficile
MINVIANRYAEALFQLGEEENSTDVLFKELEKVVDMMTKVSKDFYKVLKSPLVSKSEKKNLVEIIFSKEVSSNIKNFLKVLVDKDRISYLEDIELAYKELLNKKNNVIDGVAISAIPMSETDIKELEVKLSNKYNKNVTIENVVDKTILGGVLVRIGNEQIDGTVKTRLDKMKEKLSEVIS

SEQ ID NO: 52935 - protein, 72 aa, Clostridium difficile
MKENCMNKICKILNIKYPVIQGGMAWVATASLASAVSNAGGLGIIAAGNAPKEAIKKEIVECKKLTDKPFGG

SEQ ID NO: 52936 - protein, 211 aa, Clostridium difficile
GVNTAEIAGMLRTAINGDSVTTATIDDYKVDVNLKFKADTIDSLEDIKQLKVNSATGKEVPLGAFSDIKMADGLQSISRTDGDFSVNITATLDNLDAGTATKLALEKTNKMVIPKDYSIGVGGETEMMNESMASLGFSMVIAIALVYMVMVAQFESFSKPFIIMFCVPFAFVGVVLSLLVSGQSLSTVGMLGIILLIGIVVNNGIVLIDYI

SEQ ID NO: 52937 - protein, 131 aa, Clostridium difficile; identical to SEQ ID NO: 52920
  MISC_FEATURE (20)..(20): X=any amino acid
  MISC_FEATURE (104)..(104): X=any amino acid
  MISC_FEATURE (124)..(124): X=any amino acid

SEQ ID NO: 52938 - protein, 148 aa, Clostridium difficile; identical to SEQ ID NO: 52919
  MISC_FEATURE (68)..(68): X=any amino acid
  MISC_FEATURE (126)..(126): X=any amino acid

SEQ ID NO: 52939 - protein, 122 aa, Clostridium difficile
  MISC_FEATURE (106)..(106): X=any amino acid
MLSALIHSVHSYPAMPLAEQLVHQRYVHPGPLVLRTGLLKFPTPATDRDRTVSRRSEPSSRTTLMGEQPNPWDLLQPQDVMSRHRGAKPPRRCGLLGEISLLSPGXLLSVERWPFHAEPPDH

SEQ ID NO: 52940 - protein, 225 aa, Clostridium difficile
MKKLYRIVINIILVLVILYSGFNIYSKLTKYNHDTKISSELQKKEYKKEDLSKINSDFKFWLSVENTNINYPVVQSKDNSYYLDKDFYKKDSISGTLFMDYRNKSIDDKNIIIYGHNMKNKTMFNNLNKFKDADFFKKNNKIKITLNGKEFLYDVFSAYIVESDYDYLKTNFNNESDYQNYINDITSKSLYKSPIKVNSNDKIVTLSTCTYEFDDARMVIHGRLI

SEQ ID NO: 52941 - protein, 287 aa, Clostridium difficile
MEISGRTGLFALIGTPVGHSKSPVMYNYSFKKLDLDYRYLAFDITVDKVKEALLAIKTFNIKGANVTMPCKSAVTEYMDELSPAARIIGACNTIVNDNGKLVGHITDGVGYVRNLKENGVEVKGKKITIMGAGGAATAIQVQCALDGAREISIFNPKDDFYKRAEQTVENIKKDVPECVVNLYDLEDTNKLYEEIESSDILTNATLIGMKPYDNETNIKDTSVLRKDLVVTDVVYNPKKTKMIEDAEANGCKAIGGLGMLLYQGAEAFNLYTGLEMPVEEVNELCFK

SEQ ID NO: 52942 - protein, 707 aa, Clostridium difficile
  MISC_FEATURE (6)..(6): X=any amino acid
  MISC_FEATURE (18)..(18): X=any amino acid
  MISC_FEATURE (29)..(29): X=any amino acid
  MISC_FEATURE (37)..(37): X=any amino acid
  MISC_FEATURE (43)..(43): X=any amino acid
  MISC_FEATURE (54)..(54): X=any amino acid
  MISC_FEATURE (84)..(84): X=any amino acid
  MISC_FEATURE (86)..(86): X=any amino acid
  MISC_FEATURE (359)..(359): X=any amino acid
  MISC_FEATURE (385)..(385): X=any amino acid
  MISC_FEATURE (388)..(388): X=any amino acid
  MISC_FEATURE (396)..(396): X=any amino acid
  MISC_FEATURE (400)..(400): X=any amino acid
  MISC_FEATURE (402)..(402): X=any amino acid
  MISC_FEATURE (404)..(404): X=any amino acid
ICKFVXSTFKILRNIVIXVSTDIKNGIIXDRYKKKKXNDVNNXYDIRCSKFSKXLFRYHNQISNFAQCKYYNKIIDLRSEGFEXKXYNKKHCFKCHSKFFKTESKINEKLDGVLEKKFEKVEFNEAKYAELLKFNILFYKTLARNTEPLIGKWIVDKYIPEIDELEKDLELTTAKCRKYVNKAMKEGLDSLKANDLNSFLAYDKMELSERRRRLEKDYKVLNLYKDLLNISLRKISLEKKECGDLFLKNQADAKRELKREIIFCVNKILASNKDVVPNNVEENNEQDKVEIKATEIEDLQLGKDNSENDMLLNEIKNSKVKHESKSNDIESKFIDKLNSLNNEVYLKQYTMNIRSYVDXKNFILLKDMVLAKKLLKILLVQRLYXNFXREEIETLXKVQXDXLXLENLVLKILRNLWTMVIKNKTEISEDTWNKAQNLIKDNYSELENHEIASKRTRRNKDIDIEEYIYMIKNADKDICFRSSISIEDDAEEGVKEEIDSNNQDIGDVVEDKDTTDKEYDSNKEDIIEPENKKSKKKAKLFGFIKKDNEEVEQEEENLNDISPDIILDKPVENNQVKSEEIEQNELKEIKQEEPSQHIEEERSVKIEKPINNNLDEKVSSNNESKLEKESKNLEDKKAKEIKEEKLENEKSVVIPIKKKENSNKKSKNSSKDKYRENKKEMKNYVSDKEDSLDDEEVVSKKSRLKET

SEQ ID NO: 52943 - protein, 314 aa, Clostridium difficile
MKKKYKYGILIWYNRKFTKKGEKMQMTVKKAIIPAAGLGTRFLPATKSQPKEMLPIVDKPTLQYIIEEAIESGIEEILIITGRNKKSIEDHFDKSVELELELEQKGKTEMLEMVRDISNMVNIHYIRQKEPKGLGHAIYCAKSFIGDEPFAVLLGDDIVDSDVPCLKQLIDTYNEYKTTVLGVQKIAKEDTNKYGILDVKHIEDRVYKVKDMVEKPAIEEAPSDIAILGRYIITPAIFSILEKQTPGKGGEIQLTDALQTLGKQEAIYAYNFEGRRYDVGDKIGFLEATIDFALKRENLKDDLMDYMRKKVSEK

SEQ ID NO: 52944 - protein, 107 aa, Clostridium difficile
MDAKNNIVSKEFFEFGDVEAKLKESDFVVESSYKTQSQSHCMMETHRSYSYKDINDRIVVVSSLQSPHNVKRILRKVLGIPSSKIRVIKPRAGGGFGGECTRGEWNS

SEQ ID NO: 52945 - protein, 131 aa, Clostridium difficile
  MISC_FEATURE (20)..(20): X=any amino acid
  MISC_FEATURE (104)..(104): X=any amino acid
  MISC_FEATURE (124)..(124): X=any amino acid
GISTCCPSPTPFGLSLGPDXPRADEPSPGNLGFTACGILTHILATHANILTPILSTCPYGHASTRMGSSPTHHYDAVASVVSFSPGNLRRRITRPVSYYALYVXVALLSQHNGCVCNPTSFTTXLTFRDGS

SEQ ID NO: 52946 - protein, 148 aa, Clostridium difficile; identical to SEQ ID NO: 52919
  MISC_FEATURE (68)..(68): X=any amino acid
  MISC_FEATURE (126)..(126): X=any amino acid

SEQ ID NO: 52947 - protein, 340 aa, Clostridium difficile
MKNLLEIQKKLIPQAIELMERRYSILRQISLSEPIGRRTLSNVLEISERIIRSETEFLKEQGLIDVAVSGMTITKEGSDLLDKLKDIMSDIMGLSKLQDRVREKLGIKRVILVPGSCDENGSLLKDVTRYGCEYFLGILKDGDIVSITGGSTMLEFSNVIKTDKRYPNSTIVPARGSMGTDVEMQSNNIVASISKKLHSNCKLLHIPDELDESAMKTLSQVPEIKTTLEYIKRTDILVFSIGRADVMAKRRKLPEDKVDEILSKNAVGEAFGYYFNKDGEIVYKLNTVGIDLETVKQVKETIAIFAGTEKVEALLAISNMHKNMVLVTDEESAYKILSLL

SEQ ID NO: 52948 - protein, 189 aa, Clostridium difficile
MKKEFRKKVIESRKNKSANFVLSNSNLITEKLLQMEDIRNATNIMLYLNFNNEVQTDNLIKKLLSLKKIVSSPITIKENHTLIPTQITDLKEGLRIGAYGIREPNEKSPTIDIKALDVVIVPAVAYDIHCYRLGYGGGFYDRFLENLRKDAITIGIAFDFQIFDSIPKETHDAQLDYIVTETRIITPNS

SEQ ID NO: 52949 - protein, 167 aa, Clostridium difficile
VQEKLLALREAALAEIKEAQSIESVESLRVKYLGKKGEITAILKEMGKLSAEERPVVGKVANEVRENIELSINSKKEEINAIEKERKLKEEVIDVTQPGKVLKVGKKHPITQIIDEVTDIFIGMGFSIAEGPEVETVENNFDALNAPKDHPSRDMSDTFYINDGVLL

SEQ ID NO: 52950 - protein, 94 aa, Clostridium difficile
MKNEEQISIAENIYNDLQAMGVEVLLDDRDERIGVKFNDSELIGIPMRITVGKNINEGKVEFKLRHKEDKEIIDIEEINEKVKAEFIRNNVRLG

SEQ ID NO: 52951 - protein, 551 aa, Clostridium difficile
MRSDIKKGIEGAPKRALMYGMGLTKEEIERPLIGIVNAQNEVIPGHLHLDEIAEAAKNGVRMSGGLPLEFPAIGVCDGIAMGHVGMNYSLASRELIADSIEAMAMAHGFDALVLIPNCDKIVPGMLMAAARLNIPSIVVSGGPMLPGKKNGKVYDFNSAMEGVGACKDGTVSEEELEALAMNSCPGCGSCSGLFTANSMNCLTEALGMGIPYNGTAASHSGERKRIAKYAGMYVMELLKNDIKPRDILTIDAFKNAIAVDMAMAGSTNTVLHLPAIAYESGIELNLDFFDEISEKTPCLTKLSPSGKHHIEDLHMAGGIPAIMNELSKINGINLDCKTVTGKTIRENIRNCEIENEEVIHTLKNPYSNQGGLAILKGNLALNGAVVKKSAVAEEMLVHEGPARVFNSEEEAVNAIFGKKINKGDVIVIRYEGPKGGPGMKEMLSPTSAVAGMGLDKHVALLTDGRFSGATRGASIGHISPEAMEGGLIGLVEEGDIISINIPDKKLELKVDEVEIENRKLKFKPLEPKIKHGYLSRYAKLVTSANTGAVLK

SEQ ID NO: 52952 - protein, 283 aa, Clostridium difficile
MALVTTTSMLKKAQDEGYAVGAFNVENMEMVIAVIEAAEELNSPVILQTTPSTVKYAGLDYYLANAKVAAERVNIPVAMHLDHGSSFDLAMKALRSGYTSIMIDGSHESFENNISISKSVVKACSPSLIPVEAELGKVGGKEDDLDGGNSNDYTNPKEAKEFVDRTGISSLAIAIGTAHGLYKGEPKIDLDRLSEIKNVVSIPLVLHGGSGIHDDIIKEAIKRGIAKVNYATELRIAYSKGVKKVLDEDSEVIDPKKYGLAGLQSVKDFVKEKIKVCGSVNRV

SEQ ID NO: 52953 - protein, 61 aa, Clostridium difficile
MPMDLKIGDIVELKKQHACGCKEFEIIRTGMDIKIKCTKCSRLIMLDRETLEKRVKKLIKK

SEQ ID NO: 52954 - protein, 303 aa, Clostridium difficile
MIKKLDDILEQLKGGEKIVLSVAAAHDKEVLMAIKDAVERNIITPILVGNEGKIREISKEIGFDLSGIKIVDKDDIKECAEIAVKLVSSKEADFVMKGLLDTSVILKEVLNKDYGLRTDSLLSHVMVYELEKYHKLLITTDGGMNIAPDYEQKAKILKNSIKAAKALGMETVKVACLAAKEKVNPKMQATVDADMLAKACKEGEFGENVIVEGPLAFDLAVSKEASEIKGFKSEVSGDVDIILVPTIEVGNGIGKAFTYMADSKSAGIIMGAKAPIVLVSRADSHESKLYSIAYGAIVAKNMK

SEQ ID NO: 52955 - protein, 293 aa, Clostridium difficile
MAISMTGFGRGEYKDDNYYFLVECKTINHKYSDINIRLPRKISFLEDKVRNLVKNYVKRGRVDLYIKFDLLGKEDVNLNFDEGLASQYIDILKEIKNKFDIIDDISVMNVAKFPDIVKIEEKEEDEDLLWSMLNQAVEDALIKLREMRSEEGKKLAEDIAMRCDLLKNHIEEIEKYSSSVVEDYREKLNLRISELLDDPSIIDENRLAQEVAIYADKSSITEEIVRFKSHIGQLKNTIFKDDSIGRKIDFLIQEMNRETNTIGSKSSDINITNLVVEVKSELEKIREQIQNIE

SEQ ID NO: 52956 - protein, 238 aa, Clostridium difficile
MLLIAVKKGLKFVENLTKLNLDNYKPLRDVVFENLREAILEGKLKPGQRLMEVQLAEQLGVSRTPVREAIRKLELEGLVVMLPRKGAYVANMSLKDIMDVLEVRASLEGLAAYLAAERISDEDIKKLKDISEEFKKSTLESDVDALLKLDVEFHECIFKATNNKKLIQLINSLWEQVYRFRVTYMSAYDTSHNIVEEHKYLLDAIIKGDSELSKKYATEHIEKAEQFMIDKAMISKDL

SEQ ID NO: 52957 - protein, 259 aa, Clostridium difficile
  MISC_FEATURE (221)..(221): X=any amino acid
  MISC_FEATURE (233)..(233): X=any amino acid
  MISC_FEATURE (245)..(245): X=any amino acid
  MISC_FEATURE (246)..(246): X=any amino acid
  MISC_FEATURE (248)..(248): X=any amino acid
ILLFFQNLRNPILNFIFLVFTISTEAPLLILITTIIYWCINKKCGQKILFAIIGNFVVNLGIKEFVKAPRPIGIKGLESLRVSTAGGYSFPSAHTQTATTFWVSILTIFKKRYLHLIGAVMVLGVGLSRLYLAVHWPIDVIAGWILGIFFTVVFVKIFDYIDDNKNYILLVVLLIPFIIVAIFLNSPEYFEKFGIIVGFVFGYMVEDRFVKFNTDNNTKKXILVIKIRGVKIXFFQEYVGFWLGXXQXECYILALSCLF

SEQ ID NO: 52958 - protein, 281 aa, Clostridium difficile
MKLAVIGSGTMGSGIVQTFASCGHDVCLKSRTQGAIDKCLALLDKNLTKLVTKGKMDEATKAEILSHVSSTTNYEDLKDMDLIIEASVEDMNIKKDVFKLLDELCKEDTILATNTSSLSITEIASSTKRPDKVIGMHFFNPVPMMKLVEVISGQLTSKVTFDTVFELSKSINKVPVDVSESPGFVVNRILIPMINEAVGIYADGVASKEEIDEAMKLGANHPMGPLALGDLIGLDVVLAIMNVLYTEFGDTKYRPHPLLAKMVRANQLGRKTKIGFYDYNK

SEQ ID NO: 52959 - protein, 564 aa, Clostridium difficile
MRMNGAKVILECLKKEGIDTIFGYPGGAVIPLYDALYDYSDDFKHIRTSHEQGLVHAADGYARSTNTVGVCFTTSGPGATNAITGIATAFMDSSPMVVISGQVPTSLLGKDSFQEIDITGATLSMTKHNYLVRNTKELVPTIKEAFRVANSGRKGPVLVDVPKDLFLAEMDFSGEDYDLCQIDDYMDYKSDFDLDDETNIKLLNEAIDIIKESKKPVIYAGGGVKSSDSEEILEKFATKIDTPVLNTLMGLGNIDRKNELSLGMVGMHGSRESNLALSNSDLVIAIGARFSDRVISKSSEFAKNAKIIHIDIDPSEISKNIESNVSLVGDVKLVLSLLIERVESKNNSNWKEEIKRFRKSEGVQTYEFHPQNILKKINEKYETLKKPTVVVTDVGQHQMWAAKYWNFKGNKSFITSAGLGTMGFGLGAAIGTKVGNVDKNVVLVTGDGSFRMNCNELATVANYNVPMLILLLNNRTLGMVRQWQKLFSNQRYSQTDINENVDYVKLVNAYNIDGYKVSSMEELGKALDMIDFNKPVFLQCDIDKDYDVYPIVAPNDALENLICN

SEQ ID NO: 52960 - protein, 316 aa, Clostridium difficile
MNTSGSEIKIIAGNSSKELAQKIADYIGVSVLDCEVGTFSDGEICVNMNETVRGCDVFVVQSTNSPVNDNLMELLILIDALKRASAGRITAVIPYYGYARQDRKAKARDPITAKLVANLITAAGADRVLTMDLHAAQIQGYFDIPLDHLLGGTILANYFNEKKIEDLVVVSPDLGSVTRSRKFANTLNGEVPIAIIDKRRPKANVCEVMNLIGDVKGKNVILLDDMIDTAGTIVNAANALKEFGAKDVYACCTHGVLSGPAIERIANSEISELIVLDTIQLPEEKRIDKIKIKTVAPLFGDAIRMIFSNESVSKLF

SEQ ID NO: 52961 - protein, 423 aa, Clostridium difficile
MLDIKRIRENLDCIKKAMERRGEKDFNLDEVVKLDDERRKILQEVEVMKNELNTASKNIPNLIKEGKDVENEKIKLKELSDKIKVIDQNLKEVEDKMEYLLMRIPNVPHPEVPQGETDEDNVEVRTWGKTTTFDFESKAHWEIGTELGILDFETASKITGSRFTLYKGLGARLERALLNFYLDTNTKVNGYTEVIPPFMANRNSFLGTGQLPKFEEDMFKIEGLDYFMIPTSEVPLTNIHANEILKFEQLPINYTAYTPCFRSEAGSAGRDTRGLVRQHQFNKVEMVKIVAPEESYNELEKLTNNAETMLQLLNLPYRVVKICTGDLGFTASFKYDVEVWMPSYNRYVEISSCSNCEDFQARRAGIRFKRDKDSKTEYVHTLNGSGLAIGRSVAVILENYQQEDGSVVVPEVLRAYMGVSVIK

SEQ ID NO: 52962 - protein, 133 aa, Clostridium difficile
MFHQIEGLVVGKDVTMAEFKGTMDIFVEKLFGSDIKTKFRPHNFPFTEPSAEVDVTCFKCGGKGCPMCKYEGWIEILGSGMVHPNVLRNCGIDPEVYSGFAFGVGVERLAMLKYEIDDIRLLFENDMRFLNQF

SEQ ID NO: 52963 - protein, 262 aa, Clostridium difficile
MLVSLKWLRDYVDIDIDVKEFADKMTMTGTKVETIDYYGEEIENILVGKILEIKQHPNADKLVVTKVDIGDKVVQIVTGATNISEGDYIPVAVNGSKLPGGVEIKQTDFRGELSDGMMCSAAELGIDEHYIEEYKRGGIYILDHEDSYELGKDIKDVLGLKDALIDFELTSNRPDCKCMMGIAREAAATIGTKVKYPEIEVKESDEEIDFKVEIDNPDLCRRYVARMVTDVKIEPSPYWMQRRLTEAGVRPISNIVDITNFV

SEQ ID NO: 52964 - protein, 130 aa, Clostridium difficile
MAKIIVKKSNPLKGSVKIDGAKNAVLPIIAATLLANGKSTLNGVPNLRDVHVISDLLRHVGAEVEYKENTLTVDASNIKTCEAPYELVRKMRASFLVMGPLLARFNSTKISMPGGCAIGTRPIDLHLKGF

SEQ ID NO: 52965 - protein, 735 aa, Clostridium difficile
MHDKELQEIIEKIKVYAPNANFEMVEKAYNLAKKAHEGQYRKSGEPYFIHPLAVANILIEMELDIETITAGLLHDVVEDTEYTYEDIKKEFGKEVADLVDGVTKLGQIKYRSKEETQSENLRKMFLAMAKDIRVILIKLADRLHNMRTLKYMPPEKAKYKAKETLEIYGGIAHRLGISKIKWELEDRALRFMDPEGYYDLVSRVSMKRSQREDYIQGIVELLKDKFKDLSIPCDVYGRPKHFYSIYRKMQKKHKTFEEIFDLTAVRILVDNVKDCYAVLGIVHTLWRPIPGRFKDYIAMPKPNMYQSLHTTVVGPDGEPLEIQIRTHEMHNIAENGIAAHWKYKEGISSKESKVEEKLQWLRQMMEWEKDLKDPQEFMDALKEDVFNSQVYVFTPKGDVIELPAESTPIDFAYRVHTNVGNKCVGAKIDGRIVPIDYKLQNGNIVEVLTSSNSNGPSRDWLNIVKTPNAKSRIRQFFKKERREENVDRGNTILEREFKKHDIPQKDPLVEKYMALVAKKFNQPSVEDLIATVGYGGIMSSQVVSKVKDLYLKEVKKAKKEQQIQEEDLNKHNISETEYSKKRKKNASQGIIVKGLDNILVRFAKCCNPLPGDEIVGYITKGRGVAIHRADCPNANNNGDFFQNRLVEVSWSSAGKGKFEAEIQIKAIDRRGIVNEITHIVAMDKLSLNGINARKGKDSIVSINLLVEVNDTEELKILMKKLKAIPGVESIYRMTN

SEQ ID NO: 52966 - protein, 501 aa, Clostridium difficile
MMLLKLLCYTILNRKHLDTIILGGVKMKLTKSISSMLCLSLVLSLSPVAYANEISRTTVENTLVGQDRYQTAVEVSKKGWSSANEAVVVNSESIVDALAVTPFAKLKNAPILLTEKNNLNSQTEKELKRLGVKKVYIIGLSSSVSNDVQKQLESNNLTTDRVGGSDRYQTALSIAKKIEGLKDISEIAVVNGYTGLADAVSIASVAATNGMVILPVSDASGISSFKDFIESKNINKSYIIGSTNAVSDKIKQSLPNSERIGGADRNETNGKVIEKFYTSNKLNNVFVAKDGMKNQNQLIDALAVGVLASKENSPVLIVGEQLSATQKSVFSNKNATSITQVGSGGNENAFKELKDLQANSNNKRVMYVTNTDKVNIRNDATIEASVIGYLNNGDEVEVLDVLKTGWVKIKYNEGIGYVSGSYLTNNKPDNSNENIKIKYVKEKDGLNVRKGPSTEDEKIGHLSYGSKVETIEMFATGWVKIKYNGGYGYVSNDYLSDTPVI

SEQ ID NO: 52967 - protein, 816 aa, Clostridium difficile
MKKWILKYKGKIEESEFSKKLNISPEICQILKNRGICTEKDSEIFMNPSLDYLRDPFLMKDMQKAVDRIKLAVEKNEKIWIYGDYDVDGVSSTSILCLYFKSIGYNVDYYIPNRLEEGYGINEDAIKLISSRGCDLIISVDCGITSVSEVNTANDLGIDVIITDHHECQSEIPSAFAVINPKQEDCNYPFDSLCGCGVAFKMIQALTPKEEFKTSMYNYLEIVTLATICDIVPLIDENRIIVKNGLKSMKEGKNIGLRELIKVCGVESDKIGSSHIGFAIGPRINASGRLGYSYLGVELFTTQSQEEAVEIASILEEKNNERQMIEAKMYHEAEEMLKSNSRYNDDKVLVLAKEGWQHGIIGIVASKLTEKYYKPTILLGIENGEATGSARSIKGFNIFEALIKCKDLMTKFGGHEQAAGLSLDSDNVEILANEINKFADYNLTEDDMIENVNVEFELQENVINLNLVEELHKLEPFGLNNPNPRFIVRNYILKDLKVIGKNQQHLKLSIEKEKSYECIGFNMSHLKSMYKVGDKVDVLFQLDENNYMGNRKVQFLLKDIRLARPKSASNDKLSLKLMSKIIPKDTQSLYNISVSDFELFDGNTDINIFDYFEKDTLIISNSINGFYRAMSDISLIDLDFNINYNIIEDDSKNTDKLELIFSPNIDKIDLKRYNNIILYDYLYNKGEYSYIYENKREESEIIKYYNKTDLLYLKNVVSNIVPSRDEFITIYKQALIKKEIDLDMVNIRETFNVIPLKFFTILNVFRELNLLDFNLNYEKNSVLIRILPKPQKKLDLNESLILNNLKNLEKQYNSSY

SEQ ID NO: 52968 - protein, 595 aa, Clostridium difficile
METLKGLKRTHYCGELREKNINEEVVLMGWVQKKRNLGGLVFVDLRDTSGLCQIVFDTDVDKEAFEKAEKLGAEFVIAVKGKVCERQSKNPNMPTGDIEIFATELRLLNKSETPPIYIKDDDDVSEALRLKYRYLDLRKPSMQRNLKLRHKVMNITRNYLSNNRFCEIETPFLIAPTPEGARDYLVPSRVNPGKFYALPQSPQLYKQLLMVSGMDRYFQIVKCFRDEDLRADRQPEFTQIDCEMSFVEQEDVMSMIEGLLEAIFKEVLDVELALPLPKMTYAEAMSKYGSDKPDTRFGYELTDISDVVCNCGFKVFADATQPGKSVRGINVKGKADDFTRKQISSLEEHAKTYRAKGLAWMKVGQEGVTSPIAKFFNEEEMNAILTRMNAEVGDLLLFVADKNSIVFDALGQVRLEVANRLNLLDKNVYNLLWVTEFPVFEEDEETGTFSAMHHPFTSPMDEDLDKLEEGDKSSLRAKAYDIVLNGYEIGGGSVRISNSDVQSRMFKALGFTEERANEKFGYLLEAFKYGTPPHAGLAFGLDRLVMLLAGTDNIREVIAFPKNQNAVCPMTNAPTLAEDEQLEELSIKVDIKDNE

SEQ ID NO: 52969 - protein, 459 aa, Clostridium difficile
MSMIHKFSMNGYNIVLDVNGGAVHVLDDVAYDLLDFYKEKSKEEILEILKSKYQEEKINEAYEEILNLEKEGLLYTEDTYQYHPSFVHREPVVKALCLNVAHDCNLKCKYCFAAQGDFGGEKELMSFEVGKAAIDYLIANSGSRKNLEIDFFGGEPLMNFEVVKQLVDYGRSVEKDYNKNIRFTITTNGVLLNDEIIDYINENMHNVVLSLDGRKEVNDNMRPTLNDKGSYDITLPRFKKLVEKRSKDKYYYIRGTFTRDNLDFSKDVMHFADLGFKLTSVEPVVGDESNPYALREEDLPKIFEEYEKFAVEYADRQLQGDGFKFFHFMIDLNQGPCVIKRITGCGAGNEYLSVTPNGDIYPCHQFVGNEEFKMANIFDEEIVLPENLKNMFREAHVYTKEECKQCWNKFYCSGGCHANAINFNSDISKPYELGCEMQRKRTECSIMIQAKLMLEGATN

SEQ ID NO: 52970 - protein, 420 aa, Clostridium difficile
MLTKAPRGTKDITPKEAYKWRYVENKFREICALYGYEEMVTPIFEHTELFKRSVGDTTDIVQKEMYSFKDKGDREITLKPEGTAGVVRAFIENKLYADTQPTKLFYVTPCFRYERPQAGRQRQFHQFGIEALGSDTPSMDAEIIALAVQFFNEVGLNDLVVSINSVGCPVCRKEYNALLKEYLDSKADILCDTCNERREKNPMRVIDCKNPTCKENIKDIPFIADHLCDDCKSHFDKLQEYLKEMNINFVIDKTIVRGLDYYRKTAFEIISNDIGAQSTVCGGGRYDGLVEQLGGPKGISGIGFGLGIERLLLTLEGNGIEIENPQSTDIFIVTIGEEANTRSFKLLKDLRQNHISADKDHIERSVKAQFKYSDKINSKFTIVIGDDELKNDTATLKNMKTSEQTTVKLSTLVEELKQKL

SEQ ID NO: 52971 - protein, 414 aa, Clostridium difficile
MFENLKKADPEIYESMKRELKRQQRNIELIASENIVSVPVMETMGSHLTNKYAEGYSGKRYYGGCEYIDEVETLAIDRIKKIFGAEHANVQPHSGANANIGVYFAMLKPGDVVMGMNLSQGGHLTHGAPVNISGQYYKFYEYGIDKDSGLIDFDEVRKIAHEVKPKMIVAGASAYPREIDFKKFREIADEVGALLMVDMAHIAGLVAAGLHQNPCEVADFVTTTTHKTLRGPRGGVILCKEKYAKDIDKAIFPGIQGGPLEHIIASKAVCFKEALSDEFKEYQVQVAKNAKALAEELIKRDFKLISGGTDNHLILLDLTNKNITGKAAEKRLDDAYITANKNTIPFDPNGALVTSGIRLGTPAVTTRGMKEEDMAIIAEAIDLCLTYDEESKARTLVVGLTEKYPLYEEYNVMD

SEQ ID NO: 52972 - protein, 97 aa, Clostridium difficile
MEERKLAPNNEREALIKRLKRIEGQVKGIQKMVEQERYCVDILVQISAIRSAINRVGTIILENHIKGCVAESIKHDDADKTEEMIKELMDTINKFTK

SEQ ID NO: 52973 - protein, 322 aa, Clostridium difficile
DTIAAIATAPGEGGIGILRISGEKALKVAEEIFKSMSGKSIEEYNKRTLIYGNIVDNENIIDEVLLAYMKGPNSYTGEDVIEINCHGGFISVKKILELILSKDVRLAEAGEFTKRAFLNGRIDLSQAEAVIDVIKAKTDIAHEVAQNQLEGSLSKKIRELRDKVTEILAHVEVAIDYPEEDIEHITYQTLKEKTDELKKDIKKLYDTAESGKILREGLKTVIVGKPNVGKSSLLNSILGENRAIVTDIPGTTRDVIEEFVNIKGIPLKIVDTAGIRDTDDIVEKIGVEKSKESFTSADLIVMVLDASRKLSEEDIEILEKLK

SEQ ID NO: 52974 - protein, 173 aa, Clostridium difficile
MEFIAYAKPDFVTIDGRGGATGASPKLLKDATSIPTIFALYRARKYIDTHGLDIDLVITGGLRISTDFAKAIAMGADAVAIASSALMAAACQQYRICGSGKCPVGVATQDEELRKRLHIENSANRVANFLNVSLEELKTFARISGHKDIHDLSVDDLYTVNSEISNYTNIQHV

SEQ ID NO: 52975 - protein, 286 aa, Clostridium difficile
MAMKWRDYAADVNLFEDFDKTIKPLTDEQRRKNINTLIAYFSKEVPSKIYNLSNDEIKPRDILRGLLNVYPPKEIAPEILNMLHNLLLIECEERELVDVNDIEEIEEGIAIWRGNITNLRADAIVNAANNKLLGCLQPLHLCVDNEIHSCAGPRLREDCDKIIKKQGHLEYTGDAKITRGYCLPAKFVVHTVGPIVSGGQPSKEQEKQLLHCYKSCLNTIKEIDEIKNIVFCGISTGVFGYPKKEAANLAVSRVRLWLKENPEKNLKVVFNVFTEEEEEKYRRIFK

SEQ ID NO: 52976 - protein, 263 aa, Clostridium difficile
MKLKKLLSVALVSAIAISAVGCSNKEDKKILVGASSNPHAKILEVAKPLLKEKGYDLEVKIFDDYVLPNTALDEGSLDANFFQHIPFLEETVKEKGYKLTYTSKVHIEPMGFYSEKVKSLDELKDGAVIAVPNDATNGARALKLLAKNKLIEVKDGELITKKDITKNPKNIVIKEMNAEQLPTVLKDVDGAVINSNYALTANLNPTKDAIVIESSDSPYVNIIACRENNKDSDKIKALSEAMNSKEVKKFIQDEYKGSIVPAF

SEQ ID NO: 52977 - protein, 218 aa, Clostridium difficile
MNSLIDFLTTLFPNALLQTLYMVIVPTIVATILGFILAIILVVTKPDGLKPNSTINSALGFIVNIFRSFPFMILIVAMIPITRLIVGTSIGETAAIVPITIGAAPFIARIIESSLNEVDKGLIEAAKSFGATKRQIVFKVMIKEAMPSIVSGITLSIISILGYTAMAGAVGAGGLGNIALIYGYQRFDTAVMVYTVIALIILVQIIQGVGNLAYKKLK

SEQ ID NO: 52978 - protein, 615 aa, Clostridium difficile
MQIIYITNEVTIMKKKYDFLIYSAIWLVIIILFIFSLYHSIEHIKIISHTGTIRSETQKVVKQELNNERNDDLIKRLDNILIKLRTGNGENGFQRCDNKEFQQKLNQMDSMWESMKKEIIKVRNGASGDKLYKLSEEYSVLSNQIVFISEKHSNAKLYSFATALFIYLIFSTISLLIWEYYNKKRFKRIFYTDNLTKIKNQVAFENRAIEILHNASNKEYVLLNIDIDNFKYINDTHGYEYGDKVLIIVAAALSKTFNIKETCARIGSDNFVILAKYRDSLLEDIREMLTNAIISELDMNVTQTISYCIGAYLVEIDNLGYKSINSMMDKANIAHKVSKTRGISSTVWYNENLLKQLQMENSIYNYMYKAIENEEFHMYLQPKFQISSLNVVSAEALVRWFSPELGFLSPDEFIPLFEKSGFIIELDFYMLKKACSFVKKTFMKKNQYTYPIAVNFSRVTIYQNSFYQRFLDTVKEYEIPFKYIEIEVTESAFNEISQPVISILEELKKLGFLISMDDFGSGYSSLSLLCSLSINGLKLDKSLLKETFNREKVYSIIQCIIEMSHRIGMSVVCEGIETKKDLEFLNTVKCDVGQGFYFSKPIEEKEFFNKYVTKK

SEQ ID NO: 52979 - protein, 351 aa, Clostridium difficile
MSYERRKTREVSVGTVKIGGENPISIQSMTNTDTRDADATIAQIKRLEEAGCDIVRVAVPDIKAAKNIAKIKSSVNIPIIADIHFDYKLALEAIKQGVDGIRINPGNIGSIERVKMVVEKCKERNLKIRIGVNGGSLEKELLKKYGSATAEALVESAMGHIKILEDLDFHNIVISLKSSDIYKTVDAYELISKKVDYPLHIGITESGSVHKGTIKSSIGVGALLLKGIGDTVRISLTGDPVEEVIVGKQILRSLGLLNDKIKVISCPTCGRCNIDLISVVNEVEEKIGSMEKNITVAIMGCAVNGPGEAREADIGIAGGKGEGLLFKKGEIVRMIDGNKLVDELLEEIEKL

SEQ ID NO: 52980 - protein, 269 aa, Clostridium difficile
DNSNTLNQIKKAEYSETYKQYLNDAKNGRTEKYNGIIPNPYQLEGTQIQSKGRTAPTSYDPRKLGLMTSIKNQEDLGICWDFAAMATLESFLKLNNYGDYDLSEEHLRWWASDGEYGWSVDDMNGALNYEAMGYLTSWSGPKLEKDIPYNGRVSKAQGAKKPTNMNTAPTVFNVTDAVCVSNDINSTKNAILQYGAVTSGYYEDIKYQSDDQNSYYCPTKSFNTNHAISIVGWDDNYSKDNFNANIRPSKNGAWLIKNSWGDYNSEGGY

SEQ ID NO: 52981 - protein, 176 aa, Clostridium difficile
MVKEVHIYMRKAIEIKSEVVSEIVEKLQKSSAAVVVDYKGLTVEEVTELRKQMREAGVDYKVYKNTLVRRAAKEVGIEQFNDELLVGTNAIAFGYDDPVAPARILKGFMDSHPKMKLKMGIVEGAFYDESKIVEMANIPSREVLIAKLLGSLKAPVSNFAYLIDAIAKKAEGQEEA

SEQ ID NO: 52982 - protein, 232 aa, Clostridium difficile
MAKKGKRYAGALQKVDRTKFYDASEALTLVSDIAGAKFDETVEAHIKLGVDSRHADQQVRGAVVLPHGTGKTKRVLVFAKGEKAKEAEQAGADFVGAEELVQKIQGENWFDFDIVVATPDMMGVVGRLGRVLGPKGLMPNPKSGTVTFDVAKAIDEIKAGKVEYRLDKTNIIHVPVGKVSFGGEKLTENFTALMDAIIKAKPAAAKGQYLRSITVASSMGPGVKINPARTAE

SEQ ID NO: 52983 - protein, 413 aa, Clostridium difficile
MRDISHLAQDKGRKFKMAKAKYERTKPHVNIGTIGHVDHGKTTLTAAITKTLYDRYQLGEAVDFANIDKAPEERERGITISTAHVEYETPNRHYAHVDCPGHADYVKNMITGAAQMDGAILVCSATDGPMPQTREHILLSRQVGVPYIVVFLNKCDMVDDEELLELVEMEVRDLLTEYDFPGDDTPIVRGSALMALEDPKSEWGDKIVELFEQIDEYIPAPERDTDKPFLMPVEDVFSITGRGTVATGRVERGVLKVQDEVELVGLTEAPRKVVVTGVEMFRKLLDQAQAGDNIGALLRGVQRNEIERGQVLAKTGSVKAHTKFTAEVYVLKKEEGGRHTPFFDGYRPQFYFRTTDVTGACKLPEGIEMVMPGDNVTMEVDLINSIVVEEGLRFSIREGGRTVASGVVATIIE

SEQ ID NO: 52984 - protein, 688 aa, Clostridium difficile
MARKFPLERTRNIGIMAHIDAGKTTTTERILFYTGQTHKIGETHEGASQMDWMEQEKERGITITSAATTASWKDHRINIIDTPGHVDFTVEVERSLRVLDGSVAVFCAKGGVEPQSENVWRQAETYGVPRIAFVNKMDILGADFYNVVSMMKSRLNSNAVPMQLPIGKEDSFIGIIDLLKMDAVIYKDDLGVEMEETDIPEDMKELAAEWREKLVESVAETDEELMMKYLEGEELTIDELKVAIRKATIACEMNPVFCGTAYRNKGVQLVIDAVLDYLPAPTDIPAIKGILADGEEAERHSSDEEPFSALAFKIMTDPFVGKLAFFRVYSGTLESGSYVLNATKNKRERIGRILQMHANTREEITKVYAGDIAAAVGLKDTTTGDTLCDPANPIILESMEFPEPVISVAIEPSSKAAQEKMGIALQKLAEEDPTFTVKTDQETGQTIISGMGELHLEIIVDRLLREFKVEAKVGAPQVAYRETITQPVDVEYKYSKQSGGRGQYGHVKIRVAPQEPGEGYKFTNKTVGGSVPKEYVGPVDMGIQGAMQSGIVAGYPVVDVAVELYDGSYHEVDSSEMAFKMAGSMAFKDAMKKGNAVLLEPYFKVEVVTPEDYMGDVMGDLNSRRGLIQGMEARSGAQVINAFVPLSEMFGYSTDLRSSTQGRATYTMIFDHYEQVPASVAKKIAEGK

SEQ ID NO: 52985 - protein, 156 aa, Clostridium difficile
MPRKGNIPKREVLPDPMYGSKVVTKLINNLMVDGKKGKSQRIVYDAFAIVAEKTGEEALEVFNKAMDNIMPVLEVKARRVGGANYQVPIEVRPERRQTLGLRWLVKYTRARGEKGMVEKLAKEIMDAANNTGASVKKKEDTHKMAEANKAFAHYRW

SEQ ID NO: 52986 - protein, 1161 aa, Clostridium difficile
MFELNNFESIKIALASPEKIRQWSRGEVKKPETINYRTLKPEKDGLFCERIFGPQKDWECHCGKYRRVRYKGVVCDRCGVEVTKSKVRRERMGHIELAAPMSHIWYFKGIPSRMGLLLDMSPRSLEKILYFASYVVVDPGETGLNEKQLLTEKEYRTALEKYGYTFTVGMGAEAVKTLLQNIDLEQQSKDLRAELKDSTGQKKVRTIRRLEVVEAFKKSGNKPEWMILDAIPVIPPDLRPMVQLDGGRFATSDLNDLYRRVINRNNRLKRLLELGAPDIIVRNEKRMLQEAVDALIDNGRRGRPVTGPGNRPLKSLSDMLKGKQGRFRQNLLGKRVDYSGRSVIVVGPELKFYQCGLPKKMALELFKPFVMDKLVKEGYAHNIKSAKSIVEKVKPEVWDVLEDVIKSHPVLLNRAPTLHRLGIQAFEPILVEGKAIKLHPLVCTAYNADFDGDQMAVHVPLSVEAQAEARFLMLSVNNILAPKDGSPITTPSQDMVLGCYYLTIEAQDGAKGTGMVFKDFNELLLAYYNKSVHLHALVKLKVTLEDGRSSLVESTVGRFIFNENIPQDLGFVDRKENPFALEVDFLADKKSLGKIIDKCFRKHGNTETAELLDYIKALGFKYSTLGGITVAVDDMSVPEEKKVFIAEAEAKVDKYEKAYRRGLISDEERYEKVIETWTETTDKVTDALMGGLDRLNNIYIMAHSGARGSKNQIRQLAGMRGLMANASGKTVEIPVKSNFREGLSVLEYFTSSHGARKGLADTAIRTAESGYLTRRLVDVSQDVIVREIDCGTEDTTEIYAIKEGNEVIEEIYDRIVGRYTIDPILNPETGEVIVEADSMIQEDEAETIVALGIEKIRIRTVLNCKTNHGVCSKCYGRNLATGKEVNIGEAVGIIAAQSIGEPGTQLTMRTFHTGGVAGADITQGLPRVEELFEARKPKGLAVITEVSGRVEIDETGKRKEVNVIPEEGETQTYVIPYGSRLKVKQGQMLEAGDPLTQGFINPHDIVRVNGVKGVQEYIVKEVQRVYRLQGVDVNDKHIEVIVRQMLSKVKVEDPGDTDLLPGGYEDVLTFNECNKDAIDKGLRPAVAKRVLLGITKASLATDSFLSAASFQETTRVLTEAAIKGKEDHLIGLKENVILGKLIPAGTGMKKYRNIAVEKIED

SEQ ID NO: 52987 - protein, 1238 aa, Clostridium difficile
MPHPVTIGKRTRMSFSKIKEIADVPNLIEIQVDSYEWFLKEGLKEVFDDISPIEDYTGNLILEFVDYSLDDKPKYDIEECKERDATYCAPLKVKVRLINKETGEIKEQEVFMGDFPLMTERGTFVINGAERVIVSQLVRSPGVYYAEERDKTGKRLISSTVIPNRGAWLEYETDSNDVISVRVDRTRKQPVTVLLRALGIGTDAEIIDLLGEDERLSATLEKDNTKTVEEGLVEIYKKLRPGEPPTVESASSLLNALFFDPKRYDLAKVGRYKFNKKLALCYRIMNKISAEDIINPETGEVFVKAGEKISYDLAKAIQNAGINVVNLLMDDDKKVRVIGNNFVDIKSHIDFDIDDLNIKEKVHYPTLKEILDGYSDEEEIKEAIKSRIKELIPKHILLDDIIASISYEFNIFYNIGNIDDIDHLGNRRIRSVGELLQNQVRIGLSRMERVIKERMTVQDMEAITPQALVNIRPVSAAIKEFFGSSQLSQFMDQTNPLSELTHKRRLSALGPGGLSRERAGFEVRDVHHSHYGRMCPIETPEGPNIGLINSLGTYAKINEFGFIESPYRKFDKETSTVTDEIHYLTADEEDLFVRAQANEPLTEDGKFVNHRVVCRTVNGAVEMVPESRVDYMDISPKQVVSVATAMIPFLENDDANRALMGANMQRQAVPLVRREAPIIGTGIEYRAAKDSGAVVVARNSGIAERVTADEIIIKREDGNRDRYNLLKFKRSNSGTCINQTPIINKGDQIIKGDVIADGPATDLGEVALGRNCLIAFMTWEGYNYEDAILINERLVKEDRLSTIHIEEYECEARDTKLGPEEITRDIPNVGDSAIKNLDDRGIIRIGAEVDSGDILVGKVTPKGETELTAEERLLRAIFGEKAREVRDTSLKVPHGESGIIVDVKVFTRENGDDLSPGVNELVRCYIAKKRKIKVGDKMAGRHGNKGVISRVLPEEDMPFMENGTPLDIILNPQGIPSRMNIGQVLEVHLGLAAKTLGWYVATSVFDGANEYDIMDALEEAGYPRDGKLTLYDGRTGESFDNRITVGYMYYLKLHHLVDEKLHARSTGPYSLVTQQPLGGKAQFGGQRFGEMEVWALEAYGAAHILQEILTVKSDDVVGRVRTYEAIVKGENIPEPGIPESFKVLIKELQSLCLDVKVLTDEDQEIEVRESVDEDDTIGEFELDVVNHMGEVEESNIIEEIEDDFAENAEDEDIENLEEFTEDDLFEEEIDFDSDDFDM

SEQ ID NO: 52988 - protein, 262 aa, Clostridium difficile
MEKLQGKIAVVTAATKGIGLASAEILAKNGATVYLAARSEELAHEVINKISAEGGCAKFVYFNAREEETFTSMIEEVVKKEGKIDILVNNFGSTNPSLDKDLVTGDTDNFFDTVNTNLKSVYLPCKAAIPHMIKNGKGSIVNISSIGSVLPDLSRIAYCVSKAAINSLTQNIATQYAKDNVRCNAVLPGLIATKAALDNMSPEFIKEFLKHVPLNRIGEPDDIAKAVLFYASDDSSFITGDLLEVAGGFGLPTPQFADNILG

SEQ ID NO: 52989 - protein, 124 aa, Clostridium difficile
MLKMTIEQILEAIENMKVLELNELVKAAEEKFGVSASAPVMVAGAAAGGPAAEEKTEFDVVLTDVGSSKVGVIKAVREITGLGLKEAKEVVDNAPKTVKEGASKEEADQIKEKLEAAGAKVEVK

SEQ ID NO: 52990 - protein, 210 aa, Clostridium difficile
MTIPSSNKVYPRSNDYQTVYLKNVITRENIEVGDYTIYNDFYNDPRDFEKNNVLYHYPINNDKLIIGKFCSIACNAKFLMTSGNHSMKSKSTYTFPIFYEEWKLDINHITDAWDNKGNIIIGNDVWIGYDSIIMSGVNIGDGAIIGTRAVVTNDVPPYSIVGGVPAKIIKKRFNNDTISKLLEIKWWDWPYKKIQSNIKHIQSGNIDKLV

SEQ ID NO: 52991 - protein, 302 aa, Clostridium difficile
MENSEMSNKIVSKRQLTDSIYLMEIEAPRVAKSSQPGQFIIIKNDEKGERIPLTIADYDREKGTVTIVFQTVGASTKKLAMFEENDFVMDFVGPLGQASEFIHEDIEELRNKKILFVAGGVGSAPVYPQVKWFKEHGLDVDVIIGARTKELIILEDDMKKVAKNVYVSTDDGTYGFNGRVTDLLKDLVDNQGKKYDQAIVIGPMIMMKFMCQLTKELNIPTIVSLNTIMIDGTGMCGGCRVSVGNETKFACVDGPEFDGHLVDFDQAMRRQSMYKTQEGRAMLKLEEGDSHHHSNCGCGGNK

SEQ ID NO: 52992 - protein, 372 aa, Clostridium difficile
MAVVEKAYKFRMYPNKKQQELINKTFGCCRFVYNKYLAKRIEVYKNNKETFTYKQCSSDLTNLKKELKWLKEPDKFSLQNALKDLDNAYKKFFKEKSGFPKFKSKKINRFSYKTNFTNGNIMYFSQHIKLPKLGMVKIRDKQVPQGRILNATISKEPSGRYYVSLCCTDVDIEAFENTNNQIGLDLGIKEFCISSCGDFIENPKYLKKSLSKLAKLQRELSRKTIGSLNRNKARLKVARLQEHIANQRNDFLQKLSTKLIKENDIICIEDLQVKNMIRNRKLSRLISDVSWSEFIRQLKYKANWHGRQIVKVGKFFASSQICNKCGYKNEEVKDLNVREWICPSCNETHDRDINASINILKEGLRLITIQNK

SEQ ID NO: 52993 - protein, 421 aa, Clostridium difficile
MILIKNGRVIDPKSQRDENIDLIIKENKIYKIGKFDESDEYEKIIDASGNVVAPGLVDVHVHFRDPGFTYKEDIESGAKSAARGGFTTVICMANTNPIVDNEDTFNYVKEKSKNACINVLQAAAITKGFEGKELVDMEALKKAGVPGFTDDGLPLMDSNLIMEAMIKAKELDVPLSFHEEDPSLVGNPGVNAGKVASELGLKGASSVAEDVMVARDCMLALKTGAKVDIQHISSGVSVDMVRFAKYLGATVVAEASPHHFTLTEEDVLEFGTNAKMNPPLRSKWDRDKIIEGLNDGTIEIIATDHAPHSKEEKDREFIKAPSGIIGLETSLALGITNLVHKNHLSMMQLIEKMSINPAKLYNLNIGFIEEGAVADIVIFNPEEEWTVESFVSKADNSPFKGKSLYGKVNYTICNGEIVYNA

SEQ ID NO: 52994 - protein, 537 aa, Clostridium difficile
MKFNAYQHKYSSIRNVVYAKNGAVATSTPLASQAGLEILKKGGNAVDAAVATAATLAVVEPTSNGIGGDAYALVWIEEEKRLYGLNSSGFAPENMELKNYNNMKEMPKYGFGAVTVPGIPAAWSELNKKYGKLSLMECLSPAINYAREGYVVSPNVAKVWKKSYELYEKELIGEEFKPWFDTFSKDGKAPEAGDIFICEEQASTLEEIANTQAESFYRGRLADKIDEYSKKFNGAIRKSDLECFYPTWVEPISTEYKGYKIFEIPPNGHGITVLMALNILKELELEGNIENVEDIHKIIESLKLAFADSKTYVTDIEHMKVKIQELLSQEYAKKRSLLIDNKEALYPTAGEPYCGGTVYLCTADKDGNMVSYIQSNYINFGSGIVIPRTGIALHSRGNNFNLDPKHHNVVKPFKKPYHTIIPGFLGKEDKAIGPFGVMGAFMQPQGHIQVLTNMIDFGLNPQEALDAPRWQWIKGKEIEVEPEMPKHIIDSLIEKGHEIKVIHDTVDMGRGQIIFKTEQESYICGTESRCDGHIAVY

SEQ ID NO: 52995 - protein, 66 aa, Clostridium difficile
MNNGIVKWFNNEKGFGFISMESGDDVFAHFSAIQTSGFKSLEEGQKVSFDIVKGARGPQAENITIL

SEQ ID NO: 52996 - protein, 384 aa, Clostridium difficile
MGGKIGMKERIIQVADSKKEKILGLCQSLYDEPEIALQEYKSAKKISEFLREEGFDVEENLAGMATAFKATKKNGDGPKIAFIAEYDALPGNGHACGHHLIASMGVGAGIALSSILDTYKGEVSIIGTPAEETGDGKPYLIEHGVFDGYDAAMMIHPNSKTCVTPEIIAIGGLDFIFTGKASHAGAKPYNGINALDAVVLLYNNINALRQQLVDGTRIHGIILEAGTAANVIPDMGKVRLEIRAKEQNYFDEVVEKVKNCARGAAIATGCELEFYHFEPTCQGLNENKVLVDIFTKIMEEFGIYEDEQVMLGSTDMGNLSQIMPCIHPLMKFSENGEELHTKEFLEASINSYAKDRVIDGIKILALTGFNLFENPELLKKMKEE

SEQ ID NO: 52997 - protein, 280 aa, Clostridium difficile
MLVKNLIIYAVSDSVGETAQQVAKACMSQFYVNETYEIKRFPYMINKGVLLETLENAKAENALIVYTLVDEELCSIVERYCEREGLSCIDLMTDILREISKRTGRKPKREAGIIRKLDESYFKRVEAIEFAVKYDDGKDPRGVLQADIILVGISRTSKTPLSMYLANKNIKVANVPLVPEIPIPKEVFEIDTKKIIGLTNSPEKLNEIRTQRLKALGLSSKANYANLERILQELDYSEEIMKRIGCPVINVSNKAIEETAGIILDIMKENGLKIYKEIEI

SEQ ID NO: 52998 - protein, 250 aa, Clostridium difficile
MSYFQYQGNSCFYKEYGQGKPIIFLHGNTGSSNMFKALVPLYVENFRCILIDFLGNGQSDRVSQFSPDIWHDEALQTIALIEHLNCGKVGLIGTSGGAWAAVNTGLERPDLVEAIIADSFDGRTLNDNFIDNLITGREKSKQDIQARKFYEWCQGKDWENVVNLDTKALLQCANEKRPLFHKELCKLEMPILFTGSKEDEMCRHNLEEEYKQMATFISKASIHIFSQGGHPAILTNADEFAQLAKVFFNY

SEQ ID NO: 52999 - protein, 342 aa, Clostridium difficile
MICVQEKLLALREAALAEIKEAQSIESVESLRVKYLGKKGEITAILKEMGKLSAEERPVVGKVANEVRENIELSINSKKEEINAIEKERKLKEEVIDVTQPGKVLKVGKKHPITQIIDEVTDIFIGMGFSIAEGPEVETVENNFDALNAPKDHPSRDMSDTFYINDGVLLRTQTSPVQVRTMRSQELPIKVIAPGRCFRSDSPDATHSPMFHQIEGLVVGKDVTMAEFKGTMDIFVEKLFGSDIKTKFRPHNFPFTEPSAEVDVTCFKCGGKGCPMCKYEGWIEILGSGMVHPNVLRNCGIDPEVYSGFAFGVGVERLAMLKYEIDDIRLLFENDMRFLNQF

SEQ ID NO: 53000 - protein, 415 aa, Clostridium difficile
MQYIIGGDMKRYLIVFLMCSSLFLVGCGKTEESEPEKPIAVSVQKAIGGEIENTNSFSGTTKVKDETAVTAQTVGTVQEVYVKLGQNVRKGDELLSISSPELENSVKQSKASLDLAKASYSSATGGSLEAQVNQAKTALDNAKIQYEESQRNYDNNKILYEQEVISLDQFKKIEFSLEQTKQQLDSAQRAYDTATSKSIPQAKALAKKQLDQAQVSYNLAMSNLDKLTLTSPVDGTITAKNFDSKEMITQSQPAFIISNPNILEVDLNVAESDIGKFKKDGNVDVIIEDQRILGKIDYVPSVVDPQTSLYPVKVLVNNTNNKFKAGMSAQVNLSVEKENGAVTVPKKAIFEENGKKYVYIATKDNIAKKHLVQTGIVTEDKIEIKSGVSDKDTVIIGGISLISDGTKIFPVEKEK

SEQ ID NO: 53001 - protein, 297 aa, Clostridium difficile
MLKDFNNLLEEAKKLEPVIVSVAVAEDKEVLKAVKSATDLNIIKPILVGDKDKIESISREIGLKGHEIIGCQNPDESVKKAVEIVKNKEAKVLMKGLVNTSVYMRAILNKETGLRTGRLLSLLAVYELPQYHKLLYCTDSGINVSPNLNQKKDIMTNALLTMKSIGMENPKTAILTANEMVDPKIQSTVDANLLVEMEKSGEIPKCIVEGPIAFDVAFDAHAAEHKGIKSNIAGDVDLLVFPNIEAGNILGKSWLRFNKAKWAGIVLGATNPIILGSRSDTAEIKINSIALACLASQ

SEQ ID NO: 53002 - protein, 419 aa, Clostridium difficile
MGEKENGIKFGKLMFQLVIIAISWELVYIIPFIQYTLYDPILKALECTNTQLGFLLTIYGLGNIFGAPIGGWLADRFDYRKIILGSVFLNGVVSFLFAFNMNYPFAVATWVGCAITSLVMNYPSMVKILRVIGKDNQGKVYGFNEAMVGVSGVVMGAIFLYIYTCFATPTLGMRWVMISLGILSIAMCPVLWFVIKDVDIKEEREEAGEKMSAGDFITVLKSPNTWLVGISIFCVYSFTVTMSYFTPYITSVLGGSVALSGALAIIRQHGLKLFGAPFGGYCADKLKSPTKVLLPIYVFGIAVIVLFLVLPASTPMTIFIALTFVVGILGYMGKGIYYAVQDEVKVPVKYSATTIGIAAALGFSPDVFQFALIGHWIDTYGNKGYTYTFIFQIAILVIGILSCLYILKVKKRRASKLEA

SEQ ID NO: 53003 - protein, 525 aa, Clostridium difficile
MKQKMKEFFLQLGKSFLLPIALISAAGIFLGISSAFSNPNIVSDMPFLANNFIQGILGFTKAITGVLFGNLAIFFAISISVGLAKEEKAVSAFSGFVGYLVLHTSINYMLGCRGILAEPDMMREMGQAVTLGIQTLELGVFGGIVVGIITASLHNKYYNIKLPDYLGFFGGTRFVPIITTVVFSILGIIIPYIWPYVNTIIQSVGIGIASLGYLGTFVFGFLERLLIPFGLHHILNAMFRFTEVGGSLVVGGQEVFGALNIFLAQLSDPETISFSTEATRFLAQGKIPIMVFGLPAAAYAMYKTAKPENRSKVKGILLAGALATFVTGITEPLEFSFLFVSPILFVIHAFLSGISFMMMHIFGVAIGNTQGGIIDLVVFGVMQPNTKWIYSIILGLVYAIVYYNVFKILILRFNLQTPGREEITDINFDLEPLSNKVEIAQSGETTKRALSIIKYLGGKDNIEDITNCITRLRVVVKDMSKVDENAFKKYTGAMGVIKVSDKDIQIIYGPSVSQVRDEVSFAMSI

SEQ ID NO: 53004 - protein, 632 aa, Clostridium difficile
MDSLLYVIEKDKHTNEELREILKSNKNIRFVSLMGVDLGGNATDEKIPVELFLEDIDKFLESAIQTDGSSVELYNIATLNNAKVDLMPDKSCHWYVDYNMEYIDEEVGLPVGTLKIPAFLIHDNKKVCSRGVLQKADKYFKKSMYEIFREYPHVINNIGIDSVDDIEEIMLTAATELEFWVNTPEDKADLEKLYVSQSLKEQYWKRTHGIIRTCLEKSLIILQKLGVNPEMAHKEVGGIQSSISIDGRTNHAMEQLEVSWKFSTPLQAADNELLVRDVIEDVFTSHGLEVTFKAKPIHGVAGSGGHTHVGVSAKLKDGSIKNLFAPKDLKEDYLSELGYGALMGLLYNYEVLNPIVTASNDGFNRLVPGFEAPVCIVTSLGHSYEIPSRNRSVLVGLIRDMKNPKTVRFELRSPSPLSNTYLVIAGCYQTMLDGIKAAAKSGLSTKELEKELSKNVGEESFYLEKDRAYRDENDVFEHYSLEERNARFGIPPATVYENMKNLEIYASKLKSLKQGDVFTDSIIESFKIGAIDKWQKKLKTRIIEAGIQKIRSIVKIHTKENMDALDEVVWNSISDLKFNIMKDTLTRESLFTRVREAIENKDYQTASDLQIELKRSMEEIQQLYMQYKKNIY

SEQ ID NO: 53005 - protein, 317 aa, Clostridium difficile
MKKRYLVIGIIILSYFSLFIGAEDINIMHIFAKNQHKLMIFIMSRIPRLISILIAGVGMSIAGLIMQQISKNKFVSPTTGATIDAAQFGIVICMLLVPTASIFTKTIIAFVFSLVGTFTFMKIIGKLQFKNIIFVPLVGIMFGNIIGSMTDFIAYKYDLSQNVSSWMQGDFSMILKGNYEILYITIPLIILAYIYANKFTVVGMGMDFATNLGLSYKRIVNIGLIIVALVTVCVVVTAGNIPFIGLIVPNIVSLYMGDNIRASIWYTGLLGAIFVLICDIFGRIIIYPYEISIGLTVGVIGSILFLYLILRRNVNEA

SEQ ID NO: 53006 - protein, 163 aa, Clostridium difficile
MLKMDTKKYKDKLLKERENLTNLVEDMKDNTLFGDTTKHTSEKYSSGELSSYDNHIGDMGTDLYMQNMQNSLINHEEGRLYQIDLALSKIENGTYGICDLCHNQIDLERLDILPDTSLCNDCAKKENNLLGDAMQNPDVEDSNFYSEDLTNLTDLNKNGILRD

SEQ ID NO: 53007 - protein, 397 aa, Clostridium difficile
MSIIVQKYGGSSVADTEKIKSIAENIIERRKENPQMVIVVSAMGKSTDEYITLAKELSNEPSKRELDALMSTGEMISASLLSIALNALGCKAISYNAYQLNIKTSGLHGKSQIDDINVNRIKNSLDEGNVVIVTGFQGINEDGDVTTLGRGGSDTSAVALAVKLNGKCEIYTDVDGIYFTDPRKYSKASKLDEIEYEEMLELASLGAQVMHSRSIELAQKYGVEIYVGRTCGTEKGTYIRGGKDMKLEDKVITGLATSDDDSSITIKDFKAENISSLFEDIATIGISVDMISQTAPILDKISVSFTVPKEELGECKKIVSKYTDEEHVVIDNNITKFSLVGLGMKNTSGVAAKVFKIFNENGIMIKLITTSEIRITCAINSDDKQVAIEKIAEVFNI

SEQ ID NO: 53008 - protein, 328 aa, Clostridium difficile
MKKITINDIANLAGVSKSTVSRYLNNKDISDSTKEKIKTIIDEYGYEPNAFAQSLRAKKTYFIGIITPCLDSFVKSKIMMAIDEELKELKYTSLIINTNRKIRSEIDSISKLASLKVDGIILIGTEITKEHKNEIEKLDIPIVVVGQKVDGINSIVNDDYGAGYKMGQYIANKGYKNIVYLGVDESDISVGLNRKNGVLNGLKDKGYDAKVFYTDFDQETSIQRSGEMLESENPDIIICATDNIAIATMKEINKRGKSIPQDISVAGFGGYDVLSIISPKLTTIKFENKNAGKVAANTIVNLIQERKEPLLKEIKFELIEGESTINKN

SEQ ID NO: 53009 - protein, 441 aa, Clostridium difficile
MKVMKLWGGRFRKAENQLMEEFNKSFGYDCVLYKKDIEGSVAHVHMQVKCGLLTEEEGKSITEGLKGILEDVENGKLVLDGEYEDIHSFTEINLIQRIGDVGKKLHTARSRNDQVAVDMRLYAKEKANDLVGLISEFKATIKDVADKNPVMMPGYTHLQRAQVVTFKHHLMAYYSMFDRDEKRIKNAIEILDESPLGCGALAGTTHDIDRSITCEQLGFKKVVDNFMDGVSDRDYLLELMSDFSIIMMHLSRLSEELILWSSQEFGFVEIDDLYTTGSSIMPQKKNPDGAELIRGKTGRVYGNLFGLFTVMKGIPLAYNKDMQEDKEGFFDSVHTLEMCIQIMDRMIATLKVNEDKMKQAVKNGFLNATEVADYLVKNNVAFRDAHGIVGSIVIYCEDNKKAIEDLTLEELHKFSDAFKEDIYDFIDYESILNKGIKKNLK

SEQ ID NO: 53010 - protein, 279 aa, Clostridium difficile
MNFKKLSNAKVSVMAVVLSVGILSGYSALNKQVTLVVRGEERTISTFSSNVGDLLESQNISYDANDIVTLDENTKLSNGDKIEVIDVKEKTVVETKDIPFEVTVVEDGSLLKGDSKVKEEGKSGKSELIYKETYHNGKKVEKEFVKKVVKAEPVNKVVSKGTKVEMQVASSRGESSRRMASSSSSSSSSNNGKNMRVVATAYTGHSITATGTKPKWGTIAVDPKVIPYGTKVYIPQFDMVFTAEDCGGAIKGNKIDIYMNDSKTVYNWGRKTIDIRILK

SEQ ID NO: 53011 - protein, 314 aa, Clostridium difficile
MEPLFLKPIFMDRIWGGTALKDKFNYEIDSPTTGECWAISSHKNGDCLIENGKYKGKKLSELWNKNRELFGNTPGDKFPLLTKILDANDNLSVQVHPNDEYAKKNENGELGKTECWYVIDCSDDAEIIIGHNAKSHKEFVNMVNNNEWDKLLRKVNIKKGDFFYVPSGTIHAICKGTLILETQQNSDTTYRVYDYDRTDNSGNKRELHVQKSIDVTNVPHINFDTDYKIVSTSDFKCTTFVSNEFFSVYKLDVFGKCNFTHNTPFSLYSVLDGNGKLIHNSVEYNLKKGMHFILPNDFGDFSFEGNLEIICSHI

SEQ ID NO: 53012 - protein, 615 aa, Clostridium difficile
MGKIIGIDLGTTNSCVAVLEGGEAQIIANSEGMRTTPSVVAFTKDGERIVGEPAKRQAVTNADKTITSIKTHMGTDYKVNIDGKSYTPQEISAIILQKLKSDAESYLGQTVTEAVITVPAYFTDAQRQATKDAGRIAGLDVKRIINEPTAAALAYGMDKLDQEKKILVFDLGGGTFDVSILEIGDGTFEVLATAGNNRLGGDDFDQIVIDYLAEEFKKAEGVDLRNDKMALQRLKEAAEKAKKELSSTMSSNINLPFITATAEGPKHLNIDLSRAKFEELTRGLVEKTMEPTKTALQDAGLSTGDIDDVLLVGGSTRIPAVQEAVKKFIGKEPHKGINPDECVAAGASIQAGVLAGDVKDLLLLDVTPLSLGIETMGNVMTKIIERNTTIPTKKSQIFSTAADNQTAVDIHVLQGERSMAYDNTTLGRFQLTDIPPAQRGIPQIEVTFDIDANGIVNVSAKDLGTGKEQKITITSNTNLSEAEIEQKIKEAEMNAEADKQKKEKIEAFNQAESTIYQTEKTLNELGDKISSGEKEDIEKAIADLKAVKDNQDATAEELKKATDEVMTKFQKVSQEMYQKAAQEQQAAQGAEQAQDNGPKDDNVVDADFKEVDEDK

SEQ ID NO: 53013 - protein, 442 aa, Clostridium difficile
MRRDSMHTQLQKTIGLSAALSTVVGMVIGSGVFFKPQAIYTTTNGAPGLGIIAWLLGGFITITAGLTATEISAAIPKTGGMMIYIEEIYGEKLGFLTGWMQTVLFFPGTSAALGVIFAQQASELLGMSPNNMANVLPIAIGVILFLALLNIIGSSLGGKVQTVATIGKMIPLILIIVFGFIKGQSSEVLNPFVGDGVNASNALGQVLIATLFAYDGWINVGAISGEMKSPEKDLPRAIVGGLSLVMAVYIIINIAYLWVVPASELATVTSPATLVATRLFGNIGGKVITVGILISVFGTLNGYLLTGSRIPYTLAEMGTLPASKTLLKVNSGGSPVNSILLITVLACVYALSGQFNLLTDLTIFSIWVFYVLTFIGVMRLRRQKPDLHRPYKVPLYPIIPIIAILGGLFVIINQILTSTVISLGGIFITLLGLPVYYYMKKR

SEQ ID NO: 53014 - protein, 339 aa, Clostridium difficile
MFKKCIKVVTLTFILVCILPGKSLALNQDDFLKFLVNSSYPEAKVEGNDTENKKNNKNKETSKENKEESKEENTKSKDASKVDNKKESEKEYIKLYVGKENVPDIESKNSDTTETNTTSSSDYKDDLRVTKENPRILIYHTHGCETYSNSPDGNYHSRDKKNSVMEVGSALTSALDSKGWGVVHTTKYHDYPSYNNSYASSLKTIQSILPKYNSVDIAIDLHRDARDLTNPATKEKDHLKYTTMINGERVSKFFFVVGGKNTNRKQLRALAEDITAFAEKKYPGLVSPIVEKDYARFNQFAVKNHMLVEIGNNATSVEESKATTKYLAEILDEYFKQKN

SEQ ID NO: 53015 - protein, 258 aa, Clostridium difficile
MKFHEFGNKNRPHIMLIHGGGNAWWNYLRQAEVLSNKYHVILPTLDGHGEEYETTYISTEDTADKLISYIDENCSGHLFALCGVSLGGQIVMELLSRKPNITKKAIIDGSICYPRPLMARFCIAGIRFFGGLLFSDKACRFQIAMMPKLLPENMQYPDEIKAYYMTDMPHVRKETFYNMYRTYMMNYTLKENVKKTTAQVMYWYGEKEMKCVKKSAKMFQSYVPSCEIYEAKSYNHGYLSLYLPNEWLEIAEPFFQKE

SEQ ID NO: 53016 - protein, 169 aa, Clostridium difficile
MLRRKPIDAGQLDLQEKVVEVRRVTKVVKGGRNFRFAALVVVGDENGHVGIGAGKAMEVPDAIKKAVEDAKKNLIVVPIVGTTIPHEVRGHFGAGNILIMPAVEGTGVIAGGPARAVLELAGLKDVRAKSLGSNNPRNMVNATIEGLNSLKTVEDIAKLRGKKVEELLG

SEQ ID NO: 53017 - protein, 150 aa, Clostridium difficile
MQSMKLHELKPAEGAVRAKRRLGRGTATGQGKTAGRGQKGQWSRSGGGVRVGFEGGQMPLARRLPKRGFNNIFKKVYTEVNVEVLNRFENGTEITAELLKSTKTISKIGKDGIKILGEGNLEKALTVKAAKFTASAQEKIEKAGGKAELV

SEQ ID NO: 53018 - protein, 228 aa, Clostridium difficile
MLENLKEEVLKANLELPKKKLITYTWGNVSGIDREKGLVVIKPSGVEYSNMTVEDMVVVDLEGNIVDGKLRPSSDTPTHLVLYKEFEELGGIVHTHSSWATIWAQIGKSIPSCGTTHADYFYGSIPCTRKMTREEICNEYEKETGNVIIEEFMGRNPIHCPGIIVNDHGPFTWGKDANEAVHNAVVLEEVAKMAYYTELMSPDNIMDKVLMNKHFSRKHGKNAYYGQK

SEQ ID NO: 53019 - protein, 209 aa, Clostridium difficile
MKGILGKKVGMTQIFTDKGVVIPVTAVEAGPMVVTQIKTVDKDGYNAIQIGFEDAKEKALNKPKKGHLAAANVLKKHLKEFRVDSVEGYTVGQEIKADVFEAGAKIDVTGISKGKGFQGPIKRHGQSRGPETHGSRYHRRPGSMGACSYPGRVFKNKKLAGHMGSVKVTVQNLEVVKVDADKNLILVKGAIPGAKGSVVTIKEAIKVSK

SEQ ID NO: 53020 - protein, 217 aa, Clostridium difficile
MTNLEKGGITMPKLNVLNVSGQNVGEIELSDSIFGVEVNGHVLYEVVKNQLANKRQGTQSAKTRAEVRGGGRKPWKQKGTGRARQGSTRSVQWVGGGVAFAPKPRSYKYTLPKKVRRLAMKSALSSKVQNSEVIVLDALNMDAPKTKEFAQILNNINAAKKALVVIADKNDNVIKSARNIEGVQTALVNTMNVYDILKYDSFIITTDAVKKVEEVYA

SEQ ID NO: 53021 - protein, 276 aa, Clostridium difficile
MAIKKFRPTSPALRQMTVLVSDEITCNQPEKSLLVNLKKNAGRNVHGRITVRHRGGGQKRKYRIIDFKRDKDGIPAKVATIEYDPNRTANIALLNYADGEKRYILAPVGINVGDTILSGLGADIKPGNCLALKDMPVGTIIHNIELKPGKGAQLVRSAGVSAQLMAKEGKNALLRLPSGEMRLVSINCKATIGQVGNIEHGNVVIGKAGRKRHMGIRPTVRGSVMNPNDHPHGGGEGRSPIGRPSPVTPWGKPALGYKTRKKNKASNKLIVSRRTK

SEQ ID NO: 53022 - protein, 271 aa, Clostridium difficile
MGQKVNPHGLRVGVIKDWDSRWFATDKKEFGNLLLEDHNIRKFLKKRLYSAGVAKIEIERSANKIKMDLHVAKPGVVIGRAGAGIEALKAELEKMTKKTIIVNIVEVRSTDKNAQLVAENIALAIERRVAFRRAMKQAIQRAMKSGAKGIKVSASGRLGGAEMARTEGYSEGNVPLQTLRADIDYGFAEADTTYGKIGIKVWICNGEVLPTRDGVNPREESRKSDRRDNKRDNRRNDRRGNDRRGNDNRGNYRGQRPQGGSRPQRTENKGN

SEQ ID NO: 53023 - protein, 143 aa, Clostridium difficile
MLMPKRVKRRRVHRGSMAGQAHKGNKVTYGEFGLVALEASWITSNQIEAARIAMTRYIKRGGKVWIKIFPHKPVTRKPAETRMGAGKGSPEYWVAVVKPGRVMFELAGVSEDKAREAMRLAAHKLPIKCKFVKKEDLEVKGGE

SEQ ID NO: 53024 - protein, 282 aa, Clostridium difficile
MTIKDIIIKYSDKLKDISDTPRLDTELLLQKTLGVDRLYIHLNLNKELTEEQKTKFMGFAEERLNGRPIAYIVENREFMGLDFFVKEGVLIPRPDTETLVEEIIEICREKKDVSILDIGTGSGAITISLAKYIENSKIMSFDISETALEIAKKNAIINEVGEKIKYINSDLFTAISDSNIKFDIIVSNPPYIKKQDIETLHKQVKDYEPYNALEGGEDGLDFYRRITEQGKKYLNKCGILAYEVGHNQAEDVINIMKSNGYKKIYTKKDIQGIDRVVIGYNI

SEQ ID NO: 53025 - protein, 180 aa, Clostridium difficile
MASRLQEKYMKEVAPALMEKFGYKNVMEIPKLNKIVINMGIGDARENPKGLEKGVEELEMISGQKPVITKARKSVANFKLREGMPIGTKVTLRADKMFYFMDKLVSVSLPRVRDFRGVNPNAFDGRGNYALGVKEQLIFPEIEYDKIDKVRGMDIIFVTTAKTDEEARELLKLLGMPFSK

SEQ ID NO: 53026 - protein, 132 aa, Clostridium difficile
MTMTDPIADMLTRIRNANVVKHETVDVPASNMKKELARILLEEGFIRGYDVIEDGKQGIIRIQLKYGQEGERVITGLKKISKPGMRVYAANHEIPKVLNGLGISVISTSKGILTDKQARKENVGGEVICYVW

SEQ ID NO: 53027 - protein, 180 aa, Clostridium difficile
MSRIGVKPIIIPAGVEVTIAEGNLVTVKGPKGTLTKQLSAELNIKKEENTIMVERPTDNKKHRSLHGLTRTLLDNMVVGVNTGFEKKLELKGVGYRAQKQGKKLVMNLGFSHPVEMEDPEGITVEAPNQTELIVKGIDKQLVGNYAAKIRAWRKPEPYKGKGIKYVDEVIRRKEGKTGKK

SEQ ID NO: 53028 - protein, 258 aa, Clostridium difficile
MLYKESKNMNEPLVSIITPVYNSEEFLSETIKSIQNQTYKNWQLLLVDDCSKDNSSEIIKSFRKEDARIKYIKLEKNSGAAVSRNVGIKNAEGRFIAFVDSDDLWDSRKLEIQIEYMLKENVGFSFTSYRYMRQDGSKTNKVARAPKKIDYEGLLRNTIIGCSTVVIDKEIVGEFSMPLVRRGQDTATWLQLLKKEKYAYGIQEDLVNYRLVGNSISSNKIKALKRTWNTYRNVENLSLPKSLYVFCFYVFNAIKKRV

SEQ ID NO: 53029 - protein, 610 aa, Clostridium difficile
MKISKKIVSLLTMTFLTVTLYGNTSNASTKDTLTGSGRWETAIKISQAGWTKSESAVLVNDNSIADALSATPFAKAKDAPILLTQSNKLDSRTKAELKRLGVKNVYLIGGSIALSSEIEKQLNAENINFERISGNSRYDTSLKLAEKLDREKSISKIVVVNGEKGLADAVSVGAIAAQENMPIILSDSENGTEVADNFIDSKDIAKSYVIGGTYSISNSVERSLPNATRIAGSSRSETNAKIIEEFYKDTDIKNIYVTKDGTKNKNDLIDSLAVGVLAAKNSSPIVLAGNKLDTTQKDVLNTKIIDKVTQIGGLGNENVVEDILDIQEETKYTVETIDELNAAIKRADANDIIKFKPEKEKTINNSFSIETKKTVTIELDGRYRQTITLDIPNGKFNNYAEIEGGVKLKNIKNESLVNKGSIQDLDIYDENGCKIENESSGEIWFVTIVEEANDVYIVNSGDITKISNNSSSTIIRNSGNIDTVTGKKEPAISGNKPKVNDTEKETKAARGLNPRVEACSVPKKDYVMITIPNSPKDSRYKIYYRVVYNKPYAMDVGDKINIGEWTVAPTDEEPFLEKAKNGCYVEAVEVNTSTKEVSRWGRTNATDDGF

SEQ ID NO: 53030 - protein, 646 aa, Clostridium difficile
MLFKGGLLVMRESIDLEKESFFNRLFKKYKFRHLTLLILDICSVLVAFRMSLSLTGNLNAFTTNDIIISVCIYIVLHIVSFRLFKCYNTLWRYAGEEEIISIFVATLAYLIPIYIINKLLGFDYPIMFYVLNTIFIIMFTSGARIAYRAIRIVMNKTYSRGKVSNILIIGAGDAGEMVIQELKRNPELKKVAVAIIDDDKNKIGRIIHNVKIVGTTSDIKDVVEKYNVDEIIFSIANIEKRRKKDIIDICKNTNCKIKTIPGIYEIIDGKVDIKQIREVEIEDLLGREPIKTNLREISNYIEGKVILITGGGGSIGSELCRQIAGFNPKELIIVDNYENNAYSIQQELLRKYKNKLDLKTVIASIREEKRMDEIFNKYKPEVVFHAAAHKHVPLMESSPGEAIKNNIFGTLNIAGLSSKYRAKKFVLISTDKAVNPTNIMGATKRAAEMIIQTMNAESQTEFVAVRFGNVLGSNGSVIPLFKKQIEDGGPVTVTHPDIIRYFMTIPEAVGLVIQAGAMAKGGEIFVLDMGEPVRILDLAKNLIKFSGFEPDVDIKIEFSGLRPGEKLYEELLMSEEGLLDTEHKKIFIGRPIDVDREKITKYLKLLREITNNEEVEKIDGIMRELVPTYIKPEDANIKEIATTREK

SEQ ID NO: 53031 - protein, 675 aa, Clostridium difficile
MMKKTTKLLATGMLSVAMVAPNVALAAENTTANTESNSDININLQRKSVVLGSKSNASVKFKEKLNADSITLNFMCYDMPLEATLNYNEKTDSYEGVINYNKDPEYLNVWELQSIKINGKDEQKVLNKEDLESMGLNLKDYDVTQEFIISDANSTKAVNEYMRKTSAPVKKLAGATRFETAVEISKQGWKDGSSKVVIVNGELAADGITATPLASTYDAPILLANKDDIPESTKAELKRLNPSDVIIIGDDGSVSQKAVSQIKSAVNVNVTRIGGVDRHETSLLIAKEIDKYHDVNKIYIANGYAGEYDALNISSKAGEDQQPIILANKDSVPQGTYNWLSSQGLEEAYYIGGSQSLSSKIIDQISKIAKNGTSKNRVSGADRHETNANVIKTFYPDKELSAMLVAKSDIIVDSITAGPLAAKLKAPILITPKTYVSAYHSTNLSEKTAETVYQIGDGMKDSVINSIASSLSKHNAPTEPDNSGSAAGKTVVIDPGHGGSDSGATSGLNGGAQEKKYTLNTALATTEYLRSKGINVVMTRDTDKTMALGERTALSNTIKPDLFTSIHYNASNGSGNGVEIYYKVKDKNGGTTKTAASNILKRILEKFNMKNRGIKTRTLDNGKDYLYVLRNNNYPAILVECAFIDNKSDMDKLNTAEKVKTMGTQIGIGIEDTVK

SEQ ID NO: 53032 - protein, 279 aa, Clostridium difficile
MDNNDHKNEDGIINILLMGTDARPNEDSSRSDAMMILTIDNKHNDIKLTSLARDSYVDIPGHGKQKLTHAYAYGQADLLIQTIEENFNIDIQNYACVNFESFMYIIDAIGGVEVTVEKGEIRELNKFIPETYKWNKSDDKGSIQYIRNSGKQTLNGYQALSFARIRHNDTAFARDGRQRQIIQAIIKKTETLPVTKYPGLLDAVLPYVKTNMKPNAILSLGAQVLKMGDLNIKQFEFPIDDEIHSTGGIYGKAGWVLRFDPDTLDILHDFIFNDIEFKQ

SEQ ID NO: 53033 - protein, 318 aa, Clostridium difficile
MSGLKKFVIFLALLVIAFPVSIYGYVFTKLKTIQDDSINTEALSSNDYKNEENITNILLLGTDARPGEEVSRSDAMMILTIDNKNKSLKLTSLNRDTYVNIPGRGEQKLTHAYVYGQANLLIETIEENFQLDIQNYAVVDFFSFMDIVDALGGVTVTVDKSEIRELNKFIPETYKWNKNDNKGSLKYIRNSGEQKLNGYQTLAFSRIRKNDSTAERDRRQRSVIQSLINGVKDLSVTKYPNLVNTILPYVKTNMNPNEIISLGKELLSIGNLNLKSMEFPLSTENGRKIGNAGYVIPFEEYELDAMHDFIFKDIMVED

SEQ ID NO: 53034 - protein, 262 aa, Clostridium difficile
MIKLIATDLDGTLLDEKSEINPEFYKVFKKLRERGIMFSAASGRQYQNLIKKFEDIKDDMMFISENGTLVVYKGKEILSNPLNKELVNEIIETTRSIKGKKIVMSGKKYAYIESKEEAFIQEVSTYYAKFKTVEDLTKVEGDILKIAVFDFKGAEHNNNIYFEKFSDRAQVCISGVEWLDLTAKGANKGSAIKKVQKMLDIKYEETMVFGDQLNDVEMMKSAYHSYAMENANEHLKQIARFRAKRNTENGVVDKIKEVIKIG

SEQ ID NO: 53035 - protein, 237 aa, Clostridium difficile
  MISC_FEATURE (14)..(14): X=any amino acid
VDLLYSFIFIYCIXGYSRVVALVKSMDKSNKTSQQQNVNSEQFDLGNEEENKKKKYTVFIDPGHGGNDKGTESKTSNRYEKDLNLQIAKKLANKLSKQKDIQVVVSRTDDTYISLKDRAILANNSSADVLVSIHLNAEKNGNTATGIETWYRNKATDGSKELAQTVQSTIVSYVKVRDRGIVENNFEVLRESNMPAILIECGFLTTPSEEQKIINEKYQDQLAEGIVQGVLSYLDSK

SEQ ID NO: 53036 - protein, 126 aa, Clostridium difficile
MNIFDIGVDIIEIDRIRKAVDKNNRFLEKIFTDREIEYFNSKNFKAESIAGNFAAKEAISKSIGTGIRVFNFKDIEVLRDEMGKPIVKTYNNLAKMCIDYNVLEIKVSISHSKDYAIANAITIIKD

SEQ ID NO: 53037 - protein, 722 aa, Clostridium difficile
MVVKILRSPHAYAKIKDIETSKAEMVDGVECVLTYKDVPKSRFTLAGQTYPEPSPYDRLILEDVVRYVGDEVAIVAAIDEKTAIKAMNLIKVKYEVLTPVLDFEEAIGNKTMVHDEDRHCNFDIGMQREKNIVSHHDYTKGDVEKVLSNCDVVIEETYYTQAQAHAMMETYRAYNYLDHMGRLVVVSSTQIPFHVKRHLSRALEIPASKIRVIKPRIGGGFGGKQTACVEIFSAIVTLKTGKPAKIIYDRKETFNCSTSRHAMRLKVRLGATNDGIIKAIDIKALSDTGAYGEHASTTIGLVGEKTLPMYNKVEATRFIADVVYTNKMPAGALRGYGASQGCFAVESTINMLANKLKMDPTDLRLKNVVTEGETTFAYGKTLNSVDLIKCINKGKELIGWNEKYPCKHLDNGKIRSVGMAITMQGSGIQGLDKSSAEIKLNDCGDYTLMIGSTDMGTGSDTILAQMAAEVLDTSIENITVISADTDLVPYDPGSYASSTTYVTGMAVVKAAQDLREKIISAGATKLGVEKDEVEFDGIKLTSKKGSTLLFDIAVDSTIGPDTNQLIGLASHGSPVSPPPFIAGFAETEIDTETGKVDLVNYVAVVDCGTVINKNLAKIQVEGGIVQGIGMALFEEVRYTEKGSMDTNTFMQYKIPARCDIGNVKVDFVETYEPTGPFGAKSVGEVVINTPLPAIQEAVFNGIGVRINTLPITPEKVFMEMNK

SEQ ID NO: 53038 - protein, 86 aa, Clostridium difficile
MEKVVSIKNASGLHARPAGMFVKKAAEFKSTVEVVAKDKTVNAKSIMGIMSLGLAQGEELKLVVNGEDEEVALAAMVELVESGFGE

SEQ ID NO: 53039 - protein, 570 aa, Clostridium difficile
MAYKGIGASPGVALGKALVVEHSELVIEKKSIDNVEAEIAKLEDAVAVSKEELVKVKEKASEELGAEEAEIFEAHLLVLEDPELIGSAIDKIKTESVNAEYALNEIKEMFVSMFESMDNEYMKERAADIKDVTNRILRHILGIKVVDLSALSEEVVLIAHDLTPSDTATMNKKMVLGFLTDIGGRTSHTAIMSRTLEIAAIVGLNDITSKVKDGDFVVFNGDTGEVIVNPDEETINKYTELKAKYEDERKALQLLKGKPSVTLDGKHVELAGNIGTPNDIEGLIKNDAEGVGLYRTEFLYMDRDSFPTEEIQYEAYKAVLEGMDGKPIVIRTLDIGGDKELSYLSMEPEMNPFLGYRAIRLCLDRKDIFKTQLRALYRASVHGRLRIMFPMISSLEELLQAKEVVKEVLAELDSEGVAYAKDVEIGMMIEVPSAAVISDVLAKHVDFFSIGTNDLIQYTCAVDRMNQKISYLYNQFNPAVLRLIKTVIDNAHKEGKWAGMCGESAGDQKMIPILLGMGLDEFSMSPISILPARKLITSVKESDMKKLADDVLNMGTAEEIKSYIEKTFNI

SEQ ID NO: 53040 - protein, 487 aa, Clostridium difficile
MVIKFNQKVRRTLSVAILFMVLIIGCFIEKDDSLETYKEKTNSKINQYNMDVIFDDETKRLMCNQNVDYINNTKSNIDKIYFHIYPNAFSKKDFAPFEKSEMTRAYPNGFNEGYIDIKNILNNNSKMEYKIKGDKNDILEIELGKELKPNERMSLDIKYNVKIPNSIGRFGYGENTINVTNWFPIACVNDERGWNLKSYETIGDPFYSETSDFHVKLLIPNKYKIAHTGKLIDDKHDNKKMLYEIEAENVRDFAFILSSKFDVNKVDSKGVAINTYNLNKKLSKKATEVAKDSINIFSELFGKYPYKEFSVVASDFFIGGMEYPMLVMIDQSLYNEKNEFLLEYVIAHETAHQWWYSAVGNDEISEPWLDEALTEYSTIVYFEQKYGKDMANKLIKTMEIQTKSYLSENIFKPANEYKNSTEYSLNVYTKGAIAFNEIRKEVGDKVFFETLNEYYNKYKHKNANGRAFVELWNSKGVDINKIISECK

SEQ ID NO: 53041 - protein, 141 aa, Clostridium difficile
MPTKEAQAMANSKNLDLVQISPNANPPVCKIMDYGKFRYEQARKEKEAKKKQKTIVVKEVRLRPGIEQNDLNTKANNAIKFLKKGDKVKVELRFRGRELGHKDIGKEVMLKFLDIIKEFGEPTKAPAFEGNNMVVIIDPKK

SEQ ID NO: 53042 - protein, 379 aa, Clostridium difficile
MIKENFMYAVRYELIKTCKQSGARLGRLHTPHGIIETPIFMPVGTQATVKSMTPEELKEIGSQIILSNTYHLYMRPGHELIKRAGGLHKFMNWDKPILTDSGGFQVFSLGPLRKIKEEGVEFRSHLDGSKHFLTPEKAMEIQNALGSDIMMAFDECAPYPSDREYVKNSLERTTRWLKRCKDAHNNTDKQALFGIIQGGMYKDLREQSAKEITNIDLPGYAIGGLSVGEPKPLMYDVLEHTTPLMPKDKPRYLMGVGSPDDLVEGVIRGVDMFDCVLPTRIARNGTAMTSQGKVVVRNATYAEDFTPLDPECDCYACKNYSRAYIRHLIKANEILGARLITTHNLHFLLNLMKQIRQAIMEDRLLDFRNEFFAKYGYEI

SEQ ID NO: 53043 - protein, 631 aa, Clostridium difficile
MLSNKKRSMAIVMAGATVMSAAAPIFADNTVTENVDKNYTVSAKDSAKLIEEVRKALEVKFEDTKAGANVNDRVYDIKVDNVNLTNATQLQNKINSLTEGQSLKVTIQDKGHQVLGGKVVDYKIENYKTAQEIVDAVNAYNATLAEDSDNKLTATIKSTNTVEVKRAKDSANVITLNVGDQHLDFSKVITSEEGTFEGYEKRYSDIDSKELHTVTVKNADLQDISAEELFDGIRLTTLGREIVNKVKNGYALTFENEAILTQEQEDSDDKDKPEKSSFDIVLSKANEKPETISVSSKNHKLVRDLHKVLTDVKDGKELKVEVLSGDSRFTTAVEVSKERFKDGEAEAIILVGEDAIVDGLASAPLASQKNAPILLSKKDSLPSEIEAEILRVLGSNLSSKKIYIVGGESKVSKETEEKLSKLGVSKVERVSGEDRFETSLEIAKQLKDTFKTAFVVGGNGEADAMSISARAAQFGAPIIVTGNELDANAEKLLKGKELEIVGGENSVSKEVEDKLVDIDLNNKVERLAGENRKDTNAKVINKYYAGATKAYVAKDGYVGGNGQLVDALTAAPLAASSKAPIVLTTEELSKSQEEVVELRLKNATKLVQIGEGIAKNAIEKIAEKINLFTKN

SEQ ID NO: 53044 - protein, 477 aa, Clostridium difficile
MKSTLGVENNMKNSKKILAIGLTLFLVMVNTPMVSALTSVEQIKGNDRYETAAKIADKQNYNTAILINSDNSLADGLSASGLAGALNAPILMTKQNQIPNTTMERLNKAKTVYIIGSESTISKNVENQLLSKKKVVQRIFGENRFDTSIKIAEKIKEIKPIDKVIIANGFTGEADAISASPVAARDGVPIILTDGNSVGFDTTGLKSYALGSSEIISDELVKSTNSIRLGGTDRFETNKIVIQEFYKNSKEFYLSKGLQLTDALAASTIAKNAPVVLVENGSNKSILSGADKLTVLGGINQNVIKQCINQASPNQQGLYYNPNDRAFKERIKGKVYALTKQYRKENGVRALSVASRLEGLANDWSNLMANKKTLSHTINGKNSYSTFLKYLDWSEIKPGYIAVQGENIIKYKIPDKPVYTNRDADDIGNFIFNEWKTNPEEGTNMLHKGYEIMGFGIAITGDKNLYATHEFYGRYKE

SEQ ID NO: 53045 - protein, 790 aa, Clostridium difficile
MDNRKGGTYMSVIDSILDKADEQEIKKLNVIVDKIDALEDSMKNLSYEELKDMTAIFKNRLKKGETLDDILPEAFAVVREVSKRKLGMRQYRVQLIGGIVIHQGKIAEMKTGEGKTLVEVAPVYLNALTGKGVHVITVNDYLAERDKELMSPVYESLGMTVGVIISNQDPNIRKQQYKCDITYGTNSEFGFDYLRDNMVPDLSHKVQRELNFAIVDEVDSILIDEARTPLIIAGDGDEDLKLYELANSFVKTVKEEDFELDRKDKTIALTASGISKAESFFGITNLTDIKNIELYHHINQALRGHKLMEKDVDYVISNGEVMIVDEFTGRVMDGRRYTDGLHQAIEAKEGVEIKNESKTMATVTYQNFFRLYEKLSGMTGTAKTEEGEFESIYKLNVVQIPTNRPVIRADLHDKVFKTEEEKYSAVVEEIIRIHKTRQPILVGTVSVEKSEKLSKMLKKQGIKHQVLNAKQHDKEAEIISKAGKLDAITIATNMAGRGTDISLGAGDKEEEQEVKDLGGLYVIGTERHESRRIDNQLRGRSGRQGDPGTSRFFVSLEDDVIKLYGGKTIEKLMKRTSSNENTAIESKALTRAIERAQKGVEGKNFEIRKNVLKYDDTINEQRKVIYNERNKVLNDEDIQEDIQKMVKDIIQEAGETYLIGRKRDYYGYFKHLYSTFMPADTLLIPGVDKKSVQEIIDSTYEISKRVYDLKKMMLGIDKVAELEKTVLLKVVDQYWIDHIDAMEQLKQYIGLKSYAQKDPFKEYALEGYDMFEALNKNIREATVQYLYKFN

SEQ ID NO: 53046 - protein, 475 aa, Clostridium difficile
MTNSFKKDDNRKKITVLFVVIAMTFMATLDSSIINVALPVLASKLNVSLASIEWVIASYSIIICSTLLFFGRLGDIIGKSRVFQVGTILFTSASLLCGLSNSLTLLIVCRFIQGIGASAYMANNHGIITELFPKESRGKALGILVTAVAIGNMVGPSVGGFILSIFDWNVIFFINIPIGLIVIFLNTKFLPNSKKSSENMDKTGAILQFLGTTLFFSALISAQQTGLLNPYILIALLLSIIFIILFLILEKKHPQPLLDLEIFRNFKFSLNLICALTSFICIASSSILIPFYLQSTMKLPPIQAGLFMILSPLILAIFSPIFGNISDKIKSEKIILIGLLVMSFGFFLMSRLKESSALILFVIYILIISIGQAIFQPANNALIMSSCSRSKLGVVGSINSLVRNLGQVIGITISTTLLYNFMSIKAGYRVNDYVINNDKIFVFGMRNVYIIVTLVCLIGAILIGFYLFKYNKNEQ

SEQ ID NO: 53047 - protein, 864 aa, Clostridium difficile
MDVEKMTLRVQKSLNEAYNEAVKNHNQQVDVIHLFSALINQEDGLIPNIIEKMNISIDSLRNTVNFEIDKLPKVYGEGADSQGVSATRKINEVLIKAESISKEFKDSYISVEHVMLAMMETESKSAVGKILKQYNINKNDFLNILSQVRGSQRVETQDPEGTYDALARYGTNLVDLAKKNKLDPVIGRDEEIRRIIRILSRRTKNNPVLIGEPGVGKTAIVEGLAERIVRGDVPEGLKDKIVFSLDMGALIAGAKYRGEFEERLKAVLKEVQSSDGKIILFIDEIHTIVGAGKTEGSMDAGNLIKPMLARGELNCIGATTFDEYRKYIEKDKALERRFQPVIAEEPTVEDTISILRGLKERFEIHHGVRIHDNAIVAAAKLSHRYIQDRFLPDKAIDLIDEAGAMIRSEIDSLPTELDVVRRKLFTLETEREALLKENDDKSKSRLDDIQKEIAELKSKNDEMTAKYEKEKSQILDIKNLKAQLDEAKGKAEKYEREYDFNKAAEVKYGEIPKLEEQIKQYEENMNDGSENSLLKEEVTEEEISSIVSKWTGIPVTKLVEGEREKLLKLEDELHKRVIGQDEAVTAVSNAVIRARAGLKDERKPIGSFIFLGPTGVGKTELAKTLARNLFDSEDNIIRIDMSEYMEKHAVSRLVGPPPGYVGYEEGGQLTEAVRRAPYSVILFDEIEKAHEDVFNMFLQILDDGRLTDNKGKTVDFKNTLIIMTSNIGSNYLLEAGGNITETTNNLVMNEMKHRFKPEFLNRVDDIIMFKPLDQENIKKIIDIFMKDLKNRLKEKDITIEVTNSAKDVMVREGYDPVYGARPLKRYIGNTLETIIAKKLIAGDVYNGCTIVIDGKDENIEVLVK

SEQ ID NO: 53048 - protein, 124 aa, Clostridium difficile
MNIVISNSSGKPIYEQITTQIKSMIISGELPEGSALPSMRLLAKELRISVITTKRAYSDLERDGFIETVTGKGSFVSSKNMDFVKEEQFRLIEEYLQKAVDTAKSSDITYDELKDILFLLYKGE

SEQ ID NO: 53049 - protein, 395 aa, Clostridium difficile
MNNDNTISKWNEYFIDTYNQPNFVIDYGEGSCFFDTNGNKYIDFTSGYGVSSLGYSNSNLKNALKEQVDKLLHTSNLYFNEPVLCSGEKIINSSGMAKVYFCNSGTEANETAFKIARKYSSDKYGNGRGTIISLKDSFHGRTMMSLMATGMDKYHKYFYPLPEGFKYVERNNIEDLKNNLDSTVCAIILEAIQGEGGVNVLEKDYVLEIVKICQEKDIVVIFDEVQCGIGRTGKLFGYEYFDVKPDIVTVAKGLGAGIPVGGVLVNKKLSKVLGKGDQGTTFGGNLLAMVAASVVLDEISKDGFYNEVLEKGNYIRKSIESFNNKVVLKTKGIGLMIGIETNIESSIIEEKARKKGLLILTAGKNVLRFLPPLTISYKEIDEALEILKDILLEIN

SEQ ID NO: 53050 - protein, 59 aa, Clostridium difficile
MSEVRVRENETLDSALRRFKRQCAMSGIMSEVRKREHYDKPSVKRKKKAEAARRKNAKK

SEQ ID NO: 53051 - protein, 66 aa, Clostridium difficile
MNNGIVKWFNNEKGFGFISMEGRDDVFAHFSAIQTSGFKSLEEGQQVSFDIVKGARGPQAENITIL

SEQ ID NO: 53052 - protein, 182 aa, Clostridium difficile
MIRRKVMSVKKEIFDWIKSIAMAIVLAFVILQFIIPSIVSGESMYPTLDDKDYLILNRISYKVGKPEKGDIVVFKTNLVDGETGKKKDLIKRVIATEGDRIKISNSKVYVNGKLLNEPYIHNNYTSGDIDTVVPKGKLFAMGDNRENSNDSRFPDVGMVDEDEVLGKVMVRLLPLDNIGKVD

SEQ ID NO: 53053 - protein, 481 aa, Clostridium difficile
MIDNKYTTYSNPLTDRYCSKDMSYIFSPQFKFSTWRRLWVALAEGEHELGINITEEQLDELRANIDNINFDEARKIEKEVRHDVMSHVKAYGLQCEKAKGIIHLGATSAYVGDNTDVIQMNEALKLLRVKLVNLINNLKEFALKYKDMPALGFTHFQAAQLTTVGKRACLWAQDLILDLEDLNYRIDNMKLRGVKGTTGTQASFLSLFEGDHEKVKELDKKICKKMGYHSSYAVSGQTYTRKLDYQVISILSGIAQSMHKMTNDIRLLQSLKELEEPFEKNQIGSSAMAYKRNPMRSERIASLSKYIISESISPAMVQATQWLERTLDDSANKRLAIPQAFMAADAILEIGINVTDGLVVYENMINRRVNEELPFMATETILMEAVKRGGDRQELHEIIREYSMKAAYRVKHEGKDNNLIELIMNDDSFKMSKEEILSIMDPKNFIGRAPEQVVEFVNEVVEPAIKDYKEDLGKVDVDLRV

SEQ ID NO: 53054 - protein, 806 aa, Clostridium difficile
MILMATKKKKKKKVNTLSFNAEYHNLITIFIGVFLLYSLNSNSMGWIPVLMQNLFKGLFGGLSIAIPFIVIITGLLGFFDGNEYIYRLRKTKLYYIIILFIFVFYGLLNAGTLPVDSPLKGNMFDDVMKLGVSGQGSGLIATTIAYYMSKIFGIAGGWLISIFALILSVMFIFNISIKDLVSNAKSKSKASKDSNLTFKDKIANMKKSAIDMMTDEVDDTTINKKPGFFKGLMSKGLNNDDEEDEYFEEENSDGVDDKTIKIVGFNKAEDEYLEILEGTQSMPELDVLKELQKATNENPVVDTKPEKKVDIAKPNLNIEKTQPMSIVAEPVNEDYSNYKKPSIELLNKVNKKSDENGKKKVLKNASLLEKTLSDFGVEAKINQVTVGPTITRYEIQPSPGVKVSKIVNLTDDIALSLAAKSIRIEAPIPGKSAIGIEVPNEEAQMVGVREVLESEEFNNFNSPLAMGLGKDVAGKIIIGDIGKMPHLLIAGSTGSGKSVCVNTLISSILYKANPDEVKLLLIDPKVVELANYNGIPHLLIPVVTDPKKAANALNWAVTEMNRRYKLFADAQVKDVTSYNEKAEEKLPKIVIIIDELADLMMASANDVEDYICRLAQMARAAGMHLIVATQRPSVDVITGVIKANIPSRIAFAVSSQTDSRTILDMGGAEKLLGKGDMLFYPLGAAKPVRLQGAFISESESEKVIDFVKSQVKDGIKYEEDIIETISKVNTSKGSDEDEFLSEAIEFVVESGQASASMLQRRFKIGFNRAARLIDSMEERGIIGASEGSKPRKVLISKQDLQNLEGE

SEQ ID NO: 53055 - protein, 444 aa, Clostridium difficile
MLKIALESLGCSKNLVDAEIMMGILNNKGYKLIGDFEEADVIIVNTCGFIESAKQESIDTIINFAELKKTGNLKLLIVTGCLAQRYSEELKTEIPEIDAIVGTGSYQNIDKILKELSEIHQIVSLNDIEFVFNEDLPRYISTPSYMAYLKIGEGCSNNCTYCIIPKLRGKYRSRKFEDIIKEAKKLAESGVKELVVIAQDTTKYGFDLYGKERLSELLEELAKIDGFKWIRVMYSYPESITEELIQVIKKYDNICSYFDMPIQHASNNILKLMNRKTTKEDILNKINLIRSNIPDAILRTTIIVGFPGETEDDFKQLVDFVEEVKFDRLGAFAYSREEDTPADRLPNHIDEEVKIQRRDTLMMIQQKISEELNDKKIGKTYEVLIEEQIEDNVYTGRTQGDAEEIDSIVYVKSVDNLEVGEFVSVQINDAMEYDLMGDVLYELA

SEQ ID NO: 53056 - protein, 183 aa, Clostridium difficile
MFYMNLPNKLTLFRIFLIPVFVLIMLLNVPNKFLIACIICIIASITDALDGKIARKYNLVTDFGKFMDPLADKLLVISALTCMIEDHLVSSWMVIIIVARELTVSILRAIAAADGKVIAAGNSGKLKTITQMVSIVFLLLGAQFENVLILNIGEILILIATLLTLYSGWEYLYKNKELFMSSK

SEQ ID NO: 53057 - protein, 354 aa, Clostridium difficile
MKGWYRDECDQEKLKALNEALGKIEKDFGKGSVMKLGEATSMSIDVISTGAIGLDIAIGIGGLPRGRIVEVYGPESSGKTTVALSCVASAQKDGGIAAFIDAEHALDPVYAKALGVDVDNLIISQPDTGEQALEIAEALIRSGAIDIIVIDSVAALVPKAEIDGDMGDSHVGLQARLMSQALRKLTGSIKKSNCVAIFINQLREKVGIMFGNPETTTGGRALKFYSSVRLDVRKIDTIKQGDKVIGSRTRVKVVKNKVAPPFKQAEFDIMYGEGISKIGDLLDIAADVDIVKKSGSWYSYNDTKLGQGRENVKKFLEDNLDLTTEIDEKVRAFYNLNEEHEESGTSVSKEIVEE

SEQ ID NO: 53058 - protein, 520 aa, Clostridium difficile
MGLLTKEVDVIDSVVMIVIGAAVGIIAGYFVRKNISEAKIGQAENLAKEIIDKAHHDSETVQKEKLLEAKEEIHKWRTEAERENRERRTEVQKYEKRVVQKEEVLDRKLQNLESKEVNLSEKLKVVEKKEEEVEVIKTQQLEKLESISGITSDKAKEIILTNAERDVRREMSIMIKEIESQAKEEADKKSREIIGYAIQKCAADHVAETTVTVVSLPNDEMKGRIIGREGRNIRTLETLTGIDLIIDDTPEAVILSGFDPIRREIARIALEKLIADGRIHPARIEEMVEKARKEVDNIIKEYGEQAAFETSVHGIHPELIRLLGRLNYRTSYGQNVLKHSIEVAHIAGIMAAEIGADIRLAKRAGLLHDIGKAVDHEMEGTHVEIGMDLLRRYKESKEVIHAMSTHHGDYEPQTVEAVLVTAADAISAARPGARRETLEAYIKRLEKLEEIANSYEGVEKSFAIQAGREIRIMVKPEAINDEEIHLLARDMTKKIEDELEYPGQIKVSIIRETRAIEYAK

SEQ ID NO: 53059 - protein, 313 aa, Clostridium difficile
MTNLKKELNWLKEPDKFSLQNALKDLDNAYKKFFKEKAGFPKFKSKKINRFSYKTNFTNGNIMYCGQHIKLPKLGMVKVRDKQVPKGRILNATISKEPSGRYYVSLCCTDVDIEVFENTNNHIGLDLGIKEFCISSCGDFIENPKYLKKSLNKLAKLQRELSRKTIGSLNRNKARLKVAGLQEHIANQRNDFLQKLSTKLIKENDIICIEDLQVKNMIRNRKLSRLISDVSWSEFIRQLEYKANWYGRQIVKVGKFFASSQICNKCGYKNEEIKDLNIREWICPSCNETHDRDINASINILKEGLRLITIQNK

SEQ ID NO: 53060 - protein, 301 aa, Clostridium difficile
MNKIISILKPTGMTSHDVVSRVRKILNIKKVGHTGTLDPDASGVLPICIGKATKVCEVILNKDKSYICELTLGISTDTYDASGEILKKVDDFKFSNEDIERAFDTQRGEINQLPPIYSALKVNGKRMCDLVRSGRQSEITLKTRRVNIKDIKILSIKGNKVMFYVECSKGTYVRSICHDIGEYLGCGAHMSFLNRTSSGKFDLDNSITLEELELFYENKTLDKYLYDIDYVLDSFNYVVLNPNAIKYYSNGGSIDDKRFLKNNFDKDDEFVRVYSTDNFLGLGKLSKHNNTISVKSDKMFI

SEQ ID NO: 53061 - protein, 309 aa, Clostridium difficile
MVIIKSIKEIANIKESVITIGNFDGVHKGHQVLIGKTVEHAKKENIQSIVFTFANHPVNYFRPNSTKNIISNDDKIKLLEDLGIDIVVIIPFDEYMTKIPAKDFVDEILVKKLKAKKIVIGHDFTFARAKEGNVNLLKSLEHEFGFEVEVIKPIKINDVRVSSTYIRSLVSQGDMANVKEYLGRNYKLEGCVIHSKHLGRTIGFPTANIDLKNNMLVPKRGIYASIVHIGDETYFGATNVGYNPTVNGKTLSIETNILEFDRDIYGENIIVEFLERIRDERKFNSIDDLKNQLYNDTNYVYENYVCKNK

SEQ ID NO: 53062 - protein, 85 aa, Clostridium difficile
MINKSEIIKEYGRAEGDTGSPEVQIALLTARINELNGHLKTHKKDHHSRRGLLKMVGRRRNLLAYLKEKDLEGYRALIAKLGLRK

SEQ ID NO: 53063 - protein, 703 aa, Clostridium difficile
MFEHKIFKMDFAGRELSVEIGKICEMASGSCIVRYSDSMVMVNTTKSAKPRDGIDFFPLSVDYEEKLYSVGKIPGGFLKREGKPSEKAILTSRLIDRPIRPLFPKGFRNDVQVVATVLSVDQDCTPDIVAMIGSSIALSISDIPFNGPTGSVCVGLVDGAFVVNPNAEQREKSSMHLVVSGTKEAIMMVEAGADEVPDEVMLDAILFAHQEIKKIVEFIEGIVAEVGKEKMPVELYHAGEEITQLVREFATDKMKKAVQTFEKLERMENMDRVKEETLAHFEETLEDFEDFVGDIEEVLQDIIKEEVRKLIVHENVRPDNRKLEEIRPIWCETGMIPRAHGSAIFTRGQTQVLNVATLGALGDVQKLDGLDEEENKRYMHHYNFPAYSVGEARPSRGPGRREIGHGALAERALLPVIPSQEEFPYAIRLVSEVLSSNGSTSQASVCGSTLSLLDAGVPIKDMVAGIAMGLIKHDGKVAVLSDIQGMEDHLGDMDFKVAGTEYGITAIQMDIKIDGIDKEILQRALKQAKEGRIHILGEMRKTISQPKPELSPYAPKIVKMQINPDKIKDVIGPGGKIITKIIDETGVKIDIEQTGEVFISGIEIDMIKKAQELINNIVVEPEVGKTYKGKVSRIMNFGAFVEILPGKEGLLHISHIAHERVAKVEDVLNIGDEVEVKVTEIDEKGRVNLSRKVLLPKPEHKNK

SEQ ID NO: 53064 - protein, 431 aa, Clostridium difficile
MISILKRSEKMPLADKIRPKTMNDVIGQSHIIGNGKILSKILQSNFLPNMIFFGPPGVGKTTVAEIIAERSNKSFYKINATNSSLEDIKKVISELGSINNVNGVLLYIDEIQSFNKKQQQSILEFMENGSITLIASTTENPYHYVYKALLSRSTVFEFKPLEKLDVEKGLKRAVEVLNEDSYMDIECNNDAIEDIAILSDGDMRRALNILEVVVYSTKPNKDNITYIDSDVIRASTFNKIINYDKNGDSHYDILSAFQKSIRGSDPQASIHYLARLIKGGDLISICRRLLVIASEDIGLAYPNAIVIVKACVDSAMQLGFPEAKIPLAEATILLATSPKSNSACIAIMKAMDELDKEFVKDIPNSIKDAHYSGSKEIGRGCGYKYPHNFKNHYVKQQYLPDSIKDSIYYIPQENKTEKNIKKYLEYLNSDF

SEQ ID NO: 53065 - protein, 701 aa, Clostridium difficile
MGVYGFMAKTLVIVESPAKAKTIEKFLGKSHYTVKASVGHVRDLPKSKLGVDIENNFEPQYINIRGKGDVIKELKKEAKKSKQVYLATDPDREGEAISWHLAHILNLDESEDCRIEFNEITKDAIKKAIKHPRNIDINLVDAQQARRVLDRLLGYQISPILWQKVRKGLSAGRVQSVTTKLICDREKEIKAFIPKEYWTIDVEAKTVKDKDITLKFYGKNDEKIELENEEAVNEILKEMEGKDLKVEKIESKSRRKSAPKPFTTSMLQQEGANKLFFTTKKTMMIAQELYEGIDIEGEGTVGLISYIRTDSKRISDEAKEKAKGYIVNNLGENYYKNTGDKKEKKDTKKVQDAHEAIRPTSVDRTPESIKASLSKDQYKLYNLIWRRFVASQMEDSVFDILNVECKIGDIVFKATGSKMKFDGYTKVYNFSEREDKILPSIEKGDILNIENILPDQHFTQPPARYTEASLVKTLEELGIGRPSTYAPTIATILNREYVEKQGTSLCPTELGIIVTDILENNFHKFIDVDFTADMESKLDVIEEGNTDWKKIVSESYAPLKEAIEEALENIEKVNMDEETDEICENCGSNMVIKYGRFGKFMACKNYPDCKTTRPIMNKIGVKCPKCEEGDIILRKSKRGKAFYGCSNYPNCDFVAWNKPTGEFCEKCGSYMVEKVTKSETKTVCSNKECNKETKEHNDGKE

SEQ ID NO: 53066 - protein, 255 aa, Clostridium difficile
MQDKSVREIKEIIETLEVEKYMEYIELLRVDERKSVQGLAIKLAKKLDNIRKEEERLETINIFENEGYDKGYLYIGGIDEAGRGPLAGPVVASVVVFKKDTKIEGVNDSKKLSEAKRDELFEVIKEEALDYGIGIVNNEEIDEFNILNATYMAMKKAINCLKKAPDYLLVDAATIPGIDISQNPIVKGDSKSISIAAASILAKVTRDSIMYQYDRVYPEYGFKSHKGYGTKEHYEAIEKYGITPIHRKSFLKNIL

SEQ ID NO: 53067 - protein, 141 aa, Clostridium difficile
MLDGRIMGLDVGDKTIGVAVSDLMGLTAQGVKTIKRVGKKKDIEELKAIIKEKQVNKIVSGLPKNMNGTLGPQGEKVIKFCELVKAETGIDVEFWDERLSTVAAERSLLEADVSRQKRKKVIDMLAAVIILQGYLDFKINS

SEQ ID NO: 53068 - protein, 85 aa, Clostridium difficile
MEKDLDYTMKFEGIPEDRMSVGDTIDFVYKALVEKGYNPINQIIGYLLSGDSSYITSHKNARAIIKKFERDEILEEVITHYLNRK

SEQ ID NO: 53069 - protein, 879 aa, Clostridium difficile
MEKMGLNEIRSKFLEFFESKGHYVANSYSLVPNNDKSLLLINSGMAPLKNYFSGVEVPPSVRMCTSQKCIRTGDIENVGITARHATFFEMMGNFSFGDYFKRESIKWGWEFVTEWLNIPEDKIWVTVYEEDDDSYDIWAKEMNFPEERMVRLGKDDNFWEIGTGPCGPCSEIYFDRGEEYGCDNPDCKPGCDCDRYLEFWNHVFTQFDRDEEGNYSLLENKNIDTGMGLERMGCIMQGVDTIFEVDTIKSILEAVEKLTGVKYGENPKNDISIRIITDHIRAVTFLVSDGVLPSNEGRGYVLRRLLRRAARHGKLLGVKELFLQKLIDEVIKVNDKAYPVLVEKESYIKKVVGIEEEKFNETIDQGTEILNSYIEVLKNEGKTVLSGQEAFKLYDTYGFPIDLTKEILEEEHLSVDEEAFNEEMEKQKERARNARGNMDGESWKEDPLSKLESTVDSTFNGYSEIYGEGTIEAIVKDDELVQSAEEGDKVSIVLDNTTFYPEGGGQVGDCGLITNENLVLEVLNTKKGANNSIKHIGIIKSGRISNGDKVKTLVDRETRMSAARNHSATHLLHKALREVLGEHVNQAGSLVTPERLRFDITHFEAISNEELKVIEEKVNNVILSSLDIKCDIMNIKEAKEKGATALFGEKYGDEVRVVSMGDYSTELCGGTHLTNTSQVGMFKILSEGGVAAGVRRIEAITGKAVYEYLKERDGIISEVCVNLKSKEDNLIQRISSLLEENKNLSKELHDMKAKMSLQSVDSIFDSKVEVNGVNLITNKFEGMDMDTLRETADNLRDKLGSGVVVLANVVDDKVNFVVTATKDVLDKGIHSGNIVREVAKIAGGKGGGRPNMAQAGASDVSKVDQALSYASEVIKTQVK

SEQ ID NO: 53070 - protein, 361 aa, Clostridium difficile
MFMNKKVMIGMSGGVDSSVAAYLLKQQGYDVIGVTMKLWQDDDVVEIEGGCCSLSAVEDARRVANKIGIPFYVLNFREVFKEKVIDYFIDEYLEGKTPNPCIACNKHIKFDDFYKKARQIGCDYVATGHYAKIEKDESTGRYLLKKSVTDKKDQTYALYNLTQEQLEHTLLPIGDYEKDRVREIAKEMGMAVHNKPDSQEICFVKDNDYANYVKKHSKKRIEEGFFVDTKGNILGKHKGILYYTIGQRKGLGITFGKPMFVIDINPINNTIVLGDNEDLFKKELIAKDVNFISIDTLEEPLRVQAKIRYSAKPSPATIHRVGEDTIKIVFDEAQRAITKGQSVVMYDGDIVVGGGIIEKSL

SEQ ID NO: 53071 - protein, 146 aa, Clostridium difficile
MQYSDKVMEHFMNPRNMGEIDNASGVGEVGNPTCGDIMKIFLDIDGDVIKDVKFKTFGCGSAIASSSMATEMIKGKTIKDALELTNKAVAEALDGLPPVKMHCSVLAEQAVKAALIDYAQKNNIHIPELDGYVIDDAHDHDVEEEE

SEQ ID NO: 53072 - protein, 148 aa, Clostridium difficile
MKLSTKGRYGLKAMFELALNQDNGPVSLKFIAKKQKISDQYLEQIFSSLKKSGLVKSVRGAQGGYLLSKNAEDITVGDILVVLEGPVALSDCVLDEDVCENSNMCVTKIVWEKMKKGIEDVIDSITLKDMINDYNKNKLENDITNIKK

SEQ ID NO: 53073 - protein, 425 aa, Clostridium difficile
MGMTMTQKILAKHAKLNEVKKGQLIEADLDVVLGNDITSPVAIREFEKLGIEDVYDKTKVVMVLDHFTPNKDIKSAEQCKFTRSFAKSKGVVNFFDVGDMGIEHVLLPEKGIVTAGDVIIGADSHTCTYGALGAFSTGVGSTDMGAGMATGKCWFKVPGAIKFVLKNKPNKWISGKDIILHIIGEIGVDGALYKSMEFCGDGVEYLSMDDRFTICNMAIEAGAKNGIFPVDDKTMEYINSHKCSTMTKDVNIYEADEDAVYDEVYEIDLAKLKETVAFPHLPENTRTVDEIDKDIKIDQVVIGSCTNGRISDLEVVAEIMKGKKVADGVRVMIFPGTQKVYLEAIEKGYITTFIEAGAAVSTPTCGPCLGGHMGILAAGEKSISTTNRNFVGRMGHVDSEVYLASPAVAAASAITGKISKPSEII

SEQ ID NO: 53074 - protein, 358 aa, Clostridium difficile
MSKKLFIPGPIDVKEEVLQKMATPMIGHRGKDASMLQKSISEKMQKLFYTNNTILLSTSSGTGLMEGSIRSCTSKKAAVFSCGSFGDRWYKMAVANNVPADIFKVELGEATTPEMVDKVLSTGEYDLITVTHNETSTGIRNPIEEIGEVVKKYEDVIYCVDTVSSAGGIKVEVDKIGIDICITSVQKALGLPPGMSICTFSQKAIDRAKQVPFRGVYLDLLAMYEYLIKKNYQYPSTPSLSHMFALDFQLDNILDEGLDNRFNRHEDMANLVRNWAKKHFQIFTNENHLSNTLTVIENTQGISVSNLNSKLQERGFQIANGYGDLKEKTFRISHMGDYTVEDVQELLDNIDDILGFNK

SEQ ID NO: 53075 - protein, 350 aa, Clostridium difficile
MIKFKKAISLIAVGMMIVTLFTGCNKATDSTKVLNVYNVGDYIDESLIDKFEKETGIDVQYSTYDTNEMMYQKVKSGSTHYDLVFPSDYMVEKMKNEGLLEKLDFKNIPNMKYLDKSFLNPVYDKTNEYSVAYMWGTLGILYNKKEVKDPMDSWNILWNPKYKGNIMMFDSVRDTIGITLKKLGYSMNSVNPKEINEAKNLLMKQKDLVLAYVNDEGKDRLLGGEVAMGMLYSGDAVTLMEQNPDLDYAIPKEGTNKWVDAMCVPTTAQNKKEAELFINFLLDPENAKVNAEYIGYSTPNTGALKLLDPEITQNPVAYPSKEVLDKCETFEDIGENIKLYDKAWIELKSK

SEQ ID NO: 53076 - protein, 644 aa, Clostridium difficile
MENKFLPISKQDMIDRGWEELDFVLVTGDAYVDHHSFGTAIISRVLESAGYKVGIIAQPDWRTTDDFMKLGKPRLAFLVNAGNMDSMVNHYSVSKKHREKDMYSPGGKMGYRPDRATIVYCNKIREAYSDVAIVIGGIEASLRRFAHYDYWSDKVRKSMLIDSGADLLVYGMSEKQIVEVANALNDGYDPKYIRHIDGTCYISDTLEEIYDKYILIPSYKEICEDKMKYVEAFKIQYDEQDPFRGNIIVQPHGSKYLVQNKPEKPLSREELDEVYGLPYQKTYHPVYEKFGGIPAIEEVKFSIVSSRGCFGSCSFCAITFHQGRAVQSRSEKSIIDEAIGITNLDDFKGYIHDVGGPTANFRRPACKKQITKGACKNRQCLSPSPCKNLDADHSEYLHLLRAVRKLPKIKKVFVRSGIRYDYVMADKNNKFLRELIEHHVSGQLKVAPEHISEEVLKYMQKPAGKTYDKFRQKFFAINEELGKKQYLIPYLMSSHPGSTLNSAIELAEYLRDTHYQPEQVQDFYPTPGTLSTTMFYTGIDPLTMKPVYVPKSKRDKAMQRALLQYRAPRNYDLVYSALVEAGREDLIGFGHRCLIKPKNEKPYFNRNNSKKNVSKGTNKNKKTNTNNRSNKNQQKSSTKKKKKH

SEQ ID NO: 53077 - protein, 418 aa, Clostridium difficile
MRDLNVSEYLFVFSLFSIWSLLLINIILAMGGYIFYFKNFDKEIKEIDEYPMISILVPAHNEAKVIGRTVESLLLLNYPKSKMELIVINDNSSDNSKEILENIKDRYNNYNFTIINTDSLTGGKGKSNALNIGYTISKGDFIAVYDADNTPDKNALRYLVQTIVMNDELGAVIGKFRTRNKNKNLLTKFINIETLSFQWMSQAGRWQLFNLCTIPGTNFILRRSIIEEIGGWDSKAIAEDTEISFRIYKLGYKIKLVPQSITWEQEPETVKVWIKQRTRWAKGNIYVLMKYIKNIFKQGRNKIVFDIAYFFSVYFLFLTSVIISDILFVLSISKLVEISIPINFFLIWILSYLLFIIEVSISLTIEKGEATIENIFIVAIMYFTYSQLWLFVAIKGMIEYLKDIIFKREVKWYKTERF

SEQ ID NO: 53078 - protein, 374 aa, Clostridium difficile
MNDIKVMTVFGTRPEAIKVAPLIKELEKRENIKSIVCVTAQHREMLDQVIETFNINVDYDLDIMEKGQSLNDITCKILNKLPLILNKENPNIILVHGDTTTTLATSLTAFYNKTLVGHIEAGLRTYDKYSPFPEELNRQLTGIIADMHFAPTNLARKNLISEGKPNNNIFVTGNTAIDALKMTIKENYNHPIIDEIGNDRMILLTSHRRENLGKPMKNIFRAIKRIVDDFEDVQIVYPIHLNPKIRTIADEIFGKFPEKIHIIEPLDVADFHNFLNKSYMIMTDSGGIQEEAPSLGKPVLVLRDKTERTEGIEAKTLKLVGTNEDRIYNSVSDLLINKDNYVQMSKASNPYGDGNASKYIVDIIIKKFNCKYLN

SEQ ID NO: 53079 - protein, 182 aa, Clostridium difficile
MIKITTPVNEIDIAKLNCGDTISLSGILYTARDAAHKRLIDCINKGEELPFDVYGQGIYYVGPTPTKPGEVIGAAGPTTSYRMDDLTIPLLERGLRLMIGKGKRSDEVIEGMQKYGAVYLAAIGGAGAYISNSIKSCEIIAYEDLGAEAIRKIVVEDLKLTVAIDSYGNNIYEQGRAIYECK

SEQ ID NO: 53080 - protein, 249 aa, Clostridium difficile
MRVLVCKDYDGMSKKAAEMIAAQIVLKPNSILGLATGSTPVGMYRDLVKKYNDNIVDFSDVMSFNLDEYYKLPISNDQSYDYFMKENLFNHVNIKPENTHLPNGMADDIEKECMNYEASIDAAGGIDVQVLGIGRNAHIGFNEPDTKFAKRTHVVELTESTIEANARFFKSREDVPKKAVSMGIGSILKSKKILLLASGEEKADAVYNTVYGDITPEVPGSILQLHKDTIVIVDEAAASKLNPKDYKLV

SEQ ID NO: 53081 - protein, 424 aa, Clostridium difficile
MFIMENDLTMQELLDQQEQVFSKVKVGELTTGKITAVRNDEVQLGLDYGFDGIIPISELNIEKNQYIEDIYHIGDEITAVITKVSQKDGTITLSKLQLDKRNDFAELQKAYDEHRIITVNVEKNIDKGVFANYNTYTFFIPISQLDTKFITDTSKFVGLNLEVYIKELDVRKNRLVASHRDVLQERINKEREERRAQIKAEKEAERARIKQEREEEKARIKAAKEDLFNSLEVGQKRDGKVTKIMPYGAFVDIGGIEGLAHINNLAWTRVESVEDVVSEGQEVEVYVLDVNKETKKIALALKDINNDPWDLIAKEVQIDDVVNAKVLRIIEKGAFVQIKEGVDAYLPISELSDTRVAKVTNVVNIGDEVKVKILDFKPKTKRMLVSIKEATREPEEDITEYLEVEESLGSIGELFKDKFKDLEV

SEQ ID NO: 53082 - protein, 437 aa, Clostridium difficile
MIAIKSKYLISSADEIYTNSAVVVENDIIKDILPNEEVEIKYKNIEEIIDKSDAIIMPGFVNGHMHQYGVLSRGIPANVHFTDFEGFLNDYWWPFIENRIGLKEVKATTKASAIELIESGVVAFCDTLEAPNTEEGTLIEQGKILEEIGMKAILSLESCERISFENGLRCLDENSNLIKWSRENSKLINGIMCTHTSFTCSDRFIKKAKEDAKKLNAPMQFHLCESIYEPNYAEKHFGKKAVDYYNDLDILDETVLASQCVKVNDEEIDILKEKGVKVVHMPLSNCEVGGGFSPVPKMIKKGIKVALGTDGYINDFFEVMRGAFLMHKSVEEDASVMPANLVFRMATEHGAYVLGLQNSGKIAVGNKADIIVMEDEFKTPVTLDNIFDQIVVQGKKEFISNVYIDGRHILKEKQLVDLDKKAIVKEMKEVACEFWKF

SEQ ID NO: 53083 - protein, 851 aa, Clostridium difficile
MMSLVKFSIQYIKHYKKQSISIVLSIVLSVALLTGIGSLVHSADKSRIEKIREDSGDYHYFYKVDKEQLNKIKKNKKSKEYTVDRLGVTKPKNQIDEPFIIEFLNADSSYLDMTGRKLLKGTLPSKDGEIVLDTYSLNNLNVNKEIGTEINLDGKIYKLCGILSSLSNPETALEGFVNDYFQPKEKDSYIVYVKYDENKNIKKQNYKFMKKFNISKEKTYINWPLSVEFGVKPPKNIEKYNIFEFLKNLELNTNAIILLVGVFGAAAVYSIFHVSILQRISQYGVLEVLGANNKQLLFLLFLELFLLFIVGFPIGCFLGIGVASTIYEQFPHIFLSSDIVPGAFFISEKSIYLGFLFILLLLILIAVRVVHQLNKYSSIESMKNSKITNKKKRILESVKHSNMTKVLSHKYMTQKKGMFIGILFSLSLGGIIFLCSSYSIQLTKNNNELTMKADDGLNSDYQITMQTTDFDVGIPKDKISRLNNVEGISKVYPVRYLFGAMQIKEEQLFWKNFFKPLEKDYRIKTFFDGICTKQNEGGYLLKTNIYGYNNGMLEGLNSYIIDGEINTHDMVKNNKVIVRLPMDGTGMYDAVDINPGDTIKVKVPKTMKPTDEIVKFKEENKNDYTTKEFVVAATVKRVMANNIYFIGDYGMDIVMTNGQMKNNFDIENYNSVSIKKTEDSNSEELSENIKSVVSDVKRCIVTDYTIAIEKNNTYLNQKLLFIYGIVFVLLAISLFHIINTVSYLIFSRRHEFGILRAMGITDNKFLLMMIREGFLYGFYASIIMVIGSVIGQFMIYFMVKRVYLYINPILKINTPLYIGMIILNITISIVAVIIPVRQILKSDIISEINKN

SEQ ID NO: 53084 - protein, 583 aa, Clostridium difficile
MLVYASVAINTYSREGFIMDYTKTYEEWIKGSYFDEDTKLELENIKNNEKEIEDRFYKDLEFGTAGLRGIIEAGTNRINKYTVRRATFGLANYILENTTKEETSRGVVIAHDNRHKSRQFCIESANTLAACGIKAYIFDSLRTTPELSFAVRSLNAIAGIVITASHNPPEYNGYKVYWEDGAQVMPEIANAITEKVNSIHDYSTIPTLTEANKNLVVLLDESQDTKFIEAVKSQIIRKDLVKNVGKSFKIVYTPLCGTGNVPIRRALKEVGFENIIVVPEEENPDPNFAGLDYPNPEEKKALNRGILLAKEKGADLVIATDPDCDRVGVAVKTTTGEYALLTGNQIGGMLTHYIIEGLKENNKLKENPTIIKTIVTSEFGADIAKANNVDVLNVLTGFKFIGEKIKLFEQNKNRSYVFGYEESYGYLVGTHARDKDGVVSSLLISEMAAFYYSKGMSLYDGLIELYKKYGFFKEQTISLTLKGIEGVEKIKEIISYFRENQIDYINSIKVVDKKDYKNGIDNLPKSDVLKYFLEDESWVAIRPSGTEPKLKFYIAVKGASDIEADKKIQGLKKYIDDMVEKLK

SEQ ID NO: 53085 - protein, 532 aa, Clostridium difficile
MSLLVFGHKNPDTDSICSAISLAHLKNKLGIKATAYALGDIRKEAKYALDYFKVDAPEILDNVRIQVRDLNYDKVVPLTPTSSILEAYNLMDEKNVKTLPVTYDDGTFAGIITMKEIAKNLLHQHFTTIHTSLSNICKNLNGTILVDCGEDIKGRVVTLSFGMETLIETLKEGDIAIVGDRYDSIEYAIDTKVKLLILTNHTEISKDLLALAKINGVSVVSVESDNYKTSNVINQCSFLDSIEATENLITFKEDDYMDEIKEIMLETNFRSYPILDDDNKFLGLVSKGHLLNPSKKNVVLVDHNEYAQSADGIEQANIVEIIDHHKLGGISTDVPMSFRVMPVGCNSTIIYQMYKENNVEIPYEIAGLLLSAILSDTLLFKSPTTTDIDKKACEELSKIAKVDMEKYAMDMFKCGTSLDEYTIEEIVNMDFKEFNMSGHRVGIGQVFTLDIDSIFAKKDEFLSYINSTDYDKLILAVTDIIKEGSYLIYKAEDSLIANAFGVEGVQGTFAPGVVSRKKQLVPNLTTAIKNFK

SEQ ID NO: 53086 - protein, 541 aa, Clostridium difficile
MLQVTGVGLRFGDKELFKDVNLKFTKGNCYGIIGANGAGKSTFLKILSGEIEPNTGSISITDKERMSVLKQDHFEYEEETVLNVVIRGHERLWNIMKEKDALYMKEDFNEEDGIKAAELEGEFAELDGWDAETNAEKILMGLGITKDMHYKQMKELVGGEKVKVLLAQSLFGKPEILLMDEPTNHLDFKSINWLNNFIMDLEESIVIIVSHDRHFLNQICTNIVDVDFGKIQMYVGNYDFWYESSQLALQLAKDQNKKTEEKIAQLKEFIARFSSNASKAKQATSRKKQLEKLEVEDIQPSRRRYPYVGFTPAREIGNEVLEVHNLTKTIDGVKVLDNVSFRLDRDDKVVFMGDEIATTALFNIVMGELEPDSGEYKWGVTTSQDYLPKNHNKFFDGVEYSLVDWLRQFSEEKSESFIRGFLGRMLFSGEEALKEAQVISGGEKVRCMLSKLMLSNANVLVLDDPTNHLDLESITSVNKGLEKFPGVLLFTSHDHEFISTIANRIIEITPNGIMDRKMDFDEYLESKEIQDQLAKMYGKDK

SEQ ID NO: 53087 - protein, 776 aa, Clostridium difficile
MLLRRECIMINKGIRKIDSTAIVTGKPLYTEDLIMHKDVLTLKLLRSPHAHAKIKNIDTSKAEKIPGVVGIYTYKDVPQVRYCVPGQTEPEASPYDRVLLEDTVRFIGDEVALVAAEDEKTALKALKMIKVDYEVLKPVFDAREAEGNEVVIHPEKDIVEPYPFGLDAKNNIVSKEFFEFGDVEAKLKESDFVVESSYKTQSQSHCMMETHRSYSYKDINDRIVVVSSLQSPHNVKRILRKVLGIPSSKIRVIKPRIGGGFGGKNIAATDIFTAFVTMKTGRPAKFVFTRSETFVGSNSRHEMFFDVKVGADKEGNLKAIELKSLNNTGAYGGNGVSVSSESGHNTLPIYNDIDAVRFNARTVYTNRLPAGALRGYGATQGIFAIDSAIDELAHKIGMDPLEFRIKNIIDRYTNGKAAEDEILSCELRQCIEKGKKLINWDDKYPCKDIGNNKVRAVGMAVANHGSGIPRVDMATVTIRMDEDGTYKLLSGLADLGQGADTIQAQIAAEALNTTVDRISVYTGDSDLCPYDTGAFASCTTTVTGNATIKTANKLKDILLSVAESKLGFKKEDLELGKDRVFVKNDNSKFVLLEELGRESVGGIGFASDDVPVVLEATESFGMLKKIKPFIAGFAEIELDKNTGEYKVINFACVPDCGTVINPTLARIQVEGGVMMGIGFAMYEDPVFDKDGRLLTDSFLQYKVPTKKEVGNILVDFAENFDPGGPYGAKSLGEIVIHTPAPAIANAIFNATGVRLRELPMTFEKVYMGMKNNNKQL

SEQ ID NO: 53088 - protein, 312 aa, Clostridium difficile
MKFIDLHCDTIAKLMENVETSELKSNKYSVDIDRLKKGDSLAQTFALFVDTEEVKHPFDYCMSMANKFHEEMKKNSDEIALATNYEEIMKNQSEGKLTALLSIEEGAVLEGKLENLKKFYDLGVRMMTISWNHVNELSFPHNKVEYREKGLTDFGREVVHKMNELGMLVDVSHISDGGFYEIAKISSKPIIATHSNSRAMMNHSRNLTDDMIKVLANKGGVTGINFFHLFLSDKSESKLEDMVRHIKHIVNVGGIDVVSLGSDFDGIDSKVEIEDISQMGKLYEPLKKEGFSEDDIEKIYYKNALRVIKEVL

SEQ ID NO: 53089 - protein, 793 aa, Clostridium difficile
MEIRQYLKNNILIFDGAMGTMLQQKGLKLGENPEVFGLQNPDKLIEIHTAYLEAGSNVILTNTFGCNELKLDSKYTVEEVIDNAVLVARKAIENVDNTKPRYVALDIGPIGEMLEPMGTLSFDKAYEIFKRQVLQGVKSGVDVIVIETMMDLYEAKVAVLAAKENSDLPIFCTMTFDEGGRSFTGCMPECMVATIEGLGVDAIGVNCSLGPKQLLPIVEKIASRATVPVMVQANAGLPNIVDGEAIYDVDAKEFFEGVKKFVEVGATIIGGCCGTNPSFIKEISENINSVTKGCIEKIDKCVVCSPSKFVEVQSPTVVGERLNPTGRKSLQEALKNENVDYAINLGLEQVNAGAQILGVNVGLPEIDEKKLMPKLIREIQAVVDTPLQVDSSNVEALEQGLRYYNGRTIVNSVNGKEESLESILPIVKKYGSCVVGLTLDEKGIPKKAEERFEIAKRIVNRAVSYGIKPKDIFIDCLSLTVSAQQEEAIETIKAITMVKTLGVKTILGVSNISFGLPNRKALNASFLTLALGAGLDLAIINPNEYSMMEAINSFKILNNTDKGCINYINQYSNINNSKKSDSSTKIDKDLPLDILVERGLKDEAKNVTLNLLKEKDENYILDEILIPALDKVGKRYDSGDIFLPQLIQSAETVKVSLNTIKETLLSKSSNNVSKGKIIVATVKGDIHDIGKNIVKIMLENYGYEVIDLGKDVPIEEVVEVAKKRNIKLVGLSALMTTTVQSMKDTIQALRDNEINAKVFVGGAVLTEEYAEEMGADYYSKDAKSAVEIAKLNF

SEQ ID NO: 53090 - protein, 397 aa, Clostridium difficile
MDIKLKNKSLLNHMFRPILDIIISCALTSMLILTSMYIIKSLYFNSGISVINQLVYQLRDLRSLIGESLFYPFLFTITSLAIYSMISYKRNKQIVDFIRKTNRKNQKLEIIKSAVNLMDEGNLEKSIDIEYDLDILKDKEKDDIDELAHKINNIVHQLRNITIEERQAQQTKTDLITNVSHDLRTPLTSIMGYLGVIEEGKYKDEVQMMYYVDIAYEKSKNLNVLINDLFELTKMQNNTIKLNKIEINLVELLSQVVSQFEIYFKQEFMVSRINFNEEKLIVKADPNKLVRAFENLITNAVKYGKDGHYVDIVTEKKEDMAVVKVINYGEPIPVLDLPNIFDRFYRVEKSRNRNVGGSGLGLAITKNIVNLHDGEITVSSDKYQTVFEVQLPIIQSA

SEQ ID NO: 53091 - protein, 242 aa, Clostridium difficile
MLEIKNLSFNVESNNEELGIINDVSLSFERGKLIVITGPNGGGKSTIAKLIMGIEKATSGQIILDGEDITNLSITERAKKGIGYAFQQPPRIKGMTVENLLTLAHGKPLSTDVCCQYLTDVGLCSKDYLNREVDNSLSGGEMKRIEIATLFARDLKVSIFDEPEAGIDLWSFGKLNESFKKIHEESNQTIIIISHQERILELADEIIVLQDGSVKSHGTKEAILPEIMCQVNSSCELMKDMN

SEQ ID NO: 53092 - protein, 284 aa, Clostridium difficile
MIKKFLSSKESKYVTISLDDNFKKNSVDDKFWTYCKGCDSHVFRKDIEENSFVCPKCSRHYGLRARKRINLLIDKGTFMEFNSDVEFQNPLNFPKYKEKVDSYKEKTKESEAVVTGYGRINGIKTVICVMNPDFMMGSMGSIVGEKITYSIEYAAENNLPIIICSASGGARMQEGMVSLMQMAKTSQALSKLEEKSLPYISVLTDPTTGGVTASFAMLGDIIISEPNTLIGFAGPRVIEQTINQKLPEGFQTSEFLLEKGFIDMIVDRRKMKEVLYQILAMHKK

SEQ ID NO: 53093 - protein, 320 aa, Clostridium difficile
MTLTLRNCIYFVLKEMVNMNIIEIRSDKIYKKIMDAPINKKEDIYRYELMKPFEFKWKCMNVPIVARQKGGYDVIIASEMLGVLSPKDIDEKQKKNINVLSADKIWATCKETIENSINAFIKEGYDLNIKDYKYSILLANPNSPYTILSDGYWGDGGIPGYIFLSLVPNEYTINRLPVLIAHECNHNIRFQFIEWNNNITLEEMMINEGLAENFATWMFGEEMLGPWVSRTDIETLNTYIKPIIKSALKETGFQNITSYLYGDDIAKMQGYFPVGLPYCAGYACGYYMIKYYLEKTNKSIIEATLLPYSEIIEAVKEFWE

SEQ ID NO: 53094 - protein, 509 aa, Clostridium difficile
MKNNQQSNEEAQIQEDLSEVLQVRRDKLKKLQESGRDPFKESRYDRTHYSMDIKDNFDSLEGKTTKIAGRIMSKRIQGKAGFIDIQDQEGRIQSYVRLDAIGEEEYSVFSTYDIGDIVGIEGEIFKTKKGEISVKAKSVVLLCKSLQVLPEKYHGLKDQELRYRQRYVDLIVNPEVKNAFLIRTKALKALRAYLDDRGFLEVETPILNTIAGGANARPFITNHNTLHIPMYLRIANELYLKRLIVGGFDKVYEMGRMFRNEGMDLKHNPEYTAIELYQAYADYTDMMEITENVIAHMAEVATGSMIVNYQGTEINFTPPWKRMSMEDCVKEYSGVDFSTINTDEEALEVAREKGIEIKPGMRRGEVINAFFEEFGEDKLIQPTFITHHPVEVSPLSKRNVEDPRRTDRFEAFANKWELANAFSELNDPIDQKGRFIDQLRKRELGDDEAFEMDEDFLKALEVGLPPTGGLGIGIDRVIMLLTNSPSIRDVLLFPTMKLIDNNSNKEEEN

SEQ ID NO: 53095 - protein, 322 aa, Clostridium difficile
MKIGNLELKNKVFLSPMAGVTDLPFRLICKEQGCGLLYTEMINGKALCYDDENTKKMLKIEEEEHPVAVQIFGSEPEFMGRAAEIMNDYSNEILDINMGCPAPKVVKNGDGSALMKNPKLAEEVLRAVVKNSKKPVTLKIRKGWDDNSVNAVEIAKIAEDCGISALAIHGRTREQFYTGKADWDIIAEIKKNLSIPVIGNGDVFTIEDSINMLDKTGCDAIMIGRGAQGNPWIFKRINHYMNTGEILPEPTLNEKISTAIKHLKLAVEEHGEYVAVREMRKHIAWYLKGLRNSAKLRDEINKIEDYQEVVSKLEYYMEDSLT

SEQ ID NO: 53096 - protein, 664 aa, Clostridium difficile
MYERRASILNKLLKGAGFYLLVFIIIVGIVQFSGKPTEKIKDLKFSEVYRELTDENISRLYFVNQTSVEGTIKDTNTKFKSYVPTEVMGNKLADEVLDQAKAGKLTFGGEAKPSTPWFVEMLPTLLLIFFMVIIWFVFMNQSQGGGGKVMSFGKSKAKVHKDDEKTRVTFKDVAGLDEEKEDLQEVVDFLKNPKKYIELGARIPKGMLMVGPPGTGKTYLSRAVAGEAGVPFFSISGSDFVEMFVGVGASRVRDLFEQAKKSAPAIIFIDEIDAVGRKRGAGLGGGHDEREQTLNQLLVEMDGFGVNQGIIIMAATNRPDILDPALLRPGRFDRQVVVGTPDVKGREAIFKVHSRNKPLSDDVKMDVLARRTPGFTPADIENLMNEAAILTARKREKKIKMETIEEAITKVIAGVAKKSKVISEKERRLTAYHEGGHAVCAHVLEEVSPVHQVTIVPRGRAGGFTMQLPVEDKFYATKNEMKENIVVLLGGRVAEELVLKDVSTGASNDLERVTATARSMVTKYGMSSKLGPMSFDSDDEVFLGNSFSSKRNYSEEVAFEIDQETKRIVDGAYDKTRSILQENMDRLEYVAQALLIYETLDAEQFVKAFNKELPLNEIENAVTEENSSKEVEEQLTIKLEKDEEERNNVIDINKNLEDKSDKDK

SEQ ID NO: 53097 - protein, 462 aa, Clostridium difficile
MIFDKVLSTINKHNLIQKGDKIVLGLSGGPDSVCLLHVLNRLKKDFNIEIYAAHLNHQIRGIEAQKDALYVSKLCEDMGIIFFVKSINVPKYCENEGLSLEEGARKLRYEMFYEIKDKIKANKIAIGHNLNDQAETVMMRIMRGTGLKGLKGIDYIRDNCIIRPILDVERNEIEEYCEAYNLNPRIDKTNLENIYTRNKIRLDLLPYMKDNFNSNVIESIVRMSNSLKSDNDYIEKEAEAKFREVSNIKEKGFVEINLDDFVCLHDAIKVRVLRNSIKHILGDTNFVDQRHIEDIMSLEDNSKVNKMLTLPRNIFVYRKKDSIILTNEEIVNEEIEFYYNVPSNGFIKIKELKQIIETQVMSIDRYKSMKLDNSSKGFDFNKVKGGIVIRSRRQGDKIKLAMGSKKVKDLFIDLKIPREERCKIPIITDSEGIICVGDYKISENYKIDENTKEVLKINFNKL

SEQ ID NO: 53098 - protein, 268 aa, Clostridium difficile
MNNKPIGVFDSGLGGLTVLKEIMKILPNEDIIYFGDTARIPYGSRSKETIIKYTFQAINFLKTKGVKAIVIACNTATARSLKEAQEKYDIPIIGVIEAGARTAVSSTKNKIVGIIGTEGTISSKAYNLEISKIDESIEIVNKACPLFVPIVEEGWANTEVAKLTAKIYLQELKEKNIDSLVLGCTHYPILKRTIGEEVGEHIKLVNPAKETAKDLKKILEVQNIINNTEIHGTYQYYVSDIPEKFSDIAREFLKKKIDKIQKVEIQKY

SEQ ID NO: 53099 - protein, 389 aa, Clostridium difficile
MIKLIHNANIVLEDMILENGHLIIEGDTIKKVSNDKIDYAFDFNEIDEIIDAKNLYVIPGIIDIHSDAIEKEIEPRPSTLLPFNMAFYELDKKLPANGITTVYHSISLGDGVGVRSIDNSLKMIKNIDSYKNIDSKSINHKVHLRYEVLYYEGLEKVLELLDENKIDYLSIMDHSPGQGQYTNPTFYKEYATKVWGVTENYVDTWLDDLVNLHDNLDWNKIANIIGIAKTKNINVASHDDDTLEKMDFIKNIGINVSEFPITLEVAKHSKKLGVLTCLGAPNIVRGKSHNNNLKAMDAILEDCCDIVCSDYLPSAMIKSMCIVAERINNLNKAVSLFTSNPAKAVGIYDERGSIKENKKADLVLVDIDSEYPKVVNTIVNGKTVYKREV

SEQ ID NO: 53100 - protein, 476 aa, Clostridium difficile
MRNLTLLTDLYQLTMLNGYFEKNIHEDIVVFDMFFRKNACDGGYTIVCGIDQVVEYIDNLHFSDEDLEYLKNLNLFSDKFLKFLKEFKFTGDIYAVEEGTIMFPNEPLITVKAPLYQAQLIETALLTIVNFQSLIATKASRVCFAAQGDPVFEFGLRRAQGPDAGIYGARAAVVGGCAGTANVLAGKMFDIPIIGTQAHSWVQKFDNELEAFQAYADVYPDKCLLLVDTYDVLNSGVPNAIKVFKNISEKGYKPMGIRLDSGDLAYLSKEAKKQLDNAGFSDISITASNDLDEYTITSLKAEGATINSWGVGTKLITSFDSPSLGGVYKLAASCEKGVLEPKIKISENPEKINNPGYKKVIRIYNEDNKAEADLIMLHDEVIDESKPLEIFHPTYTWKTKVFTNYKVKELLKPLYIKGRCKYNKKAVLEIKNHVQYELSTIWEQYKRLSKPHIYKVDLSRNLWYLKTQMIDSKKVL

SEQ ID NO: 53101 - protein, 71 aa, Clostridium difficile
MVNRMKAKELRDLTSEELMNKLNDFKSELFSLRFQLATGQLENTARIKFVKKDIAKVKTVLAERKLYETRA

SEQ ID NO: 53102 - protein, 645 aa, Clostridium difficile
MSKPSFYVTTPIYYPSGGLHIGHTYSTVAADTIARFKRFCGYDVKFLTGTDEHGEKIQKKAIEQGMSEIEYLDGMIKDIKALWNTMDISYDDFIRTTEKRHTDIIQKIFTKLYEQGDIYKGEYEGRYCTPCESFWTESQLLEGNKCPDCGRETYLVKEESYFFRLSKYEDRLKELFKDDSFCFPAARKNEMVANFLDKGLEDLSVTRTTFDWGIKVPFDEKHVIYVWVDALCNYITALGYMTDNDEEFKKYWPANVQIVGKEIVRFHTIIWPALLMALGLEVPKQVFGHGWILFADDKMSKSKGNVVYPEPIIERYGIDTLKYFLLREFAFGQDGSYTHRNFVTRINYDLANDLGNLISRTVAMVEKYNNGIIPTAKVSTDFDADLKEQAVSTRENFEAEMDKMQFHEALESVWKLVRRTNKYIDETMPWALAKDETKKGELDTVLYNLCESIRIIATLINPIMNETANKIYEHIGIKGQDDITTWESTKTFGLIGENVKVFKGEPLFPRLDVEKEIEELTKMFSGKPPVEEKPLEHKEEITIDDLDKIELRVGKIISCEKHPKANKLLVSQVKIGPETRQIVSGIAEYYKPEDLVGKEVTVVCNLKPVKLRGVESQGMILAAGDDGEPYVLPFTQGAKDGCEVR

SEQ ID NO: 53103 - protein, 256 aa, Clostridium difficile
MLFDSHAHLNDESFDEDRDELIGSLKDKGVDLVVNPGADIETSITAIELAKKYDFIYSAVGVHPHDVSKLDDTAIETLRKLATENEKVVAIGEIGLDYYYDYSPREEQKEWFKKQIELANELKLPIIIHDRDAHGDTFEIIKNTKNPEIGCVLHCYSGNVELAREYVKMGCYISIPGTVTFKNNKKTREVVREIPLERLFIETDSPYMSPEPHRGKRNNPSQVSFVADKIAQEKGISYEEVCRVTKENAKKFFNIK

SEQ ID NO: 53104 - protein, 360 aa, Clostridium difficile
MYIYDLLEQGIRLNASDIHITVGTNPVARVKGGFVKLSEQILTSEVTMQMAKDIAGESMFKVIEEHGEADFSASLKTGERFRVNAYRQKGNYAIAIRTITAEIPTFEKLGLPESIKSFTEKHKGLVLVTGPTGSGKSTTLASMINIINEKQQKHIITLEDPIEYVHHHKQSLVNQREVGTDTESFHSALRAILRQDPDVILIGEMRDPETVSIALTAAETGHLVFSTLHTVGAAKTIDRIVDMFQPSQQQQIKTQLSTVCEGVVSQQLLPTADGKGRIAAIELMFATPAIKNLIREGKTYQIPNMIQTGVKSGMKTMDQDLMELYKNGKITKDMALSRCTDQEFMTRMIGGVNYNGYYNR

SEQ ID NO: 53105 - protein, 176 aa, Clostridium difficile
MIKEIIVVEGRDDVTAVKRAIDAELITTGGFGFPKGVMERIKAANERRGVIIFTDPDFAGEKIRKKIASEVPGCKHAFLPREEAKKDGDIGIENATPQSIIAALNKVRTENTEKRDEFKQVDLIRNGLIGNEEASLRRDALGKILGIGYGNAKQFLNRLNNYGVEREEFIDALKQI

SEQ ID NO: 53106 - protein, 289 aa, Clostridium difficile
MDRLSSHNATKEVVQKYNFKFSKSLGQNFLIDSNIIDKILSGARITRGDNIIEVGPGIGTLTREMGKIAEKVVAIEIDRNLIPILKDTLSDLDNTEVVNQDILKVDIQELVKDKLNGGPVKLVANLPYYITTPIVMKFLEEDIPVTDIVVMVQKEVADRMNAIPGTKDYGALSIAVQYYCDTEIVAKAPRHMFIPQPNVDSTVIGLHVRDKRKYDVHNEDIFFKTVKASFGQRRKTLLNSLGGLGFLNKDEIREILKEANIDEKRRGETLSIEEFSVLSNIINTKVSSK

SEQ ID NO: 53107 - protein, 122 aa, Clostridium difficile; identical to SEQ ID NO: 52939
  MISC_FEATURE (106)..(106): X=any amino acid

SEQ ID NO: 53108 - protein, 234 aa, Clostridium difficile
MEDMKMKGKLIIIESGSDASGKATQTEILYERLKKEGYMIKKVEYPNYESPSSALVKMYLKGDFGKNASDVDPYIASTFFTADRYASFKTDWEEFYNEGGIIIADRYTTSNMVHQASKMDICDREEYLNWLADYEFNLFKIPQPDCVIFLDVPIEFSKKLMENRKNKITGEEKKDIHESDIEYLEKSYNNALYIADKYDWKKINCVLDNKLRSIESIHNEIYKIVLDSIKPMER

SEQ ID NO: 53109 - protein, 311 aa, Clostridium difficile
MYFENIIGQDFAKKYLTNSIKKNKLNNAYMFEGMDGIGKKKFADELSKLLLDYENLENSPDYVLIKPDGNSIKIAQIRNLQSDIVIRPHKDYKIYIINNAEKMTVEAQNALLKTLEEPPNYAIIILVTNNKESLLETIKSRCDIIKFSPIPIEDLKRYLINTGIEEERAQLLAIFSRGSIENALNLSQSSEFSMMREDIQQYIQIMLDKNIVEILNIPNNMEKYRGKIIALLDMMINYFRDIILLKENVNKNMLINVDKLVFIQNMSGKISYSQLSKIIDIIEDAKSKIKSNCNFNISIQVMSLNIYEVIK

SEQ ID NO: 53110 - protein, 277 aa, Clostridium difficile
MSGKLYICPTPIGNLEDITYRTLRTLKEVDLIAAEDTRHSIKLLNHFEISKPLTSYHEHNKDSKGDYLINKLIDGENIALISDAGMPGISDPGEEIIKQAIQNNIEIEVLPGATAFVTALVGSGMDTHRFVFEGFLDRDKKVRKAQLEELKEESRTIIFYESPHRLKDTLKDMLKILGNRNISINRELTKKYQEIIRENIETTIKIFEEKEVRGEFVLIVEGFHGEKSKKENYDGLTDREYVLKLIESGMNKKDAIKIVCKDRKLKKDVVYKQVLDL

SEQ ID NO: 53111 - protein, 301 aa, Clostridium difficile
  MISC_FEATURE (133)..(133): X=any amino acid
  MISC_FEATURE (300)..(300): X=any amino acid
IIIATHGNMAKAMLESAELIVGKQENVETLGLNHGDSIDEFSRKLEDGIEKYKDEGVLVLLDFYGGTPFNTSAIIINKFAKVCELECLTGVNLPMLLELFLNRDTMKLKDLKNLCEEVGISGIKDVKTVLKLXNKLKIWRNNYENIALTRIDDRLIHGQVITAWCKITSAKRIVIVDDLVVKDPFIVQVLQMAAPSTVKVEVHDVESGAEVLKSHNGDENLIVLVKYPKTVLGLVNSGVDLKELNVGGMGAGLGRKSFYKNISVSDEEKEIFRELISKDVKCFIQIVPDAKKIDVGTLLXR

SEQ ID NO: 53112 - protein, 204 aa, Clostridium difficile
MEIFSYIIIAVVAYLLGNISTSYIVAKRIAGVDIRTQGSGNAGSTNVLRTLGKRAGAMTFLGDVLKGVMAVLISEFAARLVGIDTLLAGYLAVICVVAGHNWPAVLGFRGGKGVATSLGAMLAVNPVITLMCLAVFILVVAITKYVSLGSVVGIGCSPIFMIMVKNKAGLIVALFLTASVIYNHRANIKRLLNGTERKIGQKKE

SEQ ID NO: 53113 - protein, 360 aa, Clostridium difficile
MMSGIWGNNLKVSIFGESHGNAIGINIDGLPSGIELDLDKIDKEMKRRAPGKNSISTSRNESDIPEILSGYFNGRTTGTPLCAIIRNSDTRSKDYGELKNLMRPGHADFTGNVRYSGFNDYRGGGHFSGRITAPLVFCGAICKQILSQKGIEIGAHIKKIKNIEDMSFDYVNISKQQLSNLQTLELPLLDLSKEEAMKNTIIDAKNQGDSVGGIIECAVVGINVGLGNPFFDSVESTLSHLLFSVPAVKGVEFGLGFELADMYGSQSNDEMYYEGNQVKSKTNNNGGIIGGITTGMPIIFKVAIKPTPSISRQQNTVNIKDKKDDILYIKGRHDPCIVQRAIPVIEAVTAIGIFDLMKGR

SEQ ID NO: 53114 - protein, 232 aa, Clostridium difficile
MNVIGIIGAMDEEVSILVDLMDIRETIKKASLEFYKGILEGKNVVLVKCGIGKVNSALCAQILISEFKVDAIVNTGVAGALNEKLDVNDIVISTDAIQYDVDTTAFGDPKGVIPRMKTSVFKADERLIDAAYKSSVEEVKTHKVLKGRVVTGDKFINSKELKEELVNDFGGYCGEMEGGAIAHVCYLNNTPFVIIRAMSDKADGSADVTYDVFVHDAANNSKDIVLNMLKSI

SEQ ID NO: 53115 - protein, 199 aa, Clostridium difficile
MNTLFKKINKDIEYIMKNDPAARSKIEVFLLYPSVHAMIMHRMAHALYKKKKLFTARLISQISRFMTGIEIHPGAKMGEGILIDHGMGVVIGETAEVGNRVTIYQGATLGATGKDTGKRHPTVGDDVLIGAGTKILGPLNIGSNSKIGANSVVVKDVPNGATVVGIPAKIVKIRNLEPVKKNKKEVSYEYDELDNVYYI

SEQ ID NO: 53116 - protein, 436 aa, Clostridium difficile
MNKEQLKSLVIKTIDENREKILKIGQGIYKNPEYGYKEFKTTEAVSNFFEQELNLSVEKNIAVTGCKADANSSKKGPHISILGELDGISCKEHKDANEIGASHTCGHNIQIAGMLGAAVGLVKSGVLEHLDGKVSFMATPAEEFIELEYREQLKKEGKITYFGGKQELIKRGYFDDIDISMMFHASDLGEDKALVGPESNGFVGKKVKFIGKESHAGSAPHDGINALNAAMLAINNVNALRETFKESERVRFHPIITKGGDIVNVVPADVHMESYVRARTINGMIDANERINKALMAGGMAVGADVEITEIPGYLPILRYKSLDNLFKNNLEDLGLKGKVIDGGDFTGSFDFGDVSHIMPTLHPMIGGVKGALHTRDFEIVDEDLAYIIPAKAMALTVVDLLFDNAKDAKDILDTFTPVMTKKEYLTFLEKHDKTL

SEQ ID NO: 53117 - protein, 499 aa, Clostridium difficile
KKNFFDRTLNRIETVGNKLPDPVTIFLGLCVLLLILSSLVGSMGISVVHPGTGETITAVNLLTVEQLQILLGNIVSNFQGFAPLGLVLVTMIGAGVCDKTGLMTATIKASVSKIPETRVTLVVMTIGMLANIASDAGTILFPPLAALVYLGVGRHPLIGLFSGYAAVCLGFAANIMISVNDILAASFTVPAAQMIDSGFQANATMNLFFMIASTFVLILLATWVTEKIVAPRFGKYEGNAELDVDGSLSDVEKKGLKKAGISILIYVAIIVALSVIGKKPFLADPETGDLLSNNAPLMKGMVPIIALAFFIPGVVYGKTIGKIKKDKDVVSIMASAMSDMGGYIILAFAASQFLQLFTNSNLGLILAVKGGEFLKSAGINGPLLLIGFIILSCFINLFIGSASAKWAILAPIFVPMFMMVGYNPALTQMAYRIGDCITNPLSPLFPYFPIILAFTRKYDKDAGMGTVIANMIPYSISFLIVWTILLILFMVFNIPLGPG

SEQ ID NO: 53118 - protein, 317 aa, Clostridium difficile
MTAKVQYNLGGNTMNNQDIYINLLNILSKEDIKVDEPMKKHISFRVGGPADILVRPRTEEQLKNVLKLVKEESIPYLIIGNGSNILIKDGGIRGVVIELADNFNSYEINDTRMTAQSGALLSVLGKALQKQELKGFEFASGIPGTLGGALAMNAGAYGGEMKDIVKSVRLMDMEGNIFELSNEQMEFGYRKSIISKNGYIALSAELELQEGNYDEIKSLMDDLATRRITKQPLNFASAGSTFKRPTGYFAGKLIEETGLRGLTLRGAQVSEKHCGFVVNQGEASAKDILDLIYVIKSAVYAKFGVMLEEEVKILGED

SEQ ID NO: 53119 - protein, 278 aa, Clostridium difficile
MLLYNYCHKKTRESIIFKGEGFMSKGFLTPGETAQATISAGIKKANISTQNAILLGLFGGAFIGFGALGSMIVSQTFGKIDPGVASFLSAMVFPVGLMLVVVAGAELFTGNTLMAIALMDKKITLGKMLRNWGLVYFANLVGSILLVALVFYSSTLTGDAATKAIAVAEAKVNSTIASMFLKAILCNILVVLAVWMATASQDIMSKLASCWTVIMLFVLCGFQHSVANMFFIPMGMALGANITMVQFITNLVFVTLGNIVGGSIVVGGIYYLCYVKNS

SEQ ID NO: 53120 - protein, 165 aa, Clostridium difficile
MCDFISHNKQLFDELDIFIDSLATKEGALIQVLHEAQGIFGYLPKEVQLHVARKLGVAPAKVYGVVTFYSYFTTEPVGKYKISVCLGTVCFVKGADKILSAFEKQLGIKVGETTSDFKFSLEGLRCLGACGLAPVVTVNGKVYGKVKPDQVSEILDTYRELELNC

SEQ ID NO: 53121 - protein, 628 aa, Clostridium difficile
MRKVNSFDELKVLADELKPNLSLRKNYSKENVLRRELLVCCDTGCTSSNSLEIVSELENEIKKSGIQDKVSVRLTGCFGFCAQGPIVKVYPDNVFYVKVEPSDAEKIVQSHLIRNTVVEELLYEEESLSKKVEEQEEMSFYKKQLRIALKNCGLIDPDSIEEYIANDGYLALGKCLTSLTPQEVIAEVKTSGLRGRGGAGFPTGSKWEAASKNPAGPTDKKFVVCNADEGDPGAFMDRSVLEGDPHSVLEAMAICGYAIGSDTGYIYIRAEYPKSIERLKVAIAQAEKYGLLGENILGTGFNFKLELKYGAGAFVCGEGTALMHSIEGRRGEPRMKTYSSSKSGLWKSPTCLNNVETFANIPAIILKGGDWFANLGTEDSSGTKVFALGGKVENVGLVEVPMGTTLRDIVFEIGGGIPEGKKFKAVQTGGPSGGCIPTEHLDTPIDFGSLSSIGSMMGSGGMLVLDESDCMVDIAKFFLEFTVEESCGKCTPCRIGTTRLLEILTKITEGNGTLQDLDDLENLAETIQTASLCGLGKAAPNPVLSTLQYFKDEYIAHVVDKKCPAGKCQNLLSYFITDDCKGCTKCSRVCPAGCITGSVKEQHTIDTSKCLKCGACIDNCTFNAIIKK

SEQ ID NO: 53122 - protein, 299 aa, Clostridium difficile
  MISC_FEATURE (247)..(247): X=any amino acid
  MISC_FEATURE (252)..(252): X=any amino acid
  MISC_FEATURE (258)..(258): X=any amino acid
DFEIIDEWYSCTKVTDEAFIVYGTLWVIEKDYLEKDIYVEMDTRFTMVYRVTDDMIKLIHVHHSIPNFDQMKDEYYPKTITEKAQEALAMANEFKLKSEKDLMTGLYNRHFFEVHIKEMLKTVSHGYFYIFDLDNFKQVNDIFGHVRGDEILIHFSNILTKVFVNDAIIGRLGGDEFAVFEYSNQSKENVENKAKKVLELCLESNSCSIGISKLENNSDTFQSLYKQSDYALYYSKRNNKGNFSWFXYKRYXNRQIYXSILSYILISKVNNKLSLHIFYKPTILNKTTIVNMTTIIEYN

SEQ ID NO: 53123 - protein, 309 aa, Clostridium difficile
METSNKVSIREIIKELKLKVVYMPDDVDYYVYSQDINRPGLQFAGYFDYFAYERIQIVGKTEYNFFGLMDSHIREEVLDRFFSYEIPALIISRDLEIKPDVIEKAKKYKRILLSTNRNTTRLINRLSNYLDNKLAPHTTIHGVLVDIYGIGVLIKGESSIGKSETALELIQRGNRLVADDAVEIRKLDESMLVGQSPELIRHFLEIRGIGIIDVRSLYGVGAIKNSKMIDLVVHLEAWDETKYYDRLGLDKEYEEILGVNVEKLVVPVKPGRNTAMILEVAAMNFRQRGMGYDAAQEFTKKLSKLIDTK

SEQ ID NO: 53124 - protein, 586 aa, Clostridium difficile
MLNNVKKTKIVCTLGPASQSEEVLTQLMQNGLNVCRFNFSHGSHEEHKERIDMAKKVREKLNKPVAILLDTKGPEIRTGNFEDPEVFLEEGQKFTITMKDIMGTKEMCTVSYKGLAEDVKSGDSILIDDGLVGLRVKEINGEDIVCVVENSGIVKNHKGVNVPGVKINLPAITPKDISDIEFGISQGIDYIAASFVRKASDVLAIREVLENNNATDIQIISKIENQEGVENLDEILKVSDGIMVARGDLGVEIPTEEMPIVQKMMIKKCNELAKPVVTATQMLDSMIRNPRPTRAEVTDVANAIYDGTDAIMLSGETAAGKYPVEAVKMMATIAKRTEETLDYDRLLKENGTNNVTVTDAISHATCTTAVDLNASAIITSTSSGYTARMVSKFRPKSPIIATTNNEKTMNKLALTWGVYPVKSSVAGNTDEVIEKAIEAARQADYIDNGELVVITAGVPVGVSGTTNLIKVHVISEEIVQGIGVGTQTVEGKVRIIKNGNACVDFNEGDILVSTATDAEMNNYIEKAGAVVTENGGMTSHTAIVGINLDIPVIVSAADITNLVKDGEVVTVDASRGVVYRGSTRVL

SEQ ID NO: 53125 - protein, 941 aa, Clostridium difficile
MEDKIIIRGAKEHNLKNIDLELPRDKFIVFTGLSGSGKSSLAFDTIYAEGQRRYVESLSAYARQFLGQMEKPNVEYIEGLSPAISIDQKTTSKNPRSTVGTVTEIYDYLRLLFARVGDVYCPTCGEKISQMTIQEIVDKMLDFPDRTKLQILSPIVRGQKGTHKKVFDNIKKEGFVRVRVNGENYEVSDDIILNKNQKHNIEVVVDRIVIKDGIESRLADSIETAVKLSDGLVIAQIIDGEEILFSTKFACPEHGIGIEELSPRMFSFNAPFGACDVCNGLGESKEVDPELVVPNKDLSIKQGAVAAWGSTGVNDDTYYSKMIKSLAEHFNVSLTTPFKDLPDDFVEELLYGKDNIIVEFTYESKFGGTRNYKSYFEGVIVNLERRYRETNSDYMRDKIEEYMAERPCPKCKGMRLKKEVLSVLVDGKNIMEVTNLSVNELIDFMENINLTEKQRFIAHEIIKEIKGRAMFLRDVGLDYLNLSRKAGTLSGGEAQRIRLATQIGSALVGVLYVLDEPSIGLHQRDNDRLITTLRHLTDLGNTLIVVEHDEDTMREADYVIDIGPGAGIHGGEIVAQGTLDEIIENENSITGQYLSGKKQILLPETTREGNGSFIEIVKASENNLKNIDVKFPLGKFTCITGVSGSGKSTLINDILYKGVASKVNRLKQRAGKHKEIKGIESIDKVINIDQSPIGRTPRSNPATYTGVFDFIRDIFASTNEAKARGYKKGRFSFNVKGGRCEACKGDGIIKIEMHFLPDVYVPCEICKGERYNRETLQVKYKDKTISDILDMNVEEAVEFFENIPNIKRKLETLMDVGLSYIKLGQPSTQLSGGEAQRIKLAAELSKRPTGKTLYILDEPTTGLHMADVDKLIQVLQRLADTGNTIIVIEHNLDVIKTCDYVIDLGPEGGDKGGTIVATGTPKEVSKVDGSYTGQFLKKYFS

SEQ ID NO: 53126 - protein, 319 aa, Clostridium difficile
MKTIGLLTSGGDAPGMNAAIRAVVRSAIYYGCKVYGINRGYKGLLEEDLTEMNLSSVGDIIHRGGTILKSSRCEEFKTEEGRLKAVKILKKYKIDCLVVIGGDGSFAGAQKLSDLGFPAIGIPGTIDNDLAYTDYTIGFDTAMNTIIDAIGKIRDTSSSHERVNIVEVMGRHCGDLALYAGLAGGAETIIVPEVEITVDEVALRLKTTQKRGKRHSIIVLAEGVGSASDLEKELKKESGADLRVTVLGHVQRGGSPTVSDRILASRLGVRAVELLLDGKSARVVGIKENKIIDLEISEALAQKKVFDKEAYEMAKILSI

SEQ ID NO: 53127 - protein, 921 aa, Clostridium difficile
MNKKENRMAIRQTVEKAVIRDEQNCRIQFAATNPIKEVLKKLHTTLRGLEVDEVSVSRAKYGTNKVTHEKKKSLAKRLVGAFINPFTAILFCLALVSTITDMIFPYFSLFGSVPEDFDSLTVVIILTMVFISGTLRFVQESRSGNAAEKLLAMITTTCTVTRRNYEKKELPMDDLVVGDIVHLSAGDMIPADVRILDAKDLFVSQASLTGESEPIEKTPNVSAQKESVTDYTNIAFMGSNVISGSATAVVVCVGDHTLFGSMASAVAGEAVETSFTKGVNAVSWVLIRFMLIMVPLVFFVNGITKGDWLEAFLFGVSIAVGLTPEMLPMIVTTCLAKGAVSMSKKQTIVKNLNSIQNFGAIDILCTDKTGTLTQDKVVLEYHLNVNGEDDTRVLRHAYLNSYFQTGYKNLMDLAIIHKTEEEEAADSRLIDLSENYVKVDEIPFDFTRRRLTTVVQDNKGKTQMVTKGAVEEMLSICAFAECNGGVQPLTDDVRYRILETVDNLNDKGFRVLAIAQKSNPSPIGAFGVKDECDMVLIGYLAFLDPPKESTADAIKALKDHGVITKILTGDNDKVTRTICKQVGLEVRNMLLGSDLEQMGDAELARVAVSTDVFAKLTPDQKARVVSVLRENGHTVGFMGDGINDAAAMKAADIGISVDTAVDVAKESADIILLEKDLMVLEQGIIEGRKTYANMIKYIKMTASSNFGNMFSVLAASALLPFLPMMSVHLIFLNLIYDLSCTAIPWDNVDEEFITKPRKWDASSVGSFMIWIGPTSSIFDFTTYIFMYFVFCPLFVSNGVLFNDLPAHFSGAELVMLQAQYIGMFQAGWFVESMWSQTLVIHMIRTPKLPFVQSRASAPVTLLTMTGIIVLTIIPFTVFGTMLGFVALPAAYFAYLIPCILLYMTLATSLKKAYVRHFGELL

SEQ ID NO: 53128 - protein, 436 aa, Clostridium difficile
MKMKLKRKLATGLAITLLLGSLVGCSNSNDANASKGEKTDSNITKIDFWAPLGGTNGETAQKMVDQFNSEHKDVQVNMLKQKDYYENATKLQAALTSKDQPDVTLLEITQTGTFASAGALVDMSKYFDKTYQERFFSGLLTNSYYEDKFVGMPFNRSTPILYINKDMATKAGLDPSGPKSWEELKDYASKMTNKSEDTYGFETPIDIWFYEAMVMQSGGEITNGKKVAFNNEAGQAPVKFWQDMMKAGIMKMPPGEDYNAWDVAKQDFVNGKVGMIFTSTADLAGLMQQTEGKFEISTAFLPKNQKYATPTGGANLVMLEGGTDKEKEASAEFIEWMTQTDKIVQFSSSTGYLPTTEDATNSEKLQTLYKEKPQYKVATDQLQYAVALPMLNGYKEATDKLMDEIKKGLTDLNANPKDVVSKGTSAMQAVIDKTNK

SEQ ID NO: 53129 - protein, 1189 aa, Clostridium difficile
MNKDFAHLHVHTEYSLLDGFSRVKKLIKRAKELNMSSIAITDHGCMFGVIDFYKTAIKEGIKPIIGCEVYTAARGLRDKDPNYDKYQGHLVLLAKNMEGYKNLIKIVSTSYVEGFYYKPRVDMEELKKHNKGIIALSACLAGDVARALMNRNYEKAKQFALDYRDIFGEENFFLEIQDHNLPEQKEVNSGLVKLSKETGIPLVATNDVHYVNKEDSKIHDVLMCIQMGKTLNDPNRMRFGSDEFYLKSREEMEELFPYALEAIDNTVKIADMCNVEFDFNTIHLPKYDVPEGYTPETYLRELCFNGLKERYDNPSNEILERLNYELDVIEKMGYVEYFLIVWDFINFSKENNIIVGPGRGSAAGSIVAYTLKITDIDPIKYSLLFERFLNPERISMPDIDIDFCYERREEVIDYVKRKYGDDHVAQIITFGTMGAKAAIRDVGRVLDIGYNKVDKVAKEIPFALGMTIDKALDTNPNLKELYDQDPETKEIINISKQIEGMLRHASTHAAGVVISKNPVDEYVPLYKHQDAITTQFTMTTLEELGLLKMDFLGLRTLTVIRDTLDLIEKNRVIKNYTEKIDFSKMDYDDPKVYEMLSSGNTLGVFQLESAGMRSFMKQLKPDNFEDIVAGISLFRPGPMDSIPAYIKNKSNPKDVTYLHEKLKPIMEVTYGCLVYQEQVMQVVRDLGGYSYGRSDLVRRAMSKKKMDVMEEERQYFIHGKFDEDGNIEIAGCIRNGVEEEIANKIFDDMIDFARYAFNKSHAAAYGVLAYETAYLKTYYPVEFMAALITSVMGNTDKVVEYIRECKALEIDVLPPDINKSFSKFSVEGDNIRFGLAAVKNVGVNIINNIIAERESNGLFVDLVDLVKRLDQKDTNKRVIESLIKCGAFDNISENRASLMAGYESLLESVSMDRKKNVQGQISLFDAFGDSEEDSDFQQIYSLPKRQEYEERERLNLEKEVLGMYVSGHPLSQFEKELQEKTSMDNGKLNSLKEEEESYLQMNETDVIMGGMIVTKTIKTTKRNEIMAFIELEDLYGAIEIIVFPQLLQKYNVILNEDNIIYVKGTLSIKEGENAKLIAREIKDINDDTDFADRNYNSGRTRNVENIKPESGKKLYLKIDSMSDTDTTNNIVEIAKQYPGNDSIYLYPMDENINGKRKAYKMTGALTCICDEFINNLEELLPKDNIKVKA

SEQ ID NO: 53130 - protein, 318 aa, Clostridium difficile
MIDMSFSTETKNELARVISGNECCNIAELSALVKSGGSIQIVGYKKLNLKITTELNSIARKVFKLLKKNFNINTTISVNKNQMLKRNNSYVLMVTSEMGSEMLLKKLGILEDKEGFFTINKISENLIKHEGCKRAFIRGAFLGGGSISDPEKNYHMEFVTNNEEFADSLKELINSLGFNSKIVARKNNHVVYIKESEQISDLLSIIGGHHALLSLQNTKIVKEMRNNVNRIVNCETANLSKTVNAAVRQVENIKLIQETIGISSLPENLQEIAKIRIEYEDMTLKELGEMLEPPIGKSGVNHRLRKIEEIATDLKKKS

SEQ ID NO: 53131 - protein, 372 aa, Clostridium difficile
MEANMAKLLIIVGILGWIALIVSLFIYKKAKNEKVKLFQRSIVENREPNVVVIGGGTGQSVFLRGLKHTTQNITAIVTVADDGGGSGVLREDLGMLPPGDIRNCLLALANIEPTMNEVMQYRFTEGLLKGQSFGNLFLAAMNGLYGNFEKAVYKLSEIFAITGRVLPVTLEDVNLVAKLENGNIINGESSIPEESKIQKSSIDKIFLNPKDVKPLKDVIASIYDADIIIMGPGSLYTSIIPNLLVEGIVDAIKSSVAPKVYIANIMTQPGETEGYNVLEHVNAIVKHTDENLIDYVIANNEILPEEMLDLYKQDGAEQVLLDKKQKDKLKEMGIKTVEKNLIEIKNNYIRHDAKYISNIVIELALNHNYNKS

SEQ ID NO: 53132 - protein, 122 aa, Clostridium difficile
  MISC_FEATURE (19)..(19): X=any amino acid
  MISC_FEATURE (106)..(106): X=any amino acid
MLSALIHSVHSYPAMPLAXQLVHQRYVHPGPLVLRTGLLKFPTPATDRDRTVSRRSEPSSRTTLMGEQPNPWDLLQPQDVMSRHRGAKPPRRCGLLGEISLLSPGXLLSVERWPFHAEPPDH

SEQ ID NO: 53133 - protein, 285 aa, Clostridium difficile
MKFVIVTGLSGSGKSETMRALEDMGFYCVDNLPPALITKFAELCYQPNSSIDKVALGIDIRGRKFFEALHESLNYLEKENYEYEMVYLDCNDDVLLKRYKMTRRNHPLAKDMQIPEGIKMERKIMEPLKELSTCIIDTTNMKPKDLKEEIKKIYSSGEDNPNLTISVVSFGFKHGILADADLVFDVRFLPNPYYVEELRAKTGDDKEVRDYVMNSKISEEFYVKLLDMIHFLVPQYIEEGKQHLVIGVGCTGGRHRSVTITNLIAEDLSNKGYRVVKKHRDSMLR

SEQ ID NO: 53134 - protein, 160 aa, Clostridium difficile
MKTNTDVIMEIIDYIEENLTENLNLDKIAYIANYSKYHLHRMFTNVVGCTIHQYIQRRRLTEAARQLIFTDKYIIDIAITVGYSTHQSFTLAFRNLYKESPQVYRNKDEFYPIQQRFVLNLNHQIQSEKCISYANMNYKQRRDEINSYLNFNINCEVKVA

SEQ ID NO: 53135 - protein, 103 aa, Clostridium difficile
MLTMNMIKKYREVNTVANIKSAKKRISVIEKKTALNRVRKSQIKTAIRRFEDAVAAGNREDAVAKFQYAQKRIYQVASKGTIHKNAAARKVAKLAQKLNGMNA

SEQ ID NO: 53136 - protein, 469 aa, Clostridium difficile
MEDIIMTDSKKKRFIIPHTFTIIFLLIVLMAILTWIVPSGEFSREDVEGRMVVVPGTYQSVESNPQGFADVFKAPIEGFIDSAEVVGFVLIVGGAFGIVNRTGAIEAGIASVISKFKGKELLIIPISMILFGLGGTTFGMAEETLPFYMIFVPLMTSLGYDSLTAIAIVFIGAAAGAAASTINPFSVGIAQALAQLAPGSGVTYRVVIFIAYILISIAFVMYYAKKVKENPESSIVYEIDKNNKSILNQTSTEIKEFTFKEVSVLAIFGIGMAIMIWGVLSQGWYIPEISMCFAAIGVLSGLVGRLSQIEISESFIDGAKDLASAALAIALARGIVIIAQNGFIIDTILNSAAAFLGGLPKVIFVYLSFFLEAALAFLIPSSSGLASLTVPVLAPLGDLVNISAQVIVTAYQFGVGLTNFITPTSGVLMGALAVAHIPFSKWVRFIMPILLILTAVSLVFLTIGIYIGF

SEQ ID NO: 53137 - protein, 167 aa, Clostridium difficile
MFNVAIITLSDKGYEGKREDITGKKLTEFVENTGAYKVTEYVLIKDDKEMLKENIIRLCNSNKIDLILTNGGTGFSKRDITPEATKEVLEKEIPGLSEYMRMKSTEITKKAILSRGVSGIRNNSIIINLPGSPKGAVENLSFIIDVLDHGIEVLRGEATECATKKSE

SEQ ID NO: 53138 - protein, 319 aa, Clostridium difficile
MIDKYGRKIDYLRISLTDKCNLRCVYCMPPDVKFDKNYINENLSFEDYKFIIKAMAEQGITKIRFTGGEPLLYPKLNELIKFTKEECGINNIGMTTNAIGLSDRIFELEKCGLNKVNISLDSLKEYKYKSVTRGGNLKDVLKSIESCLNLGIKVKLNCVAISGFNDDELKDFMFLTVKSPIDVRFIELMPLGEANRVYKKGYFNVKEMIEKIYGLYKVKNDEKSTAEYYMFKGAKGRIGIITPLSCSFCNTCNRIRLTSSGAIKLCLHSKEEIDIKPFLHKPLLFRESMKDIIKQKPEKHHLIENKCSDTNRRMYEIGG

SEQ ID NO: 53139 - protein, 973 aa, Clostridium difficile
MANWRFLNMKAFKKHFLILSLIFLLIISCFNNILCFADESENSKKIRVGYCDDYGIISSSKEHSYTGYGYDYLREISKYTRWEYEFVKGSWEECLDRLEKGEIDLLGPLQKNDERNKLFNFPKLSSGYEYSALYTKDSNNNMFYEDISSFKGMRVAVLRGNFHNTAFEKYREENNFSVEYIYCNSIDELIESVNEKKADAFVCGSIINAKGMKIVSKFSVEPFYFATAKDKPNLVKELDYALKELKINDMYYELELYKKYFKREVNNSIAFTRQEMNFIKANPKLTMVYDSEWSPVEYYDKESNSFKGISSDLMSIISKKCGIKFEYIKTKNYNESLDYIKSGKATMLCGSINENDKAKRFNMKLTNPYINIPMIMVGKLDTNLNNDLNIALTSSYKSIDSYIEKSFENAKTTSYKSVESCLNAINEGKANLMILSSYQFDELLREGKSENLSVISVLDTSYGMRIGVSNKTDPILVSILNKSIDKITEEELSDCIYSNTIDKPYKVPFGVIFKEYSIQIISFVCILFLIAIKYIIYNKKKKEDYLRKIAYTDPLTGADSIDKFKINSNKLFDKNNPEEYALFYIDVDKFKYINDMFGYDMGNDTLIHISNTIASELKEDEIFARVSADHFVLLIKYKTDDDIKTRLNNIYNKVQILSNPKINYYKLILDCGIYKISKSDNDINTIMDRANTARKTIKGGHKNSFAFYDKEMHKKILKEKEIENSMVDALNNGEFIVYFQPKYSLSDYQIIGAEALVRWDNPQKGLIPPIEFIPVFERNGFIVNIDFYVFEEVCKKIREWMDEGQKVVPISVNLSRMHFVNSNFIEKFKLIVDKYKIPTRLIELELTETAVLDNIEGLLDTMNNLKEKGFVISMDDFGTGYSSLNLLKELPVDILKLDRAFFTEKDESNNEKIVISNVIKMAKELKMKVISEGVETISQVEFLKQIGCDMVQGYLFSKPMPVKEFEKIAFKKE

SEQ ID NO: 53140 - protein, 372 aa, Clostridium difficile
MIAVEKAYKFRMYPNKKQQELINKTFGCCRFVYNKYLAKRIDVYKNDKETFTYKQCSSDLTNLKKELNWLKEPDKFSLQNALKDLDNAYKKFFKEKAGFPKFKSKKINRFSYKTNFTNGNIMYCGQHIKLPKLGMVKIRDKQVPQGRILNATISKEPSGRYYVSLCCTDVDIEAFENTNNQIGLDLGIKEFCISSCGEFIENPKYLKKSLNKLAKLQRELSRKTIGSLNRNKARLKVARFQEHIANQRNDFLQKLSTKLIKENDIICIEDLQVKNMIRNRKLSRLISDVSWSEFIRQLEYKANWYGRQIVKVGKFFASSQICNKCGYKNEEVKDLNIREWICPSCNETHDRDINASINILKEGLRLITIQNK

SEQ ID NO: 53141 - protein, 539 aa, Clostridium difficile
MNIVISLIGGLGLFLYGMSLMGEGLQKSAGDKLKKIIELLTSNVVMGVLVGTVVTGIIQSSSATTVMVVGFVNAGIMNLSQAIGVIMGANIGTTVTAQLVSFNLEGIAPIALGIGILFYLFTSNQKTKHLSEILIGFGILFTGMEFMKDAVAPLAEYKAFTDALLYFSKNPVLGILAGFAITGIVQSSSASMGMLIALASQGILPLSSALPILYGDNIGTCVTSLLSSVGASRNARRAAVMHLSFNVIGTIIFMLVLNKPISAIVTHFDPTDTARQIANAHTLFNLTNVIILLPFSKYIVKLANRLIPIKETESEIVNNTKYLDERMFSTPSIALGNTVQEVVRMGHKATNSLEHSIAGFLNKSNEDINKAFESEKVVNKLQKDILNYLLKLSKEPLRDDERFRTDLLFNTVNDIERVSDHAENIAELAMSVKEMNISFSDSAIREIYEIYNKTITNFKDALIVLDVKDFELANKVLEVENEVNYLEKTFRNSHMIRLNNGSCTIDAGVLYLDLLTNLERISDHSTNIVKQVLKLKQKI

SEQ ID NO: 53142 - protein, 533 aa, Clostridium difficile
MTVVEYKDEIIVIDAGLSFPEDEMLGVDIVIPDITYLVKNRDKIKGIFITHGHEDHIGALPYILKKINVPVYGARLSIGLIQVKLKEHKMNNVKLNVIGPRQVIKLDNMEVEFLKNNHSIPDAYSIAIHTDQGIIYHTGDFKIDLTPIDGDVMDMHRICELSKKGVLLMLADSTNAEKPGFTMSEKTVGVGLDELFAKGNGRRIIVATFASNIHRLQQIINTAEKFNRKVAISGRSMVNVVGVAKELGYLDISDDMLIDLNDICKYEDSELVIITTGSQGEPMSALARMAFSEHKKVEIKSGDLVIISAHPIPGNEKLISRVINFLFEKGAEVVYSDIADIHVSGHACQEELKLIHALVRPKFFMPAHGEYRMLKRHAEIAEQLGMDKENIFVMQTGDVLELDKNSAKVANRIQTGNILVDGLGVGDVGNIVLRDRKHLSEDGLMIVVVTISKDEGKVLAGPDIISRGFVYVRESEDLMDGAKDIIKNVLNECEEKNIKEWAYLKNNIKENLKEYLYQKTKRNPMILPIIMEV

SEQ ID NO: 53143 - protein, 198 aa, Clostridium difficile
MLSMNIGEIVASLVGIAMAISIHEFGHAYSAHLLGDDTAKAYGRMTLNPVRHVDPIGLLAMFILKIGWAKPVPVNPNNFKNYKIGNLIVSLAGVFCNVLTAILCVIINKYVHMYAINTIAEYVFLYSIGFAAFNLLPIPPLDGWGVISTFVPYKWNEYLYKFESMSYIILLIALFTGMYRIILTPIYAVLLKIVYLFV

SEQ ID NO: 53144 - protein, 483 aa, Clostridium difficile
MNIKYSKEILKSLENAITVVALFEGEDVSTTFDKINMISRNFNSKENSIDTVTLIENNNLVNVCLVGFGKRELLNREKIRIIGGNLCKKLKNILKNEAYKSSDVNVLNLNLNSDEIGCFVEGILLGNYKFDKYKTKSKDFERKEVDTITIFTEKEVECQIEKAKILANSTIIARNLVNEPSNVIYPKTLAVETVKLGAEFGFNVDVYEEEKIKALGMDAFFAVSRGSINKPRFIVMRYFGDKESTDILGLVGKGLTYDTGGYSLKSNASMLDMKTDMAGAASVIGAMCAISQSKLKKNVIAVVAACENALSGGSYKPGDIISSMAKKTIEVLNTDAEGRLTLADAIYYIINNEKVTKVVDVATLTGAALTLLGNVATPIVTNNDDFYCELEKAATLSGERVWKMPIYDEFKDMIKGEEADLKNTGGKNAGCITAGAFIGEFVGNTPWIHMDIAGTSTSSKSIGYKAKGATGEPVRTLYYLAEI

SEQ ID NO: 53145 - protein, 322 aa, Clostridium difficile
MEKRKVIIDCDPGIDDSLAILLALNSPELEVIGITTCCGNVPANIGAENALKTLQMCSSLNIPVYIGEEAPLKRKLVTAQDTHGEDGIGENFYQKVVGAKAKNGAVDFIINTLYNHEKVSIIALAPLTNIAKALIKDKKAFENLDEFVSMGGAFRIHGNCSPVAEFNYWVDPHGADYVYKNLSKKIHMVGLDVTRKIVLTPNIIEFINRLDKKMAKYITEITRFYIDFHWEQEGIIGCVINDPLAVAYFIDRSICKGFESYVEVVEDGIAMGQSIVDSFNFYKKNPNAIVLNEVDEKKFMYMFLKRLFKGYEDIIDSVEGVI

SEQ ID NO: 53146 - protein, 664 aa, Clostridium difficile
MNKKKIVIIGIIYSFLVVFSLTNMYVNMEYNLNVFEYIKKSLPFTEEEKKWLEKHKNLIYSSDQSSPPLRYKGKEDGQYKGIIVDLINSLSIQIGRDFYFKPNNWWKESFVNSIDDSIKFFDLIPSKERANKFIFTDPIYTLSANILKDKKSQDINSYMDLKGKTVAIPEGDYSINFLKQKIQDINILLTPDIKTGVNHLMSGKVDVVVGDEPVLRYYINNYGLSNKYSVLSNPIYTKKAVLAVPKQYEELVSILNKGIFKLQKNGVYKDLKKKWYSTYNEVDDILYERGIVPSIYLFIGIILISIYVFYSYTYLLKIEIKRKTEQVIENKKTLEATFNSITDIIMLVDENNNIVESNKVLYDFMGEMSYKIADLISMIKGVIENTFSENTNKTSEIEIHNKILKINTFPVEYKKNNTEYIVVLIKDITNDKIVEAKLLRENKMISIGQLASGVAHEIRNPLGIIRNNCYLLKDNVTMEEVNDCVKSIESNVDRASNIITNLLNFARISDDNLEHINIKNFIENIVKLQYKMLQLKNVEIKIDCEHNLICYINGESLKHVFINLISNSIDAIHQDGKIIIYCYEKNHCLFIDFKDNGEGIKEDVLKDIFNPFYTTKPIGEGTGLGLYITYNEIKKNNGDISVESKLGVGTCFHIKIPLNKEVTI

SEQ ID NO: 53147 - protein, 158 aa, Clostridium difficile
MEEIKMIYEGKLIGKDLKIGIINSRFNEFITSKLLSGAEDCLLRHDVSPENIEIVWVPGAFEIPLVAQKMAKSGKYDAIICLGCVIRGATSHYDYVCSEVSKGIAKVSLDSELPVIFGIVTTENIEQAIERAGTKAGNKGYDCAMNALEMANLFKSLN

SEQ ID NO: 53148 - protein, 408 aa, Clostridium difficile
MVFKNNKGVNYMFNTIEEAIEDIKNGKMVIVVDDESRENEGDLLMAAEMATPESINFMATYGRGLICLPATEKKFKSLNIPLMVRENTDTFQTAFTVTIDGADTLTGISAYERAETVKLFCDENSTSKDFKTPGHIFPLIAKTGGVLVRDGHTEASVDLARLAGFKEIGLICEIMKDDGTMARVDDLMIFKEKHNLKIITIKDLIEYRKINETTIEKVSSAFLPTKYGNFEIIGYRDTYSNEEHIALTYGNINIENTLVRLHSECLTGDVFHSLKCDCGLQLESSMKKIVENGSGVLIYMKQEGRGIGLLNKIKAYKLQEEGYDTVEANLMLGFEEDMRDFYMAAQILKNLNIKSINLLSNNPDKINQLEKYGIKIENRIPINEEINDFNKLYLKTKKDKMGHLLDII

SEQ ID NO: 53149 - protein, 221 aa, Clostridium difficile
MFTGIVEEVGILRKITANGKSGKVTILSNKILDGTNLGDSIAVNGVCLTVSNLGKNEFTADVMMETIRSTNLGLLNANDKVNLERAMSLSSRFGGHIVTGHVDGKGTICKFEKDENAVLVSIRPDKKLLSSMILKGSVAIDGVSLTISYLDDEIFKVSIIPHTKINTILLTKNVGDFVNLESDVIGKYVNNFMANNYKELNSNSSNHKSNIDKDFLFKNGF

SEQ ID NO: 53150 - protein, 370 aa, Clostridium difficile
MNFVNQKEKDIYYMKKAIELAKNGEGFVNPNPLVGCVIVKDSNIIGKGYHEKFGSNHAEVNAINSAKQSLKDSTLYVNLEPCSHYGKTPPCVDKIIQNKIKRVVISTLDPNPLVCGNGVKKLKDNNIDVTVGILEDEARDLNEAFFYHIKNKRPLCIVKSAVSLDGKIATKSLESKWISNESSRYLTHKYRNKYQSIMVGINTVLNDNPLLTCRLNQEKVSHPTRIVIDTHLKLPLNSNLVKDKTSKTIVFTCCKESIKLSMLKENNVETIISPSKNNLVDLEFVMYKLGELNIDSVLVEGGATLNDSLFRNKLVDKVKLFLSPKIIGGKDAPTFVSGEGINHLSDSTQLTINNVTLIDGDILIESDVLN

SEQ ID NO: 53151 - protein, 827 aa, Clostridium difficile
MNKKLLEILSKYYGYTSFRKGQESIINSILSEKDVLAIMPTGGGKSICYQIPALILDGMTIVISPLISLMKDQVDALKTMGISAAFINSSLSSKEFNEILNNIRKNNYKILYIAPERLDAQEFIELINNNNVSQVAIDEAHCVSQWGHDFRLSYRRISDFIKNLPKRPIVTAFTATASEEVRTDIINLLYLENPDYYITGFDRENLSINIVKSSSKNKYILDYIQNHKNESGIIYVATRKEVENISNGLSKRNISVSKYHAGLSKNERSKNQEDFINDNVDIMVATNAFGMGIDKPNIRWVIHYNMPQSIENYYQEIGRAGRDGEKSECVLLFSPGDVHIQKYLIDIGVENPERKLFQHKKLQYMIDLVYSNSCYRKTILSYFGENYIDNCNNCSNCLVEGEIVDKTIDAQKVISCVARMKRSYGVTTIVDVLRGSKNKKILQLGLNTLSTYNIMRDYSSEDLKNFVNTLVSHGFLDLVETLGNGNRGSFPTIRLNEMSMKVLKGEVKVEFKEIVMTKSLEVEDELYNALRELRHSIASEERIAPYMVFGDGTLRAMSSSYPINKEEMLDISGVGEIKYQKYGRDFEAVIKEYVEKNNINKKIDEKNVDSKNVNSDFLEVNTDKVLYEKLLVIREEYATKEKLPAYMILANKALKEISGRYPLDEEQLKDISGIGGVKFEKYGASILAEVNKYVKENNINVIWEKKGKRKLILDGESRKNNEIALDLLNQGKDIQSISQEIEVSLSTIIGYVHDYVKDGHSISFELGLENFYNEDKKKMILEVCEKVGYDNLNNIKRKLPDSIKYENIRAVILDSYLENLKNNIIAE

SEQ ID NO: 53152 - protein, 522 aa, Clostridium difficile
MKLKKLKVLSLVMILSLMAGCSSGGDKDKKADTPKDGKVLVYGSNDYTSINPALYEHGEINSLIFNGLTAHDENNKVVPCLAKDWKFDEATNTYTFNLRDDVKWHDGEKFTANDVKFTIETIMNPDNASEIASNYEDITKIDVVNDNTIKITLKAPNTAMLDYLTVGVLPKHALEGKDIATDEFNQKPIGTGPFKLEKWDKGQSITLVKNSDYFVKEPGLDKVVFKIVPDDKAKAMQLKSGELDLAQITPKDMSNFEKDEKNFKVNIMKTADYRGILYNFNSKFFKDKKAKGLPNALSYAIDRKAIVDSVLLGHGVPAYSPLQMGPYNNPDIEKFEYNPEKAKQEIEKLGWKLGSDGIYEKEGTKLAFEITAGESDQVRVDMAKICAQQLKEIGVDAKAVVVTETDWANQDAHLIGWGSPFDPDDHTYKVFGTDKGANYSAYSNPTIDKILQKARETEDKDEKLKLYKQFQVEMTKDMPYTFIAYIDAIYVGKPNIKGLTPDTVLGHHGVGIFWNIADWTIE

SEQ ID NO: 53153 - protein, 314 aa, Clostridium difficile
MGEKSKGYVFIAIAGLLWATLGLFGKFLMGNGLTSEQVAFTRLFFGFIVLGVYSSIRTPQILKINKKGIIYSVIIGIICQAMFNLCYFKAIDIAGVSIAAVLLYTSPLFLAIFSKICYKENITRSKLFSLILCFIGAIMAVTGGRLDFQGLNAFGLLLGVLSAIAYALMPTISKNALKEFSSSTILVYSFLFGAIFMIPSSRPWEILNYAKDLDVLSCMLMLGIVPAALAYIFYAAGISKGVELSVAGVVASVELVGSVIIGCTILGESFSLGKLFGVMLMLISAVVALNLSYDEIRIFYKSNKLKQIEKTESI

SEQ ID NO: 53154 - protein, 206 aa, Clostridium difficile
NLPSLGSKAPDFKANTTNGPIRLSDYKGNWIVLFSHPGDFTPVCTTEFLCFAKYYDEFKKRNTELIGLSVDSNSSHLAWMYNISLLTGVEIPFPIIEDRDMRIAKLYGMISKPMSDTSTVRSVFIIDNNQILRTILYYPLTTGRNIPEILRIVDALQTSDRDNIVTPANWFPGMPVILPYPKNYKELKNRVNSCNKKYSCMDWYLC

SEQ ID NO: 53155 - protein, 662 aa, Clostridium difficile
MAIGKTQIINILKNNRLEIKVNYMNLMTLENISKSYSEKKLLENISLGINEGEKIGLIGVNGTGKSTLLKIIAGVEESETGNITKTNGIRIEYLPQNPTYNENSTVLEQVFNGTSEELKLLGEYQEILEKLNSNFTEELNKKLLSVHEKIDALNLWDLESEAKSVLTKLGINDFNQKIAELSGGQRKRVSLASALITPCEFLILDEPTNHLDNDTIDWLEEYLNSRKGSLLMITHDRYFLDRVTNRIIELDKGRLFSYDGNYSIFLEKKMERLSLEASIEDKRQNLIRTELAWVRRGAQARSTKQKARLQRFDELINRDSFKPDENLDISVASSRLGNKIIEIHNIYKSFEENTVIDNLEYTLTRTDRIGIIGKNGMGKSTLINILNGEIEPDSGYISIGETVKIGCFSQDDSHMNIDMRAIDYVKEASDYIETSDGTRITASQMCERFLFNGTMQYTLIGKLSGGERRRLHLLKILMTAPNVLLLDEPTNDLDIETLKILEEYLDEFKGVVVTVSHDRYFLDRICNKIFAYEGNGKIHIYTGNYSDYLIYREIQGIEFEESKKESVKKDDSTTLKKEKPKNDKKLKFSYNEQREFENIDSDIEKLESKIATLDESTAKFSTDFTKLQEILDEKSKLEKELEYKYERWEYLNNLADEIANNK

SEQ ID NO: 53156 - protein, 729 aa, Clostridium difficile
MYEVNLERAMNYWMDLLDDYTNIAKIPNDFFYKDCSDEVVDEVFKMNIEKHERLIQYSKVNNISIDSIIETIYGLILQKYIYEDDVVFGKTMNIIPIRVRVRQSEKFIDVVRKLKRQWSRSLEYGYYLLSDIENKNHLNTKLINTIFIAKSFDLSYDYDIEKKGYDLSVIVYTKRALKIKIKYKPSIYKRETIRRILNQFDYIIEQIIEDNDILIEDLEFVCKEEEKVLLEDFNNNQYEIPYDKSYVDLFREQVKVTPSNIATRDENRKLTYKELDEVTDKLAGYLNHIGVESEDIVAVMLPRDINIIITAIGIMKSGGAFFPIDTSNPEERLNYLLEDSNAKVVITTDELKSKVVNENTIVLDVNDEEMFKFGYELTEKITSSNCAYTISTSGSTGRPKTIAIEHKSLVNMCYYSVKSISATENDICGIYLSFSFDAVMKQLFPYLLVGASIDIMPEEAKFDEYTVNEYCEENDITILALPTAFARLFIQNCNNNSLRVVQTGGERLKGYRKRNYELYNEYGPTEFTVVSTSFHVDREYGKIPIGKPIFNTYAYVLDKKNKLCPIGAPGELCLSGIQISRGYLNKKGLTEQVFVKNPYKTCEHNKLMYRTGDLVRWLDDGNLDYIGRMDNQVKIDEFRIELYEIENIINNITEIKSVVCISRTNDDGDMYICAYYVIDEEDSGKINERTIREYLNEHLPPYMIPTIIMRIDKIPVTPIGKVNKRALPE

SEQ ID NO: 53157 - protein, 179 aa, Clostridium difficile
MSIALILIDIQNDYFKNGKCELFQSEETAENAKKILLFFRKNNLPVIHIQHISTDKTASFFLPNTHGSEINKIVFPLDNEEIIIKHTPDSFFETDLQSILEEKNITNLVICGMMSHMCIDTSVRTAKKLRYDITLISDACTTKNLSWNNIEINANTVHQVFMASLQNSFADVKNTDKFL

SEQ ID NO: 53158 - protein, 269 aa, Clostridium difficile
MKDYYKIGEISKIYGIGRDSLMYYEEIGILRPVRDINGYRMYNISDIWKLNLIKEFRSLNFPMKKIKEYLDDRSIESTKNILNEELDLIDKKIAEFISHKENIIKRLSSIESVIQNTKIDEIEVVYIEKRKALELNADIKRDEDFDFLIQKLQKEYEDRFNILGNNNIGSAFSTEAINKGIFNEFKSVFCFLESNEKVYNIVFDEGYYVTLNYTGSNSNNKMYMEKVFKFIEENNYKIIADPIEIYKIDIHETGIVEEFVTEIQVPITK

SEQ ID NO: 53159 - protein, 158 aa, Clostridium difficile
MKEILINPIGKICIQGEEVFIKLDKKYVPALNELDDFSHLNVFWWADGFDNPELRSILETPKPYKSGPDVIGIFATRSPIRPNPIALTAVQIINIDHENGIIKIPYIDANDNSPVIDLKPYTPSVDRVENPSVPKWCSHWPKSVEKSGEFNWEDEIEF

SEQ ID NO: 53160 - protein, 744 aa, Clostridium difficile
MQNHNYIKMLNKKVEVLSKELDSRNFKLKTLNEIDFFSKIPNREFMYQYIDDCISKNIHIGIMLLNIDNFKLFNDIYGYLVGENLLITLTQNLLHFIPESKGIVAYLKGEGFLIVLPNVSNKELNNMGATIIESARELKIKLPNEKEIYSNVTFSIGSTIWNGEPNMTTLMLFNQVYSALKKAKSEGKNRYILFDFKDNSFYNKLENDKEFLSEISHVLQTKQIEVFYQPLYNIKNNTIVGCEALARWRHPIKGLLTPDKFIPLFEQFGLITELDLHLFEENCKNIRRWIDNNDVFVPICCNFSRLHFFNPNFPSMLKGITEKYSVSTSNFSIEITENILIENTNTIIQQLAELRSYGFSVSMDDFGSGYSSFGMLQNLPFDIIKIDRIFLSHNLNDFKNTTILYSIINIARALGMLTVCEGVETEQHVEFIKSINCDIAQGYYYAKPMECKEFEKLLSKENNSEKMFIKYSDIGKSLIEKIFDGFFIMQDMKKLRANVTEDIQWFDFYNKTEITSFPKVIEHFEKHIKGKKFSILYKSITPHNTESDSLLISGEAVLSDEASEHQKYSNFYFSANCIISENKLLLAKLHLDLIKTAGYINEFESYSIPKMTNTHLDESNILSQFYSMLPVGIIRYDLFGDMIITYMNEEMFDIIGYTKEQFFGEMGGNLRAIVHPDDLDFVYKKSLDMIDTNKIEPFLYRFIKRDGQIVTVMYTQCNLSAIDGRSIAQGMYVDVNKIKNLTKI

SEQ ID NO: 53161 - protein, 634 aa, Clostridium difficile
  MISC_FEATURE (194)..(194): X=any amino acid
ILMIDNYDSFVYNLVQYIEELGETVVVKRNNEIKISDIEELNPEVIVLSPGPCSPKEAGICIDIVEHFKGKKPILGICLGHQTIGHVFGGDIIKAQQPVHGKVYSINHTNKGVFRGLKNPLNVTRYHSLIIDSNTVPKELEITAITDKGEIMGIRHKKYLIEGVQFHPEAILSEYGHEMLKNFITEARERVHVXYDKRINTKLNSFEIFTIFRNEHDSFILDSAMDKEKLGRYSFISSQPFKVLKYKDTDENPLEVLKEELHKYRVVNDTNLPFVGGAVGYLSYDLGNYIENLPRTAVDDIEMPDMYFGFYNHVIVIDHLVQKTYIATPNIDIELEEKIIDNIEQRILKEEKKGIDSICYEEKEVTPIRLKSNFTKEEFKNAVQSVREYIRQGDIYQANLTQRFSGETELTSFELYRDLRRFSPAPFGAFLNFEDAHILSNSPERFIRCVNKRIETRPIKGTRPRGKDKKEDLRLQQELRNSEKDRAELLMIVDLERNDIGRISKTGSVKVPELFVIEPYANVNHLVSTVVGELKDDKDATDVIKATFPGGSITGAPKIRAMEIIDELEPTQRNVYTGSIGYIGFNGDMDFNIAIRTIIKNDKKVYFQVGGGMTWDSDPDEEYQETLDKAKSIM

SEQ ID NO: 53162 - protein, 577 aa, Clostridium difficile
MSILLKKAPKLAKHIITSFYINRDINEVLKYLCENVTWIGPGEQEFLTSFNEIKNYFYAGQDEIPSCDINNDIFETVSEDENRCMVLGRYTVRTKENAQMILEVNQRCTFEIIEDRGKLLIKHMHISNPYGEMQLDEYFPTKIGTQSYDYLQRLLKEKTEVIEMITNNINGGLKGSNDDSTYSFFYVNEGLPKILGYTYDEFMEMSGGSAVGAVYPPDLPKALEDCERCFAKGPTYSSEYRIRKKDGTLMWVLDSGMKSLNSDGIVKINSIITDITQLKNIESELKLERERYRIALQNITDIMFEYDIENDTLIKYQRVEIDKKIELENFETKNYSKLLESGKIIHLDDIGKLLEVLHGNLRETIEIRQVNSLTKNEWRWIRVQCSVIYDSDHNPIKTIGVLKDITEDKSKLESLINQAQRDPLTQLYNQRVSQNLIEEYLCSSDSKNNDALLVIDIDDFKTVNDTFGHLEGNEVLVAVSKILLHNTHDKDIVARIGGDEFTIFIKSLTKDLIIKITNDILNDASKIKVKDNHKITLSIGIAFTDDSTKLYKDLFSKADKALYLSKADGKNCYSTYE

SEQ ID NO: 53163 - protein, 454 aa, Clostridium difficile
MILNTKLFGRTYQFKGLYDVMAKANEEKSGDKLAGLAAESAEERIAAKVVLSHIKLEDIRNNPAVAYEEDEVTRIIQDAVNEKVYEEIKNWTVSELREWLLDSNTTSLDIRRISRGLTSEMIAAVAKLMSNMDLVYAAKKIKVTAHCNTTIGEQGTLSARLQPNHPTDDPDGILASLLEGLTFGIGDAVLGLNPVDDSVESVTKVLKRFEEVKQKYQIPTQTCVLAHVTTQMEAIRNGAPADLIFQSIAGSEKGNEAFGFNGDTIEEARQLALKHGTATGPNVMYFETGQGSELSSEAHHGIDQVTMEARCYGFAKKYEPFLVNTVVGFIGPEYLYDAREVVRAGLEDHFMGKLHGLPMGVDVCYTNHMKADQNDMENLAILLTTAGCTYFMGIPHGDDVMLNYQTTGYHETASLREMFGLTAIKEFDAWMEKMGFSKDGKLTELAGDASILLG

SEQ ID NO: 53164 - protein, 949 aa, Clostridium difficile
MIMQIDMNKLTPMMKQYLEVKNRYKDCILFFRLGDFYEMFFEDALVASKALEIALTGKACGLEERAPMCGVPFHSANSYISKLVENGYKVAIGEQMEDPSTAKGIVRREVIRVITPGTVLDGNLLENKKNNYLLSLYKDGTNIGLTYVDISTGETNATCLNEDKVIEEIAKIHPTEIIINDLDFIEKLRDIATVSNIYINESFSDNYLDINILKEYFPDVYLQKLKFDDKGLIKSSLSILLNYIYNTQKQITSNINNINIYNSSEYMVLDMFTRTNLELTQTIRGNKKKGSLLHVLDKTSTAMGGRLLRKYVEEPLINKSKIENRLDVIEEIKDDFILREDLNDILKNIYDIERICGKIAFERVTPKELIHLKNSIEKLPNLKDTINLSNAKILKEYVSEMDKLDDIYNLIDEAILEEPTITIKDGNIIKSDFSDELKELREISKNGAFLVKEIENREREKTGVKSLKIGFNKVFGYYIEITKANFKQAKLDETYIRKQTLSNAERYITPELKEIEEKILHAEEKIKSLEYEIFVEIRDTIYKNIDRIQKVAKTIANIDVFVSLATVAHINNYVKPAINENNKLDIRNGRHPVVENIVGEENFVPNDTYLNRGENIINIITGPNMSGKSTYMRQTAIIALMAHIGSFVPAESADIPILDRIFTRVGASDDLSQGQSTFMVEMNEVSLILKNATERSLVILDEIGRGTSTYDGISLAWSIVEYIQKNIRCKTLFATHYHELTDLEEEFKEVKNYSIAVKEDGEGIIFLRKIIPQGADKSYGIYVAKLAKLPDEVIERAKYILKDLEKNHVYNSVAINGDKENNNIINSNLDEELVKVNQSNFKNKYESLKIEHELIVKDYKHIKKDYDKLNSKFKALNDEVALMKQNDDKEKINQEDSVKEVALTQISFDSVNRDILSEEILNLDILNMTPLDAINSLYNLQRKAKEIKS

SEQ ID NO: 53165 - protein, 655 aa, Clostridium difficile
MKNIINILDDLTINKIAAGEVVERPSSVVKELIENSIDAGANKISIDIIDGGKSLIKITDNGIGIPSSEVEKSFLRHATSKIKKIDDLYDLYSLGFRGEALASISAVSKLEMTTKTKDEIIGTKIYVEGGKIISKEPIGFTNGTTIIIKDIFFNTPARQKFLKSTHAETINISDLINKLAIGNPNIQFKYTNNNKQMLNTPGDGKLVNTIRSIYGKEITENIIDVEFKCNHFKMNGYIGNNNIYRSNKNLQHIYINKRFVKSKIIIDAITESYKSIIPIGKHAVCFLNIEVDPSCIDVNIHPNKLEIKFEKEQEVYIELRDFLKVKLIHSNLIGKYATYSDKKTQPRIAINSREKSTDYKLRNNDLLESTPKNSNITKGKDEVIEVVTLSSEKPINEFQSVSEVLNASVEDDVKNINYLSEDSANDNIQEEFQVDGIKNEGNYYLGDSIKDSEEEYLCSSKRKFSLYGYSVIGVVFNTYIILSKDDSMYLLDQHAAHERILYERYMEKFYRQDINMQILLDPVVIEVSNVDMLQIENNLELFMKFGFELEIFGNNHIMVRCVPTIFGVPETEKFILQIIDNIEEITSNYDLKGERFASMACRSAIKANDKIYDIEIKSLLEQLEKCENPFTCPHGRPIMVEISKTEIEKMFKRIM

SEQ ID NO: 53166 - protein, 354 aa, Clostridium difficile
MLKKLEVLEDTYKDLSEKIGDPDVINDQKVWQKYIKEHADLEPIVMKYREYKSVLDSIKESKEILQEESDEELRELAKMELAEMEEKVAPLEEEIKILLLPKDPNDDKNVIVEIRGGAGGDEAALFAGDLFRMYSRYAERRRWKIELLSASDTGVGGYKEVSFMIKGKGAYSRLKYESGVHRVQRIPSTESGGRIHTSTSTVAVLPEVEDVEVEINPNDLRIDVFRSSGNGGQSVNTTDSAVRVTHIPTGEVVSCQDGKSQLKNKEQALKILKARLYDKALAEQHKDIAAERKSQVGTGDRSERIRTYNFPQGRISDHRINLTLYKLDAFLDGDIDEMIDALITVDQTEKMTAI

SEQ ID NO: 53167 - protein, 502 aa, Clostridium difficile
MLKRVRCSYLKKNRLIAKNISIAFIVLFFFSVFTFFYVGNINRVLEYETNDIITVTIAGWIILSFLFLGIIIYILYSKANSQKTIEKVAYTDFVTGYSNWRKFELDVTNLLKKTSQNNKYAMVIFDIDKFKAINDIYGHKKGNLILKDIADTLNELTDINETFARVSADNFNILLTYNKKEDIINIIKKIMANNELVNLSFGIYEIKDKDLSVSVYSDRASLAKSSIKNNSDVNFAFFNDKLREKLLFEDKIEKEMEYALESGQFVMYLQPKYNIKLDKFCGSEALVRWQYTEKEVIYPGDFIPIFEKNGFIRKIDMYILEQACKEIRSLFDKGISPLPISVNFSRVDFFKKDFIENIVNICDRYKIPYSLIEIEITESSMFGDTDTLFNVSRNLQDIGFIVAMDDFGSGYSSVNMLKNIPLNVIKLDRGFFVDDKDVDKSQIVIKSIVSLIKQLGIRVVAEGIETRSQIEMLKKANCDIVQGYYFSKPLPIKEFEKLVYKI

SEQ ID NO: 53168 - protein, 492 aa, Clostridium difficile
MHIESTMVMPIELSKKLLKSGTTTIIADPHELVNVKGVSAIDFLLESTKDIPLNVYIMVPSSVPATSFETNGVGKFSAKDMESYVNNPRILGLGEVMCFNDVINSENEILDKLELFKNKVVDGHAPNINGKSLQTYVCAGIENDHECITFDEVYEKLRAGLKILIREGSAAKNLKSIVSGMLKHNLPIEEFMFCTDDKHLDDIEKQGHIRWNIKCAIDLGMEPVRAIKVATYNSAKAYGLRKIGAIGAGYKADIVVLNDLDKMEVDSVYKDGNLVNEEMFSNYNYEIKDKELLNTVKFKYINKEKIQLKVSEKNYVMEIVPYQILTNKVYESLPCADGYFVPNKEYSKLCVVERHRMTGNVAIAPLKGFGIKNGAIATTVAHDSHNIIVAGDNDDDILVAINYLKEIQGGYVIVSNGKVLAHLSLQVAGLISTFTAEEVQEITDNMLEIARKMEVPEYVDPFITLSFMALPVVPQIRLTDLGLFDVEEFKFI

SEQ ID NO: 53169 - protein, 339 aa, Clostridium difficile
MMGKIRFGIVGTSNIANIFLRAASRVKDFELVAVYSRNLEKAREFGTLYGASIFFDDLEQMAKSKDIDAVYIASPNALHSKQTITCLKHKKHVLCEKSLASNLKEVKSMIKTAKDNNVLLMEAMRITCVPNFKAVKENLYKIGKIRRFFGSYCQYSSRYDKYKNGIIENAFKKELSNGALMDIGVYCIHPMVNLFGAPKTVKAVSHILQTGVDGEGSAVFQYDDMDAIIQYSKVADSYIPSEIQGEEGSIIIEKLNLFEKAIIKYRDGREEDISIPKEKAEEKPREIEGMYYELVEFISLINNNKIESNINSHENSIIVMEIMDEIRRQSSIVYPADSI

SEQ ID NO: 53170 - protein, 203 aa, Clostridium difficile
MINDIKNKFKNYKPYINGYKNMKRASVLIPIVEINNTHYILFEVRSKNLKHQPSEISFPGGKIESGETPYEAVIRETCEELGTFSDNIEVISSLDLLITPVKFIIHPYLGYIKNINNLNINKDEVDHTFLVPIKYLLENPPNTYSNTVKVFPDENLPYGSIPNQKDYKFESGSYPILFYKYKDYVIWGMTAKILENFLNFLSE

SEQ ID NO: 53171 - protein, 364 aa, Clostridium difficile
MFFSLSKENYRRYCSMKARLILEDGTVFIGKAFGYLEESVGEVVFNTSMIGYGEVLTDPSYYGQIVTMTYPLVGNYGINLSSAESEKVQVKGFIVREKSDSPSNFRCEIDIDQYLKQNKVIGLEGIDTRALTKILRNNGTMKGIITLEDSKLEDVKHKLDKFSNTEAVRTVTRKEVEHIKGNGPKVAVMDFGVKRNILRSFIARGCDITIFPATTSPEDVLSINPDLIFLSNGPGDPEDLEDVIENIKALIGKKPIVGICLGHQLLALALGGKTAKLKFGHRGGNHPVKDLEEGKVFITSQNHGYYVSEVPEQMKVTHINLNDNTVEGMRHEKLDVYSVQYHPEACPGPKDNDYIFDKFLELVK

SEQ ID NO: 53172 - protein, 150 aa, Clostridium difficile
MNINEIKELLKAIDSTNLEYVKLESSDLRLEVSKKAQSTSSPVLSVQQESVVDLSLEKPVVNDTPVTSNENLSVVVAPLMGTFYDSPSPDADSFVKVGDVVEEGDTLCILEAMKLMNEITSEIKGEIIEVLVSNEELVEYNQPLFKIKPL

SEQ ID NO: 53173 - protein, 453 aa, Clostridium difficile
MIKKILVANRGDIAVRIIRTCKELGIKTVAIYSEIDKDCFHRYIADESICIGPNNISKSYNNIENIIYLALKLKCDAIHPGFGFLSENPEFAKQCEDNNIIFIGPTREQMILMGDKSRARETMMELNIPVVPGSESVLKTKEEALEVAREIGYPVMIKASSGGGGKGMRIVRKEEELFSNFDMASSEALAAFSNSDLYMEKFIENPRHIEVQVFGDKHSNAIHLGDRDCSMQRRNQKVIEESLSPYLSDEERQKLHKIAVDIVKGVGYIGAGTIEFIVDKDKNFYFIEMNTRIQVEHPVTEMVTNLDLIKLQISIANGDKIPFKQEDITFRGHAIECRINAEDSSKNFAPSPGKIESLNLPGGFGVRFDTFVYAGYTIPPLYDSMIGKLICWAETREECISRIYRALDEIIVEGINTNVEFQKALVTSEEFREDTHHTKFIEDVFMKKEFATL

SEQ ID NO: 53174 - protein, 314 aa, Clostridium difficile
MIENNSEKIKVLENDIKQLITISKANNIDLSDKINSLNEKLEKLKEDAFSHLSAYEKVTLSRDIKRPTTLEYIEHICSNFLELHGDRLFKDDPSMVGGIGQIGKFNVTIVGHQKGRDTKENIKRNFGMPHPEGYRKALRLMKQAEKFNRPIITFIDTSGAFCGLEAEERGQGEAIARNLLEMSKLSVPVITFVIGEGGSGGALGIGVGNDVCMLEHSVYSVISPEGLSSILFKDSSKAKEACDVMKLTSNDLYDLKIIDKIIKEPLGGAQKDVEAVSKEIKAYILERLNHYKDMDKEEIIAQRYKKFRNIGKCL

SEQ ID NO: 53175 - protein, 372 aa, Clostridium difficile
MIVVEKAYKFRMYPNKKQQELINKTFGCCRFVYNKYLAKRIDVYKNDKETFTYKQCSSDLTNLKKELNWLKEPDKFSLQNALKDLDNAYKKFFKEKAGFPKFKSKKINRFSYKTNFTNGNIMYCGQHIKLPKLGMVKVRDKQVPKGRILNATISKEPSGRYYVSLCCTDVDIEVFENTNNHIGLDLGIKEFCISSCGEFIENPKYLKKSLNKLAKLQRELSRKTIGSLNRNKTRLKVARLQEHIANQRNDFLQKLSTKLIKENDIICIEDLQVKNMIRNRKLSRLISDVSWSEFIRQLEYKANWHGRQIVKVGKFFASSQICNKCGYKNEEVKDLNIREWICPSCNETHDRDINASRNILKEGLRLITIQNK

SEQ ID NO: 53176 - protein, 612 aa, Clostridium difficile
ERLNNNLEAISMLNRVESGERELDITAQEVLAKYVGWGGLSDVFDESKDGQWKDARAFLKENLSSSEYEAARESTLTSFYTPKIVIDGIYKTLSGMGFKQGNILEPSMGIGNFIGNVPDEMGKSKFYGVELDSVSGRIGKLLYPESEVQVKGLEETGFSNNFFDVAIGNVPFGEYKVNDREYNRNNFLIHDYFFAKSIDKVRNGGVITFITSSGTMDKKDESVRRYLAARAEFLGAIRLPNDTFKGVAGTEVTSDIIFLKKRDSVLERDEAWIHLSEDKNGLVYNKYFVDHPEQVLGSMREVSGRFGKTLTCEPIAYLGQEINMASLKERIEIAGERISKDTKYEEIELLDDEITSIPATDDVKNFSYTLNDDEVYYRENSLFIKKEVSDKNKEKIKDYLELNVALKDVIYKQKEDFSEEEIKASQEKLNEVYDNFSKKHGFVNNLSNTRALKEDSNFPLVSSIEILDEEENFKAKGDIFSKRTITKAKVIDHVDTSLEALVLSVSEKGYVDFDYMGSLTGKDRATLIEELRGEIYLNIREEQNFYRPLSFNPEDGDLPFACANGSNSYKYGYVTKDEYLSGNIRDKIAIVDSYLSKLRQTERELPHLGFVE

SEQ ID NO: 53177 - protein, 208 aa, Clostridium difficile
MDYLTIALAKGRIEGESFKKFKKMGLGDSIDTDTRKLIFKDEENKIIYIHVKPSDVVTYVEKGVADLGIAGKDTILENETDVYEIYDLGFGKCKFAVAGLKGDSIYREDEYLKVATKYPNIAKKYFKEKGQKIEIIKLNGSVELAPIVGLSDVIVDIVETGNTLKANGLEILEDICNISARIISNRASYRFKYEQIQNIIRLFEELDN

SEQ ID NO: 53178 - protein, 70 aa, Clostridium difficile
MLVISRKKDEAVLIGDNIEVKVVGVDGNNIKLAISAPNNISILRKEIYEKVKNENIKATNKNIKILKSLK

SEQ ID NO: 53179 - protein, 1134 aa, Clostridium difficile
  MISC_FEATURE (15)..(15): X=any amino acid
SMCTNCKSRDKTCYXYSKSYILSGKITDEEFSKIKDYCINPVDSREASLEKPETLKMETEIPTTVEVLDGFIDLDEKGLRTFVSEKGLAMTLGDLQHVQKYFKDTEKRNPTITEIKVLDTYWSDHCRHTTFMTEIENVKIEDGKFNDIVKEAYQMYLNSRDNVYVNRHKDICLMDIATVAVKELKKNGKLNDLDESEEINACSINVDVEVDGKMEKYLVMFKNETHNHPTEIEPFGGAATCLGGAIRDPLSGRSYVYQAMRVTGSADPRTTLEDTLPGKLMQRKITTEAAHGYSSYGNQIGLTTGQVAEVYDENFVAKRMEIGAVIAAAPKENVVRERPEAGDVIVLLGGKTGRDGCGGATGSSKEHSEESILTCSAEVQKGDAPNERKIQRFFRNKEVAQMIKRCNDFGAGGVCVAIGEIADSLDINLDLVPKKYDGLDGTELAISESQERMAVAIKKENKDKFIQLAVEENLEATHVATVTDTGYLRMFWNGKAIVDINREFLDTNGVKQTTDVHVTKVDEENTFFSSNEIVKDVKCSSMKDKFTKVLSDLNVCSQKGLVEMFDNTIGGNTVLMPFGGKYQATPTQGMVAKIPVLGGETNTSTIMTYGYNPKVGKWSPFHGALYAVVESVCKLVAIGGNYSTTRLTFQEYFEKLGNNPEKWGKPFSALLGAFYAQSKFEIPAIGGKDSMSGTFKDIEVPPTLVSFAVDTVDAKKVVSPEFKKADSKVVMLCVNKAENDVVDFEELKRNLDKVRELIHGNKVLSTYALGFAGVGEAISKMAFGNKIGFKFSEEAEKAFTDDKLFEASYGNIVLELANDDLSMLEGYNYVVLGSTVKEASIFIKGEELALDELYKAHCSTLEPIFPTKTEEVKSKIETISYISQGEAKKSSLSIATPRVFIPAFPGTNCEYDSARAFERAGANASIRVFKNLTYKDIEDSIDTIVNEIKSSQIIMLPGGFSAGDEPDGSGKFIATVFRNPRVQEAINEFLTQKDGLMLGICNGFQVLIKLGLVPYGEIRVPSESAPTLTYNNIGRHQAKIARTRISSNKSPWLAQTNVGDIHNIAISHGEGKFVASEDVMRELIANGQVATQYVDFNNEATYDIEFNPNGSFYAVEGITSADGRVFGKMGHSER

SEQ ID NO: 53180 - protein, 362 aa, Clostridium difficile
LKLQEYKHSMEQMASNLEELRVSLDIASLMKNIQINEEKMNQQDFWNDNEVAQRVLQENKSLKETLEEYESLKSLLEDIEVLIEIGLEEDDDSVERDIEKSIESMEEKLSEMKIKTLLNGEYDKNNAILSINAGTGGLDAQDWAQMLLRMYIRWSESKGYKVKLLDIISDPEAGIKTATILVEGTNAYGYLKSEKGVHRLVRISPFDPSGKRHTSFASIDVTPELDENIEVEINPSDLKIDTYRASGAGGQHVNTTDSAVRITHIPTGVVVQCQNERSQHLNKDRAMRLLMAKLIELKELEQKEKIEDIQGKYSQITWGSQIRSYVFQPYKLVKDHRTNAEFGNVDSVMNGNIDLFINEYLK

SEQ ID NO: 53181 - protein, 891 aa, Clostridium difficile
MSFMDNLFNMADKKELKKFNKTVDIIDSLEPKFESMADSELKNMTNIFKERLANGESIDDILPEAFAVVREVSKRVLGLRHYRVQMIGGIVLHQGRIAEMKTGEGKTLVATAPVYLNALTGKGVHVVTVNDYLAKRDRDQMAKIYEFLGMSVGVIIHGQNPKVRKEQYDCDITYGTNNEYGFDYLKDNMVIHKEQRVQRGLNYAIVDEVDSILIDEARTPLIISGPGDKSTHLYSDANTFVLTLKPDDYELEEKDKAVSLTASGIQKAEVYFNVDNITDISHTELYHHINQALRAHVIMKKDVDYVAKDGEIVIVDEFTGRLMFGRRYSEGLHQAIEAKEGLKIQRESKTLATVTFQNYFRMYKKLSGMTGTAKTEEEEFKAIYKMDVFQVPTNKLMIREDLPDCVYKSEIGKFNAVAQEIIERHKVNQPILVGTVSIEKSELLSQILKKKGIKHEVLNAKHHDKEAEIIAQAGRLGAVTIATNMAGRGTDIVLGGNPDFLTKREMRRNGFKEEIVNRVDTPIEGIPVKGNEILFEAREEYEKLFEKFKQQTQEEQKQVVEAGGLAIIGTERHESRRIDNQLRGRAGRQGDPGSSRFYIGLDDDLMRLFGSDRISGIVDKIGLEEDMPIEHRILSKSIEGAQKKVEGKNFGIRKHVLQYDDVMNKQREIIYAERKRVLEGEDLQEQIQSMTHSIIEEAVTLYTQDKGFDEEGFKEHMYNLFLPKGSIEIPEIEKLNPVEITEKVYEIAMKIYTSKEEQVGYERMREVERVILLQAVDNHWIDHIDAMDQLRQGIGLRAVGQQDPVIAYKMEGFDMFDEMNKHIKEDTVRYLFNITIETPVERKAVVDVENLSSPSDGTLPTSKTVKKDEKVGRNDLCPCGSGKKYKNCCGR

SEQ ID NO: 53182 - protein, 444 aa, Clostridium difficile
MNRLERILMPLAEKIGKNKLLIAIRDGFLVSSPLLIIGSLFLLVANFPIKGWNEFVGQIFGPDWAVKLQQPTVATFEVMTLLAVLGIGYSYAKQIDVDPIASAAVAIVAFFIITPFVIPYTPEGTESVYMVTGIPLGWMGSKGMFVGMITAITSVKLFAAVVKKGWTLKMPDGVPPTVSKSFAALIPSAIVMVVFFLVKIAFEATPYGNVHEFIFNFLQIPLLKLGNTLSATAIAYVFLHLFWFFGINGSSVVGAVYNPILKILSAENLAAFQAGTKLPNIITAQFQDMFATFGGAGSTLSLIIAMLLICKSKRIKSIGKLSILPGIFGINEPLIFGLPIMLNPLLLIPFALVPTVNIIIAYFCMSTGLVPLTNGVQLPWTTPIIFSGFLTTGWQGAVLQLVLLILGIFMYIPFIKILDKQYLKDEKSNVAEEDDDISFDDLVL

SEQ ID NO: 53183 - protein, 102 aa, Clostridium difficile
MEEIVLKIIIHAGNAKSMLYEALDYAKENDFKKADELIENANEEILKAHKVQTELIQKEAGGDKSDISILLIHSQDHLMTCMSERNLIKEMIMLRKEIQKLK

SEQ ID NO: 53184 - protein, 121 aa, Clostridium difficile
MREEINDCNCNIVHEEIVTEAKSTMPDEEMLYDLAELFKVFGDTTRVKILYALFANEMCVCDIASLLNMTHSAISHQLRVLKQARLVKFRREGKTVYYSLDDSHISQIFDCGLNHIRETYK

SEQ ID NO: 53185 - protein, 739 aa, Clostridium difficile
MEKLEGMISEIVFKNEDNGYTIAHLVNENDEIVVVGCMPTLAIGESIEVEGKWVNHKIYGTQFEVNSFMPVTPSSLEGIYVYLSSGMIHGIGEKMAKRIIDKFGVDTLEVIQNSPEKLQEVEGIGSKKVKQIVKSYEEDRELRNIIIQLSPFGITPNYCLKIYKKYKSSAIEVINKNPYQLAEDIRGIGFKVADSIASKIGIDKNSKDRICQGILYTLNKSLSNGHTYLPEHVLIQDSEKLLELNGEIIKECVMMLVYNQKIHIEKVNNENLIYLMPYYLAENGVCSQIVKLSQYEFEDLKIDIDNEINVLEEDKKIKLAEKQILAVKESVNSGVLIITGGPGTGKTTTINAIIDIFENNGKSVTLAAPTGRAAKRMSETSNKEAKTIHRLLEMGFSTDDDLTFFKDEEDPINSDVIIVDEVSMVDIILMYNLLRAIKLGTRVILVGDSDQLPSVGAGNVLKDMINSNIINVVKLNEIFRQAQESMIIVNAHKINNGEPLYLNTKGKDFFFIRKSTNEEILNEIIGLVNERLPKFYKVDKLKDIQVLSSMRKGELGVTNLNIELQKYLNKKEKFKVEESFSKRLFRVGDKVMQVKNNYTKKWETEDQKESGEGIYNGDIGYVYHIDKDKKTIYILFDQTKIVSYLYDELDEIDHSFCTTIHKSQGSEFPVVVLPIAWAPPMLLSRNLLYTAVTRAKKLVVLVGDVKYLEYMIKNNRVNQRYSNLGYKLNKFKQEGLLIE

SEQ ID NO: 53186 - protein, 461 aa, Clostridium difficile
MDNLNKKFLMEYIDEIQGELRDISDKIWKNPELQYKEYYASNLQKECLKKHGFSIEGLEDMDTAFVASYGEGRPVIAVLGEYDALDGLSQKVSTTKEPIVDGGAGHGCGHNLLGTGSIGAVIAVKELIKLKKLKGTIKYYGCPAEEDLSGKVLMIKKGFFDGIDCAFSWHPFDINTPIRIPTLANYSVKFRYNGISAHAAQAPYNGRSALDAVELMNIGCNYLREHIFDSCRVHYVTTNGGKMPNIVPDFAEVWYYIRGVKMEHVRDVFGRIVDIAKGAALMTGTSMEYDIISGVYDYIPNTILTDILSQNMKLVGVQNYNENDYYFADKLAETVSIDKRSSVSSVLSGNKDITKMNLHDEVTDDTFTHNNCISLSLDIGDVSYIIPTAQCSCSVWPIGISAHTWQSCASAGSDMGFKAMLLASKSISCSINDVMLDELVINKAKKELKDTVGSFKYIPII

SEQ ID NO: 53187 - protein, 397 aa, Clostridium difficile
MARHLFTSESVTEGHPDKICDQISDSILDALLEKDPQSRVACETTVTTGLVLVAGEISTSAYVDIPKLVRETVREIGYTRAKYGFDCDTCAVITSIDEQSGDIAMGVDEGLESKTGEEIEEEIEKVGAGDQGIMFGFACNETPELMPLPISLAHKLSRRLTEVRKTGLVDYLRPDGKTQVTVEYEGSKAVRVHTVLISAQHCETVSNDKIREDLINHVIKEVIPAELLDEETKIYINPTGRFVIGGPQGDTGLTGRKIIIDTYGGYSRHGGGAFSGKDPTKVDRSAAYAARYVAKNIVAAGLADKCEIELAYAIGIARPLSIFIDTFGTGKVSEEKLVELVNKHFDLRPGAIIRDLDLRKPLYKKVAAYGHFGRTDIDLPWERTDKVEQLRKDALGE

SEQ ID NO: 53188 - protein, 332 aa, Clostridium difficile
MSSITKHKEEKSSPLLTKLTSVFRDQGSAAVGLVIIFIIMSVASSNFLTLDNLINVGRQISINAILAVGMTFVIITGGIDLSVGAVIALVGTFWATTVVNYNAPIWVGMILALTIGTILGVIKGAIISTQKLPPFIVTLAMLTIISGASFVFTGGRPISVNTDAFKMLGRGYIGPIPIPVIIMIIVVIAGHFLLKRTNFGRPVHAVGGNEEAARLCGVKVNKVIVKVYALAGLLTALAGIILSSRLASGSPTVGDGAELDAIAAVVLGGTNMMGGSGSIVGTCIGVGIIGILGNGLNLLSVSSYNQMIIKGLVMLFAIWINNIKLKKSAKSK

SEQ ID NO: 53189 - protein, 89 aa, Clostridium difficile
MMPGVLIVEALAQVCGVAMMSVEENKGKLGVFAGIDKVRIKREVRPGDTLTMEVEMTTLRKNIAKADAKAYVGEELVCKGELMFALVEK

SEQ ID NO: 53190 - protein, 744 aa, Clostridium difficile
MKLSRYKKNSLVLSIILCSLIISILVITVFNTVKLHNISNKQSKNYLNDVSTQIVMNVDSKIKFILSDLRIMADFIKQYEGDSRYEYLSKRKTSYKYYDVGIIDLKGKAEFLSGKKFDLKNTASYKKGIEGKEYSEVIESMGFVLYSVPIFNDNHEVSSILIGVSDKESMNEILNIDNFNGKGTIEIINSKGKPLFIGKNTELIKDLSHKYKSSGDEPWAQKMLEDFKNDKSGNITITSSKGVQCLLTYHPITRGLNDWHFLLIVPEDAVLGELNKLNSFTITMTFIITCIIGIITLILYIIRRKYVNQIENIAYLDSITNGINSTKFSMLVKPLISESPDSTYMMIAMNIKDFKLINDCFGSEKGNMTLKHLYNILYKNIDENEEFVCRHDADLFYLLIKNRPVLEALELLYKIEADTNYFNKNRENPYFLRLSVGIYTIENHNEDLITIQDHANTARKSFNKTHQSDFSFYSDIERKRLISEKEISNLMEKALENKEFFMCLQPKIDIKSGKISGAESLVRWKNSEKGIIYPSDFIPLFEKSGFICKLDLYILEETCKLISKWIKEGKEVLRISVNVSRQHLNDKLFLEKYKHICNKYNVPTCLIDLELTESIFLENPEAIDIIEDIHSNGFKCSIDDFGFGYSSLGILKDFKVDIIKLDRSFFVSKNNIDRGKVVIKSIIELSKRLGMKVTAEGIEELEQVEFLKNVGCDYIQGYVFSKPLLISDFENFAYENNKIKNIHY

SEQ ID NO: 53191 - protein, 478 aa, Clostridium difficile
MSMILNQIFIEVGGIMRNKIIIGITFSLVLLMSGCASKQTAEINVLATTDLHGVIPYELTSYVKEERKKDKNLTLVDAGDFFDSGEVFGSSMDSYFSARYKDGDNNTESYIETPISKDMKEVGYDVAVLGNHEFISNNKFYLDNMISDFEKQNINILSANTYKKNGDSYTKPYIIKNINTPEGNVKLGILGLTIKEVGERKQWKDGKLVDSKSLELKDQEGYNGELYMNDLVEDAKKWVGIMEKEKPDIIVAVAHTGEKPKKPKNPGNRIQDLAQQVDGIDAIVAGHNHVQIEQHDYKNKSGENVIVTEPGKHGECISKINFKLEKNNDKWNIVDKSSKLIKFEKNQESDKFGEFISSINKVSKDKKEIRLSEVKTPEWDKIYVFKSGTSADDIYKTIGYKWRNISSPKGDDMVQIVVMNNNKPVSYVYGEAEVMPINIKCDESEYKDNVVTIYPNKNDKFKIEKGKQEYSINLKHIQ

SEQ ID NO: 53192 - protein, 511 aa, Clostridium difficile
MKHELVLVIDFGGQYNQLIARRVRENNVYCEILPCTASIERIKEKNPKGIIFTGGPNSAYLEDSPTISKEIFELGVPILGICYGIQIMSHVLGGVVRKGNKQEKEYGKTAITYGKSSLFEGITTNSVWMSHTDLIEKVPEGFTIVANTNDCPVAAMENVERNLYGVQFHPEVEHCLEGDKILTNFLYNICKVKGDWTTDSFIEDKIKELKEKIGDKKALCALSGGVDSSVAAVLIHKAIGDNLTCIFVDHGLLRKNEGNDVERIFREKFDINLIRVNAEDRFLSKLKGVSEPEAKRKIIGEEFIRVFEEESNKLGKMDFLVQGTIYPDVIESGHGNAATIKSHHNVGGIPEDVDFQEIVEPLRELFKDEVRKIGLELGIEEGLIFRHPFPGPGLGIRVIGDVTKEKCDILREADAVYMDELRKAGLYREIWQAFATLPDVKTVGVMGDERTYAYLVGLRAVTSSDGMTSDWYKMPYDVLERISNRIINEVDGVNRVVYDITSKPPGTIEWE

SEQ ID NO: 53193 - protein, 542 aa, Clostridium difficile
MAKEIKFSEETRRALEAGVNKLADTVKVTLGPKGRNVILDKKFGSPLITNDGVTIAKEIELEDRFENMGAQLVKEVATKTNDVAGDGTTTATVLAQAIIREGLKNVTAGANPILLRKGIQKAVTVAVEELKNQSRIVETQEAISQVASISAGDEEVGKLIAEAMEIVGKDGVITVEESQTMNTELDAVEGMQFDRGFVSAYMVTDVDKMEAVLNDPYILITDKKISNIQELLPVLEQIVQQGKKLLIIAEDVEGEALSTLVVNKLRGTFDVVAVKAPGFGDRRKEMLQDIAILTGAQVISEELGYDLKEADLSMLGRASSVKVTKESTTIVDGSGDKKAIEDRVTQIKHQVEQTTSDFDREKLMERLAKLAGGVAVVKVGAATEVELKERKLRIEDALNATRAAVEEGIVAGGGTAFVSVIPAIGTLIESLEGEVKLGAQIVKKALEEPLRQIAINAGLEGAVIVQNVVNSEAETGFDALNEKYVNMIEAGIVDPTKVSRSALQNAASIASTFLTTEAAVADLPEKEDAGMPGMGGGMPGMM

SEQ ID NO: 53194 - protein, 320 aa, Clostridium difficile
MRVRKILSLGIAGILAIGMLTGCSMEGPSKSDNKGGSDKKDLTIGVSTITLQHQFFIDIDEGIKEKAKELGVKVIVNDPDQDVAKQTSAIEDFIQQNVDGMIVLGTDNSAIVPAVEGAFEKMPVVTVDAVLNTENITSYVGTVSYDAGKKLGEYTKKYIDEKLGGKSEIAIVTDLKSQIQMQRIDGFKDALKGSANVKILNSQPGYDREESLNTVENLIQSNPDVDIIYATAENSVLGAKAALESAKNKDVKIVGFDLTEEASSGITDGTILAMIQQQPKEMGRLAVEAVVKAIKGEKVEKNIPVPALLYDKENIKDFKN

SEQ ID NO: 53195 - protein, 325 aa, Clostridium difficile
MEKYIIKLKNKVLREKEISYEEALNLISLDTNNKNDFDILLKSANEIREYFMGRKADLCTIMNAKSGKCSEDCKFCAQSSYYKTGVEEYSLLDYNEILNRAKEMESKGVHRFSLVTSGKGMSGKEFNNILNIYEGLRENTNLKLCASLGIIDYEQAKMLKSAGVTTYHHNVETCRDNFHNICTTHTYKDRIKTIKDAKKAGLDVCVGGIIGMNESEEQRLKMAFEIRELNVKSFPINILNPIKNTPMENYDVLEPMEILKTTAVFRFIIPNVYIRYAGGRLSLKGYDKVGFNGGVNSAIVGDYLTTVGSGIENDKKMIIEQGFEL

SEQ ID NO: 53196 - protein, 900 aa, Clostridium difficile
MDRPNPDILLEKIKNEEEKLSRGQLKIFFGYAAGVGKTYSMLESAQNLKKVGVDVVVGYIEPHTRPETLALLDGLEILPVKEIEYKSIKLKEFDLDAALERKPEVILVDEFAHSNVAGLRHTKRWQDIEELLLAGINVYTTVNVQHLESLNDIVEIITNVSVKETIPDKFLDTNTQLELIDVEPDVLLERFNEGKIYKKEQATRAKNNFFIKDNLVALREIALRKTAERVNKEVQMTRLSKGDVTVIPTSDTLLACISPSPSSAKVIRTASRISDSTFAKWIALYVETPNTARLPFDEQKQLQNNLKLAKKLGGEIIVLHGENIIEQILRIAKLRNVTKIVIGRNHSSNKRFSKRFKKDIVDKLIDEVDYIDIHIIPYKFASDVKYKTKKDKSSIKSKFKISKVDFIKLIFITLMISILAYAVQSMGFIRENILLIYMLGVVLVSMWTKGYSTGIISSVFNIVLLNYFFTAPLYTLSIADSNYIVTLVVFSIVGIITSTLTSKIQHEAETAAKREENTKMIYQIIKGFLRLSNKDDIVNKGIELLSLSLSRDVICYLNVDKHNKSKLYKKNTNNKDKNDLDSEDEKAVASWVLSNSTVAGNDTDTLPGSKGYYIPIVGMNLTLGVVGISCIDSKLDTEDISLIETIIAQMAIALDREILSEAKENTNLEIERERLRSNLLRAVSHDLRTPLAGISGAVSTIIKNKGTIGQDIIDELLSGVYEDTQWLIRLVENLLSMTKIDEGKLEVKKHSELVEEIISEALQKIKKRIENALIDINIPEQILFVPMDAKLIEQVLINLIDNSLKYSKEDCKIEINVYEKDDYVWFEVSDNGPGISKELKKHIFDRFFTGEEGAKDSRKGVGLGLSICKSIIQAHKGEIMVENNKDKGSTFKFSLPKENE

SEQ ID NO: 53197 - protein, 421 aa, Clostridium difficile
MSGKDVNVFEMAQSQVKNACDKLGMEPAVYELLKEPMRVIEVSIPVKMDDGSIKTFKGFRSQHNDAVGPTKGGIRFHQNVSRDEVKALSIWMTFKCSVTGIPYGGGKGGIIVDPSTLSQGELERLSRGYIDGIYKLIGEKVDVPAPDVNTNGQIMSWMVDEYNKLTGQSSIGVITGKPVEFGGSLGRTAATGFGVAVTAREAAAKLGIDMKKAKIAVQGIGNVGSYTVLNCEKLGGTVVAMAEWCKSEGSYAIYNENGLDGQAMLDYMKEHGNLLNFPGAKRISLEEFWASDVDIVIPAALENSITKEVAESIKAKLVCEAANGPTTPEADEVFAERGIVLTPDILTNAGGVTVSYFEWVQNLYGYYWSEEEVEQKEEIAMVKAFESIWKIKEEYNVTMREAAYMHSIKKVAEAMKLRGWY

SEQ ID NO: 53198 - protein, 604 aa, Clostridium difficile
MIFVFIRIVAFFGTLRILFPAGTPALFKSLFAIIISILISSTMQIEYATNIDNIVLFTLYGVNETITGIMLGYITNLCFYSIRMAGSMMDQQMGLSMINMFDPNSMTQTTLIDNLMNWTALMIFFSMDGHHVLIRGIRYSFELIPIGKPFVDNNIDYIINIFVQCFLTGFKIAIPIVLCLLMADFILGLISRSVPQLNVMIVGMPLKILVGIALFIISIPLIVNQISHLLSQIPKMYEGTFALAPMFFMGSADKTEEATPKKKGEQRKKGNIAKSRELPVAMTLLAFTLLVPTLFSYVVDTLKSSLNYFLSLDFYMNINYSNLEKLVIAGLMDFFKIFLPIAIPFLVLGIIANLFQVGILFTGETLKPNLSKLNPISGFKNMFSMRSLSTLIKDTAIISILAYIGYTFFQDNYLDILKLGNIYLPTLMYTVKDLVYSILSKICVAMIAIAVADYVYQRYSHKKQLRMTKQEVKDEYKNSEGDPEVKAKIKQKQRQISSQRTMQAVPSATVIVTNPTHLSIAVRYEKGKDQAPVVVAKGADYLAFKIREIAKGNDIPIIENKPIARLLYKQVEIDQEIPEDMYQAFAEILVAVYKIKNRYKVPKR

SEQ ID NO: 53199 - protein, 637 aa, Clostridium difficile
MIVLSCNNLNKSFGIDSILENISFTVNEGDKIGIIGVNGTGKTTLFKIISGIYGYDSGDIYTSKDCEIGYLEQNTNFYSDNTILEEVLEVFKNLIEMESYLRELEVKISEESTKTNSPIIEKIMDEYSHKLELFSDLNGYGYKSEAKGVLKGLGFSDNDMDKPISILSGGEKTRVLLGKLLLKKPTLLLLDEPTNHLDSEAIEWLEVFLKQYKGTVMLISHDRYFLDQSVNRIFEVHNKKLKVYNGNYSKFVELSKIEKELELKKFEDQQKEIKKQEESIERLKAYGREKHLKRARSKEKALDKVDVLDKPEAYRKKARIQFTPSVQSGNDVLQIRDVSMGYGERILFKDLDLDIYRGEKVALIGANGVGKSTLFKIITNELQPLSGNIKFGTNVHVSYFHQEQKTLNLDNTIIDEIWENNTHLTQTTLRNMLGAFLFVDEEVFKKISTLSGGERARVAILKLILSNANLLLLDEPTNHLDIDSKEVLEEALTNYDGTIFTISHDRYFLNTVVDKILVLDENGITEYLGNYDYYIDKKRQIQEMSIIEEKEEKTRTQIKDEKRKEREQREIEKKNRIKRQNIEKEIEKLEIEIEKLDILLCQEEVYSNPDKAKEVSQEKINLENNLASLYDEWEEFM

SEQ ID NO: 53200 - protein, 348 aa, Clostridium difficile
MEPIKRGVEFMSDIITLAIESSCDETAASVLKNGREVLSNIISTQIETHKKFGGVVPEVASRKHVENIDIVVQEALDKANIGFNDIDHIAVTYGPGLVGALLVGLSYAKALAYTLNIPLVGVNHIEGHLSANYIEHKDLKPPFITLIVSGGHTHLVEVKDYGKYEILGKTRDDASGEAFDKISRAMNLGYPGGPIIDNLAKNGNKHAIEFPRAYLEEDSYDFSFSGLKSSVLNYLNGKRMKNEEIVVEDVAASFQEAVVEVLSTKALKAVKDKGYNIITLSGGVASNSGLRAKITELAKDNGITVKYPPLILCTDNAAMIGCAGYYNFINGKTHDMSLNAVPNLKINQ

SEQ ID NO: 53201 - protein, 716 aa, Clostridium difficile
MNKLDINQILKKEFNLRDEQINNTLKLIDEGNTIPFIARYRKEMTGEMSDVTLREFYEKLMYLRNLQSRKDDVVRLIDEQGKLTDEITQNIEKAKTLQEVEDIYAPYKQKKRTRATIAKEKGLENLALSILENNLDNIEIEAKNYLDEEKEVLSIEDALKGARDIIAELVSDDAKIRKYIRELALREGMIVSKSATDEKSVYDMYYDYSEAVKSMAPHRVLAINRGEKESFLKVKLEINNDKVLNYIINEYVNDKNFKNKEEIVSSIEDSYKRLIFPSIEREIRNHLTEIAQERAISVFGKNVKSLLLQPPVKDKVVMGFDPAFRTGCKIAVVDKNGKLLDYTTVYPTDPQNDVEGAKKVLKGLIEKYDIDIISIGNGTASRESETFVSEMIKEIDSEVQYVIVSEAGASVYSASELANEEHPDINVSIRGAISIARRLQDPLAELVKIDPKSIGVGQYQHDLNKKRLEEVLDGVVEDSVNSVGVDLNTASYSLLEHVAGISKAIAKNIIAYREENGDFTSRAQLKKVKRLGPQAFTQCAGFMRILEGKNPLDNTGVHPESYDICKKMIEIIGYSLDDVKNKNIGEIDEKIKEIGLRELSEKLEVGQVTLKDIIAEIKKPGRDPREEGIKPILRTDVLKIEDIQEGMTLKGTIRNVVDFGAFVDIGIKNDGLVHKSEMSNSFVKDPMSIVTVGDIVDVKVIGIDLNKKRVALSMKK

SEQ ID NO: 53202 - protein, 432 aa, Clostridium difficile
MPSGNFERVDIDGRSVVVAGTYEKAPSNPQGITDVFTAPINGFIDAAEVVGFVLIVGGAFGIVNKTGAIEAVIAHTVNKMKKFQFLIIPISMILFGLGGTTFGMSEETLPFYMIFIPLMTSMGYDSLTAVATVFIGATAGFGAATTNPFSVGIAQALSQIVPGSGIEFRVVMFIIYMAISIGFVMMYANKVKKDPKKSLVHDISLNQELMVNSDTNIKEFTKREAMVIAIFTIGMAIMIYGVLRLEWYITEIAMIFTAIGIISGIASGLKQDEIVNSFISGAGDLITAGLCIAFARGIVIIAENGFIIDTILNSAANLLNGLPKTIFINLTFLIEGLIAFLIPSASGLASLTIPVLAPLGDLVDVSRQMIVTAYQFGIGVTNLITPTSGVLMGALAVANIPWSKWVRFVIPLMVVLTILVMAFLTIGLYLGF

SEQ ID NO: 53203 - protein, 395 aa, Clostridium difficile
MIESIKKRAYEIENELGKEIEEVCNFIFNNPELGEEEYISSKYLVEKMKEYGFDTVYPYCNMETAFRAELGDNDGPTIAFLAEYDALPGYGENKEPAHACGHNWIAASTLGACIVLSKLKENFKGKIVLIGTPAEETTGGKCDLVKAGAFDDVDVSYQMHIEAFNNINCKALAIDSLEFSFEGVSAHAASHPHMGVNALDAVQLTFAGINALRQHVKSDVRIHGIVSNGGEAPNIVPEKAACKFFVRAAERSYLDEVTKKVINCAKGAELMTGAKLSYRYFENSFDNIINNKVLQKITKNNLIEAGITDILEGKDGPVGSTDIGNVSQVCPTMYTEIALDISPMVYVHEKEFLNYANSEEAYDKLHKAVKAMVGCALEIYLEDGLLDEIKKNHLN

SEQ ID NO: 53204 - protein, 240 aa, Clostridium difficile
MAKNKFSEIYEVLKEEILDGKYTSNMMLPTELQLIERFSCSRNTVRRAISQLNTEGYVQSIKGKGVVVLENSCSNDFFLNMHNFKGVESIVEDKKVNTATSVLNFSKILIDNKLSKKTGFKVGSEVYYLHRLRYIDNIPKILDINYFLCSIVKDLDVSIAQGSIYKYIEECLGTKIVSSRKIFKIEKATELELKTLPLNDYNCVGVIKNSVYTDDGKLFEYTESKHTPETFVFMDVTQRY

SEQ ID NO: 53205 - protein, 132 aa, Clostridium difficile
MAKPKKKVTRIRRRERKNIERGHAHIQSTFNNTIITLTDVHGNAISWASSGQLGFKGSRKSTPFASQMAAETAAKAAMEHGLKSVEVFVKGPGSGREAAIRALQATGLEVTMIKDVTPIPHNGCRPPKRRRV

SEQ ID NO: 53206 - protein, 175 aa, Clostridium difficile
MLTPIEIENKEFKKGLRGYRDEEVDEFLDIIKEDYESLCRENTALKEKLGLYQDQVNKYENIEETLKATLITAQSAAEDTCSAANKKAKIIVEEADLKARQIIEQANNRVIEIRKEYDALVKEFKIFRNKFKSLLEDEIRSVDEIFYDVDEKCVNAFEGTTVYNYSNDEAATTLE

SEQ ID NO: 53207 - protein, 298 aa, Clostridium difficile
MFLGVYLYMEMKIAVSNLSKRFGKKQALDNINLEIDSGMFGLLGRNGAGKTTFMRILATLLSKTEGSIHMCGVPIENTKEIRNMVGYLPQDFSMYPNMTVYKAMDYLAVLSDIPLRKRRKIIAKLLSKVNLTNYQNVKVKSLSGGMNRRLGIAQALIHNPRVLIVDEPTAGLDPEERIRFRNLLCEIANDRIVILSTHIVGDIEATCENVAILNSGKVIYNGSTEALAKLAEGKVYSIEVDKKDIENIKSRFIVIGMLTHGGKAILRIISDDKPFETAVNCNPTIEDGYMLIMGGDNI

SEQ ID NO: 53208 - protein, 163 aa, Clostridium difficile
MEQISSKEGEIYMAGKKILATNKRARHEYFIEETYECGIELKGTEVKSIRQGKVNLSDGFASVDNSEVFLKQVHISPYEQGNIFNVDSLRVRKLLLHKHEIRKLIGATTIKGYSLIPLSLYLKNGKVKVEIALAKGKKLYDKRQDMAKKDAQRRIEREMTGKY

SEQ ID NO: 53209 - protein, 386 aa, Clostridium difficile
MKFYGYKRPDGRVGIRNHILILPTSVCASDTTRIIASQVQGAVTFNNQNGCSQVHSDQQLTMDVMAGYAANPNVYGVIVVSLGCENCQNDLVVDAIKERTNKPIKTLVIQEEHGTLKTIEKAVRYAREMAQEASLLRKEEFPISELILGTECGGSDPTSGLAANPLIGELSDKLVDLGATSILSETTEFIGAEHILARRAVNEEVKEKILHIVHRYENSLKLVGEEVREGNPSPGNIAGGLTSLEEKSLGCIHKGGHRQISEVYDYAKQIDKKGLVIMDTPGNDASSVAGMVAGGAQIVVFSTGRGTPSGNPIAPVIKITGNKITFANMEDNMDFDASPVIYGPQTMEELTDDLLNMVVDVANGKQSKAESLGYTEMAIARVCNYV

SEQ ID NO: 53210 - protein, 300 aa, Clostridium difficile
MKFVSFTEGENECKRTGVFSKDELFIIDVNSLNLSRNFKDLNELIQNVSSEDIIKLKTIINESTFYNYDVFKRERCTVHVPIEKPIHDILCVGVNYKDHLEETQTHFDDSFEEPQKTVYFTKRVTKAIGPEDEIDGHFEINNQLDYEVELGVVIGKTGVNIRKEEVEDYIFGYTVINDISARKLQKEHVQWFRGKGLDTFTSLGPCILHKSAVPFPIKLKVCSRVNGEERQSSNTGLFISDVSDIVSELSKGMTLEAGDIIATGTPSGVGMGFSPPRYMSSGDVVECEIESIGILKNYIK

SEQ ID NO: 53211 - protein, 297 aa, Clostridium difficile
MKAEFLTPVVTIFDEEGNLDKEGNKKVYDHLIDGGVDGLVIMGSTGEFFNMSMDMQKELIDLVTSHVNKRVKVFIGTSRMCINESIELSNYAHNSGADGVMIISPYYFSLDDDSIELFYSEIAKNTEAEIYLYNYPDRTGYDLSPELTLRLARKHKNIVGYKDTVTLMGHTRDLINTMKIEFPEFKVYSGYDENFIHNLMSGGAGCIGGLSNLIPEVCSKWAEAYNNRDMEKVIEIQKYINKAMDFYLITNPFIPAMKKAMNIRGLQISDYMTAPFVKPNEKQVCEIKKLMNELNIC

SEQ ID NO: 53212 - protein, 341 aa, Clostridium difficile
MDFINKMRIRNTTIFIVLIISMILTFLVCVAFGSVKIEFKEVIDVVLRGMDNTEHYKIIYNIRIPRVLATMVGGACLAVSGILLQIFFKNPIVEPYILGVSSGSTLSVALMILGGYTLGFESVNSMSIFVAAFIGALIVMSIVILFANKVKNITTLLIIGIMTGYVCSGITNVLQSFANSDKLKEFTMWSMGSFSGFTWEKVEILIIVGILGLLMTVFIIKPLNAFLLGEEYAKSIGINIRFFRVLIVFISSILAAIVSAFAGPIGFIGLAVPQISKMIFKTSDNRVLIPVVIFLGSIVTALCDLISRVILSPVELPISTITSLLGAPIVVMLLVKRKDRA

SEQ ID NO: 53213 - protein, 117 aa, Clostridium difficile
MTIEEHIIDEELVEVAMQIILRAGEARTEIKHALNDLEKFDYRNADLKLAKAKGFMTEAHRAQTKIIQGEAGGEKRAHSLLFAHAQDTLMTIFSELNITMSLVGIVKSIEYKVNNSK

SEQ ID NO: 53214 - protein, 153 aa, Clostridium difficile
MQNFMKQEPCDFSHGRFRFGGEIIRRNEKTKFDWLSRDKEQVEKYINDPFCGVVCSCGFFYDLVQGLKEIEDKENLKKVPLDIPIYIISGDKDPIGKNGKGVLRLRDRYIKLGVKDVTCKLYKDGRHELLNEINREEVFEDIICWLNNKIEIL

SEQ ID NO: 53215 - protein, 699 aa, Clostridium difficile
MNWIELNNQVIIKNEQGKYQLEKDKEALSSYIEEFIQPKLRKFNNLEERLKYLIDEGYYSKEVINQYSIDVIKNIYDMIDKHKFEFQSYMSVNKFYQNYALKSNDGKEILETYNDKVLIVALTLGNGNKDLALNLADKIVKQEFQPATPTFLNAGRKRAGEMVSCFLLSVEDSTEGISYAISSSNHLSKIGGGVALNLSKLRASGESIKDIEGAAGGVVGVAKMLEQSFSYFNQMGARQGSGAVYLTVFHPDFELLMDTKKINADEKIRLATLSLGAIIPDKFMELAEKNEVAYAFYPHTVYKKYGVSLDEIEMDEWYDKLVNDSDIRKKEINPRQMLTKIAQMQQESGYPYVVYIDTANREHTLKDVGIIKMSNLCCEIFQYQTPSEIEGYGGKNEWGQDISCNLGSLNIANVMDNKTIESTVETAIRALSFVADSTDIKPVPTVSNSNSKSHSIGLGAMNLHGYLVRENILYTSDDAIDFSNVFFAMVRYYSIKASMKIAIERNQTFEGFDKSEYVKGRNSKVLSKYYEQSYLPKSEKVRALFEGIYIPTKEDWTKLLDEVKEKGIYNAYLMAVAPTQSISYVQNATSSIMPITEPVEVRTYGDSTTIYPMPFLTNDNMLYYQSAYRMDMRKVIDLVATVQNHVDQGISTTLFVTDEKTTRDIARHYIYAYKKGLKSLYYTRTKMTRDTHECLVCSV

SEQ ID NO: 53216 - protein, 323 aa, Clostridium difficile
MTFNLHKIHNAVNWNREEDGFTQAFWEQNVKQFWLPEEISVSKDIKVWNELSNKEKELYKKVLGGLTLLDTKQGNNGIPSMMSLTENLQRKAVLSFMGTMEEIHAKSYSSIFMTLLSNLEIDELFEWIETEPTLQRKADLVLAQYENTTNQEGLYLSMVTSVFLESFLFYSGFFYPLYLSGQGKMVASGEIISLILRDESLHGKYIGLLAQEIYDSFDKMDKEMLEEKMYSILYSLMENEIEYTNVIYRESGLEKEVVNFLKYNANRALENLGFEKLYTVDAINPIVLNGLSTETKTHDFFSTKGNGYQKGVYEELEDEDFII

SEQ ID NO: 53217 - protein, 248 aa, Clostridium difficile
MKILTVNNLSKVYGKKIIFNALNDINFSIEDGEFVGIMGPSGSGKTTLLNMISTIDKPTTGTMELKGKNPLLLRGEELALFRRRELGFVFQDFNLLDTLTIGENIVLPLTLDKVSVKEQDERLNEVSTILGIKDLLGKRTFEVSGGQAQRTAIARALINNPSILLADEPTGNLDSKSSKVVMELFQKINKENKVTTMMVTHDPLAASYCSRILFIKDGSIYNEIYKGSSREQFYQEIMDVLTLLGGDN

SEQ ID NO: 53218 - protein, 289 aa, Clostridium difficile
MALVTTKQILLDAQEGHYAVGAFNVENMEMVMAVIEAAEELKSPVILQTTPSTIKYAGLDYYLANVKVASEKASVPVAMHLDHGSSFGLAMQALRVGYTSIMIDGSHESYEDNISISKSVVDACMPSDIPVEAELGKVGGKEDDLDGGDGGAYTDPLEAKEFVERTGVSSLAVAIGTAHGLYKGEPKLDLDRLSEIREVVSVPLVLHGGSGIPDEVIKESIKRGICKVNYATELRIAYSNGVKDVLNSDPEVIDPKKYGKKGLESVKDFVKSRMEVCGCVGKAIETVKC

SEQ ID NO: 53219 - protein, 516 aa, Clostridium difficile
MKLEYVLGVDIGTSGTKTVLFDKLGNTIKSCTYEYPLIQEKSGWAEQDANDWWKAVVESIREVVQSSNISSECIKGIGLSGQMHGLVMLDNEGKTLRNSIIWCDQRTVKECEEITDLVGEERLIEITANPALTGFTASKILWVRNNEPDIYKNTNKILLPKDYIRYKLTGEYATEVSDASGMQLLDIRKRDWSDEVLEKLNIDKNLLGKVYESQEITGYVTRDVASLTGLKEGTIVVGGAGDQAAGAIGNGIVKDGVVSSTIGTSGVVFAYTKEPKIDKEGRVHTFCHAIPNTWHVMGVTQGAGLSLKWFKDNFCQSEVEVSNSLGEDVYEIINNQVSQVPTGCNGLLYLPYMMGERTPHLDPYARGVFFGLSPIHSKKEIARSIMEGVSYSLKDCMDIIENLNIDVNEVRASGGGGKSKVWRQMQADMFNQDVYTINSSEGPALGVAILALVGAGIYENIQKACDAIIKTSTKLEPISENVDTYNIYHRLYKRIYKSLKDDFKLLDEVVNAKINN

SEQ ID NO: 53220 - protein, 361 aa, Clostridium difficile
LDSNHHIFTTEQTITVKYIGDDINYIEGSEDEKKLKLDMTNVDVDGDGIPDINIDTDGDGRPDINIDTSGDWKPDINIDTDNTGEWKPSTEGGNGDGIWKPDKNIDTNGDGNPDTDYNRPAIDTDNDGVDDYWKPDKNVDTGSGGYDTGNPNLNKPDPDNGGNSKPDPDNGGNSKPDSGNGGNSKPDSGNGGNSKPDSGNGGNSKPDSGNGGNSKPDPDNGGNSKPDPDNGGNGKPDPDNGGNSKPDPDNGGNSKPDPDNGGNSKPDIDTDGDGKPNINIDTDGDGKPDINIDTDGDGKPDINIDIDGDGKPDINIDTDGDGKPDINIDTDGNGKPDINIDTDESLDSNVGQNVQTGDQSN

SEQ ID NO: 53221 - protein, 454 aa, Clostridium difficile
MCKILGGHEMSEIFKGIGQIKFEGVKSDNELAFRYYNPEQVVGNKTMKEHLRFAMSYWHTLCGEGNDPFGVGTVERPWNNITDPIEIAKIKVDAGFEFMSKMGIEYFCFHDRDIAPEGRDLEETNKILDEIVEYIKVNMEKTGIKLLWGTANMFGNPRFVHGASTTCNADVYAYAAAQVKKAMEITKYLGGENFVFWGGREGYETLLNTNTELEMDNFARFLQMAVDYAKEIGFTGQFLIEPKPKEPTKHQYDFDTATVLGFLRKYNLDKYFKMNIEANHATLAGHTFQHELNIARINNVLGSIDANQGDLLLGWDTDQFPTNIYDATLAMYEVLKQGGIAPGGFNFDSKVRRASFEVEDLFLAYIAGMDTFAKGLLIAHKLLEDEVFENFTKERYASFSEGIGKDIVEGKVGFKELESYALQMPVIKNKSGRQEMLEAILNRYIYEVDTISNK

SEQ ID NO: 53222 - protein, 466 aa, Clostridium difficile
MKNKYEDVAQLIIDGLGGKDNIIDLTHCMTRLRFILKDEKKVNADKLKSIDKVVGVNSTSTQYQVIIGNEVGVVFNAIINKGINTTGDIKSDIKNKNKKNSILNNIIDTITGCMTPMIPALTASGMIKVILSLCTTFNWLSSNSSTYRVLDIIGDVAFYFMPIILAINAAKKFNVNTSIAVIVVGVFLHPNFSAWVSSGDPISFIGVPIQGVIYAASVIPALLTVWMMSYIEKFIDKLTPSMLKTILNPTLVLLISAPIALIVIGPIGNFLGEGLASIINLLQGRLGFIMVCLLAAAMPFIVMTGMHHALTPIFISAFATTGQESLILISQVCANLAQGGATLAVALRSKDSKMKQLASAAWISAIMGITEPALYGVTLKLKKPAMLASIGAGIAGLFAGITHVTLYVPQNSIMAVLGLSGEKGISNIVNGLIVIFIALVAPFIMTYVFGVEKNVKEGIDNVVEEV

SEQ ID NO: 53223 - protein, 368 aa, Clostridium difficile
MTQMGRLGISIYPEKTTSKEIYDYIDKAAENGFTRIFSCLLSVKDTKENIIKKFKSINEYAKFKGFEVILDVNPRVFGELEISYKDLNFFKKTKADGIRLDMGFTGSEEALMTFNPQNLKIEINMSNNTNYIDTIMDYQPNKENLTGCHNFYPHRYSGLNLEHFIKCTERFNKYGLRTAVFVTSQNETTFGPWPVTDGLPTIEMHRNLPIDIQVKHIIAMNNINDIIISNCYPTYEELKVLGSMRKDMVTFDVAIEENIREVEKKILFEEIHFNRGDISDSLIRSTQSRVKYKGYKFELFNTPKIIKRGDIVIESSEYGHYAGELQIALTDMKNSGKSNVVGYIRKEELFILDYIKPWQKFNFKPSTK

SEQ ID NO: 53224 - protein, 304 aa, Clostridium difficile
MLIKTLENLVTEGRNKNTLQIDKEDTLGIIELINNEDKTVAYAVEEQKESIAKAVNIIVDRMKQGGRLFYIGAGTSGRIGILDATECPPTYGVDFELVQAIIAGGNQAIFKAIEGAEDDKELGKQDIIDRGVTSKDVICGIAASGRTPYVIGAMEYAKELGCAVLSITMNPNSEMSKKADLPINIIVGAEVIMGSTRMKSGTAQKMVCNMLTTASMVKMGKVYSNLMVDVKTSNEKLVERAKRIIMIATNVKYDVAEKFLEEADNSVKLAIFMIKSGLDKDSAKSILDRQEGYISEALKSIEKL

SEQ ID NO: 53225 - protein, 283 aa, Clostridium difficile
MSCILKLKQIYEDLTEVDKKIADYILNNTEAISKLSVSELASNSKTSTASIVRFSRKMGYSGFGDLKIEIAKDLMGKENEYTYVDENYDCNIDSVINKITNKNIETINQTRLLNEKDIIKEAVEQIIKAKNVYIFGVGGSALVALDLQMKLLRINKQAFTSLDSHTQLMVSSNVDKEDIAIAISYSGESKEVIKSIENAKLKGCKVICITKYSDNHLSKISDLKLVVPNIEKRLREGAISSRIAMLTLIDIIYISIIQENLNEAEQKLQETKRILDYLNINNA

SEQ ID NO: 53226 - protein, 326 aa, Clostridium difficile
MHLNNINSLKVIKLSLGCSLAIFIAWLLKLEYSMVAGVIVLLTVKDTKRETLKGSIGKIYGFLLCTIFSYLCFNILGYNLTSFSIFIFIIIPLCFLLNIQDVIAMCVVIASHYYLQGETSIKWILNEAGIFAVGTGIGVLINMYIPTNIHKIHEVQKKLQEEVSIVLIDIADIIVNPKKENGYSRDLYTLNSLIDSSISETYDNINNTLLSDTRFFLEHMDIIKSQRDILENLYSYVSQLNSTPPQAHILSAFIHKIGYTEFEAETGNLLLEELKRLMISMKNQPLPVDRTEFENRAILFLCLTELKQFLVNRKHAQMLRDNNFYK

SEQ ID NO: 53227 - protein, 459 aa, Clostridium difficile
MIGSISINEIDKKRFKLDDLSKKIWENPEKAFKEFKACENTANFLRSEGFDVEVGVGGLATAIRASFGSGKPVIGFMGEFDALPGLNQKVSTKQEAFELGAYGHGCGHNLLCTAHVGAVVGLKREMIENNLSGTIVFYACPGEEQLTGKGFMARGGAFEGLDLAINFHPNKISEATIGTSTAVNSVKFHFKGKTAHAGSDPQNGRSALDAVELTNVGANYLREHVTSDVRIHYTITDGGVAPNIVPDKASVWYYTRALSREAVESTYERLVKVAKGAAMMTETEVEVEFLGGCYNTLNNHVLANLVSECMNEIKQEPWTREELDFAAELDRQSPQQYKAMISKYNLPEGTHLYYGGGNVTNFNSYGSTDIGDVMHIVPTAYFFTGCTNLGAPGHSWQFTSCAGSSIGEKGMIYASKIMAMFGAKILNNPEIAKKAKEEFDKSMNGKTYKSPIPDDIPTP

SEQ ID NO: 53228 - protein, 310 aa, Clostridium difficile
MNLLKKYPIPIASLILSIFTLGNLLQSYSESLRNVIGFIGFILYAIYIVKIVLLRKGVKEQLENPLISSTFPTITMATMIFATYIKPLSLELSIMIWSIGIVGHLVLIVLFSKKFLVKFSIKTVFPSWYIVYVGIVAASVTAPAFNQLLIGKIAFWIGFVSYIVLIPVILKRVWIIKEMPEPSLPSIAILAAPGSLLLSGYINSFSDKNNVVLYLLFILSIVFYIIVLGYLPKLLRLPFYPSFAAFTFPMAISAMGMKLMNGYLTKSGHFISWISYASKLEEIIATVIILYVLVLFIIYLSKSETTSKAK

SEQ ID NO: 53229 - protein, 393 aa, Clostridium difficile
MIELEDAIKIIEKNVLPINRVKIVNLIDAVNKVVAEDIYSTIDSPPFDRSPYDGYAYNANSENRNLKVIGTLYAGDVFNRVLNKNEAVKIMTGGKIPQGANCVIKKEDVTVIGDMITLNIKLKEYDNYIFKGEDIKKGQLIINKNQNIGYDGIGVLASLGISKVTVYDDLKVGILNTGTELQDINETLENGKIYDSNRYTLYSRLLKLGIQADTICNCSDDILELEKKVKNMLQSVDFLITTGGVSVGDKDLIPDVFKKIGATELFWKINIKPGGACYVGTLGEKLLFGLSGNPHAAIVVFDNVIVPVIEYLTYKKGTHHIKAIFKGEFNKLSNKDRFVSGKLYTSEGKLYVELNDKKDAKARLSATLRSNCMIKIKKNETIKENQLVDVVIR

SEQ ID NO: 53230 - protein, 566 aa, Clostridium difficile
MIKQFVKYYKPYKKIFTLDLIAAFLFSLCDLVYPMITRNIMDDVVPNKNLRMLVVFAVALILIFIAKAGLNYFMQYWGHVIGVDMQADMRNEVFTHLQRLPNTYFDNNKSGVTMSRIVNDLMDITELAHHGPEDLFISIVMLVGSFFILIDINIPLTLIIFAILPFIIWFAIAKKDKMNIAFMKSRVTIGDVNATLENSIAGMKVTKSFCTEKEELNKFVRSNKLFRRARQDSYKVMAEYYSGMNLYMDILEWVVVIAGGYFTYIGKITLGDFAAYILYVKMFIQPMKKLINFTEQYQNGMTGFKRFIEIMEQDHQKEAKNPIELENVKGDIEIENISFTYEDKTQVLDNLSLSIKAGKTIALVGPSGGGKTTLCNLLPRFYEFDKGDIKIDGKSIKDVSLKSLRKNIGIVQQDVFLFTGTIRDNILCGNPNATDEEMIAAAKKARIHDFVETLPDGYDTYIGERGVKLSGGQKQRISISRIFLKNPPIIILDEATSALDNVTEREIQESLEELSKDRTNLVVAHRLTTIKNADEIIVLTDKGIEERGTHEELVNKNGVYSRLHNN

SEQ ID NO: 53231 - protein, 428 aa, Clostridium difficile
MKNLFIDKARIFVKAGNGGNGSVAFRREKYVPAGGPDGGDGGRGASIIFEVDLGLRTLMDFKYQKKYQAQNGGDGSKGKRAGKNGENLVLKVPAGTVIRDEATGLVLADLKKEGDTAIVAKGGIGGKGNQHFANAVRQAPAFAKSGTDGEERWITLELKMIADVGLLGFPNVGKSTFLSVVTKAKPKIANYHFTTLTPNLGVVQTKFGDSFVLADIPGIIEGASEGIGLGHEFLRHVERTKVLIHIVDISGLEGRDPIEDFDKINDELKLYNEKLSKRPQVVVANKFDILEDESKFEKFKSELEGRGYTVFKMSAATRQGIDEVIAYVSKMLKEVEDVELVSEEEMYRPELDIGTEEELSIDIEDGVYVVTGKALRRIMYSVNFDDMESLQYFQKAMESQGVFDRLREMGIEDGDVVKIYELEFEFYN

SEQ ID NO: 53232 - protein, 419 aa, Clostridium difficile
MKKNKIIAFFAPSIIVGVLVLGIILYPNEAIKSAREGFSIWSNVLVPSLLPFIIGANLIVDLKIVDIIGFIINPITRFVFNVSGKSALAFAISTVSGYPVGVSLASEFRSNGQISKYEAQRLVSFCSTSGPLFIIGSVGTGMFQNSNLGYLMILCHYLGTILVGLFFRNYGNENLPKTKLDLKTNIKNVINIRNSSGNGFFVLFGNAVFNGVNTLLTVGGFVIVFSVVFKILSLFNVISLIASVIYLPLSFLGVSKELCQAFVSGLFEITIGCNKVSSITSSPEILRASLASFLIGFSGLSILAQCCTFLSKTDIDLKLYILSKFAHGVLAAIFIFILYPIANSAVLVSSFADTYNVIYNNLIWFYYLSYYDTILQIVVIIYLISAVFIAKKHMKTLSTNGKLMRYKNTFFTKKFSRKK

SEQ ID NO: 53233 - protein, 259 aa, Clostridium difficile
MLTRIIASLALVPLFLFVVYGGIPLYIAETAIVYIALHEFYKAFKIKDVHPIFIIGYLFSIYLAVKNIFNLPLEYTYAVIFILFLASIIYMLMGKNNVIDVSITFLGVFYIGVFLDFIIITINGFEKGSIYVWLIFVISFMTDIFAYFSGYLLGKHKLIPKVSPKKTIEGAIGGIIGSTLCCILFGYLFGIDLLQLAIIGSIGSVIAQLGDLFASSIKRYVGIKDYGKIIPGHGGILDRFDSVILVAPFVYSAIKFFIR

SEQ ID NO: 53234 - protein, 244 aa, Clostridium difficile
MNNNIIYDIDLNNIPTHIAIIMDGNGRWAKARFLPRTAGHKAGVETIRDIVKECSKLGVKHLTLYAFSTENWKRPKLEVDTLMNLLSTYLRNEIAELHQNNVKVTAIGDISALPKTCIRELNSAKELTKNNTGVNLNLALNYGSRADIKNALIDIVKNCESGKIDINNIDEDIIKNYLSTKSIPDPDLVIRTSGEQRLSNFLLWEVAYSEFYFTDIHWPDFKKEELQKAIYVYQRRDRRFGGLK

SEQ ID NO: 53235 - protein, 185 aa, Clostridium difficile
MKLEIHKQLEEKMNGTIDALKFEFGTIRAGRANAQMLDKIRVDYYGTPTPINQIGAISVPEPRILMISPWDKSAMHEIEKAIANSDLGLNPSNDGEVIRLSVPALTEERRKELAKKASKAAEEFKVRIRNERRDANEKIKKMEKGGELTEDELKKAQDEVQKMTDKFIKEIDTLLSKKEKDIMEV

SEQ ID NO: 53236 - protein, 234 aa, Clostridium difficile
MDKPMYKRVLLKLSGEALAGERGFGINNDVVNDIAIAIKKIQEIGVEVAVVVGGGNFWRGRTSEGMDRTTADYIGMLATVMNAMALQDALENIDVATRVQTAIDMRQIAEPYIRRRAVRHLEKERVVIFGAGTGNPYFTTDTTAALRAAEMEAEVILLAKNVDAVYDKDPKVHADAKKFTELSYMEVIQKELKVMDSTATSLCMDNKIPIKVFELTTENIIRAVKGENIGTTVK

SEQ ID NO: 53237 - protein, 303 aa, Clostridium difficile
MANITAQMVKELRESTGAGMMDCKKALQEAEGNMEKAVDLLREKGLSKAAKKAGRVAAEGLVAIEMNDDNTVASMVEVNSETDFVAKNEDFKVFVKDAACMALATDKEDIASLLGETHKEGITLQEVLNNRVAKIGEKLDFRRFAKVVTNGQVAGYIHGGGKIGVLVEMETEARDAKVLELGKDVAMQVAAMNPKYVSRDEVDAEYIAHETEVLTQQALNEGKPANIVEKMVKGRLEKELKEVCLLEQTFVKNPDITVKQLVADVAKAVGSDIKVVKVVRFEVGEGIQKREENFAEEVAKQLK

SEQ ID NO: 53238 - protein, 237 aa, Clostridium difficile
MSVISMKQLLEAGVHFGHQTRRWNPKMAKYIFTERNGIYIIDLQKTVKKVEEAYKFTKEVAETGKPILFVGTKKQAQDAIKDEAERCGMYFVNERWLGGMLTNHKTIKTRINKLRELEKMEEEGVFNVLPKKEVIKLRAEKEKLEKYLGGIKDMPELPGAMFVVDPRKENIAIQEAHRLGIPVVGIVDTNCDPEQLDFAIPGNDDAIRAVKLITGAMATAVIEGRQGAEEEVAEDQE

SEQ ID NO: 53239 - protein, 328 aa, Clostridium difficile
MNTKAGILGVGSYLPEQSYDNFHFEKIMDTSDEWISTRTGIKERRFAKESEATSDLASKAALKAIECAKLNVEDIELIILATITPDMSLPSTACIVQDAIGAVNATAFDISAACSGFVYGVTIAKQFVETGCYKNVLVIGAETCSKFLNYDDRTTAVLFGDGAGAAVIGPVNEGGILSTHMGSDGKGKDCLKVPAGGSRLKASKETVEANLHTIEMAGSDVFKFAVRKMAETSLRALEKANLNTTDIDYLVPHQANIRIIQASSKRLELDMKKVYVNIDKYGNMSAASIPVALDEAYREGKIKKGDNVVLVGFGGGLTWGASVVKWTL

SEQ ID NO: 53240 - protein, 314 aa, Clostridium difficile
MKENCMNKICKILNIKYPVIQGGMAWVATASLASAVSNAGGLGIIAAGNAPKEAIKKEIVECKKLTDKPFGVNVMLMSPFVDDIIDLIIEEKVQVITTGAGNPAKYMDRLKEAGTKVIPVVPTIALAQRMEKLGATAVIAEGTEGGGHIGELTTMVLVPQVADAVNIPVIAAGGIVDGRGIAASFALGASAVQVGTRFICSEECSVHSNYKNLVLKAKDRDAIVTGRSTGHPVRTLKNKLSKEFLKMEQNGATPEELDKKGTGALRFATVDGDIEKGSFMAGQSAAMVKEITPCKEIIEAMVNQAREIMPAIEL

SEQ ID NO: 53241 - protein, 316 aa, Clostridium difficile
MGKVALVFPGQGAQYVGMAKDLYENNAVAKSVIDEASDALNMDLKNLMFNGNEEELSKTENTQPAMVTHSVAVLKAVQAQVDLKYSACLGLSLGEYSALVAADAIDFKDAVCLVKKRGKFMQDTVPTGVGAMAAILGLDRSILENVVKDIQGGIVEVANYNSPGQIVISGENEKIEEAMVKCKEAGAKRAVKLNVSGPFHSSMLREAGVKLGSELEKVNITKPKIDVVANVNADYYKSEGKELLIKQVSSSVLWEDSIERLLNDGYDTFIEMGPGKTLKAFIKKIASNKKANVNIYNIDGIDSLNEFVQNYRNGEI

SEQ ID NO: 53242 - protein, 249 aa, Clostridium difficile
MINLTGQVAVVTGGSRGIGKEIAKKLASFGADVVINYTSKEDEALKTKNEIESMGVKCTSIKCDVSKFDEVNQMIDSVVSEFGKIDILVNNAGITKDGLLMRMKEEDFDRVIDINLKGVFNCTKAVTKPMMKKKYGRIINMTSVVGIMGNAGQTNYCASKAGVIGFTKASARELASRNININAVAPGFIETDMTKVLSDDVKESTLANIPKKSYGKPEDVANAVAFLVSDMSSYITGQVINVDGGMVMQ

SEQ ID NO: 53243 - protein, 412 aa, Clostridium difficile
MNKRVVITGLGCVTPLGTGKEEFWSNIKSGVSGIDKITNFDASTYQTQIAGEVKNFHPEEYISKKELKRLDKFAQFAIVSAKLAVEDANLDLDKVDRERFGVIIGSGIGGVEAIETQHKILLEKGNKRVSSLFVPMMIGNMAAGQVSIFLGAKGPNTNVCTACASGTHSIGDAFKVIQRGDADIMVAGGSEAAVTGLAFAGFCNMKAMSTRNDDPKTASRPFDKDRDGFVMGEGAGIVILEDLEHALARGAKIYAEVVGYGLTADAYHMTTPAENGEGAARSMNMALKDGNVPLEEVDYINAHGTSTYYNDLYETMAIKTVFGEKAYDLCVSSTKSMTGHLLGASGAIEAVVCAMSIEDSFVPPTINIQEVGEDLDLDYVPNQGKEKNIRYALSNSLGFGGHNATIVLKKYV

SEQ ID NO: 53244 - protein, 169 aa, Clostridium difficile
MMKKDRAQKSTTREYIMKLIYQININKEDFETLEDKVDNFLKDNSEHIINRYKELALQYSKNTNLKLEDTEIEDVIDKKYINTVCKALKENHDKIDELINKHAKNWTVDRMPKVDVSILRLSVCEILYLDTPNKVSINEAVELAKIYCDDKSPKFINGILGSVVDEIGK

SEQ ID NO: 53245 - protein, 401 aa, Clostridium difficile
MKLRALDISEANSYIKRILINDPILSNLKVKGEISNFKVHSSGNVYLSLKDETSKLNCVIFKSNFNRNLKLDNGVKIIANGYISVYERDGAYQLYINEIEIEGIGNLHIEFNRLKEKLNKEGLFDPKYKIPIPKMPNSIGVITSPTGAVIRDIINVIKRRYPKVNIKLYPVTVQGDKSAEEICEAIRFFNHMKNVDTLIVGRGGGSIEELWSFNDEMVAREVFNSQIPIISAVGHETDFTICDFVSDMRAPTPSAAAEIATPSLDDINYKLGNIKSRMSKSLTNQIELDQYRLETVFNKINNYLDSYTIKDKVIQLDKIYDKIIFGIENNLKLEDEKLVKIGALLHNLSPLATMDRGYSITQKNGKVINSIKGLKIKDSIDIVLKDGNLECMIDKIENKEG

SEQ ID NO: 53246 - protein, 295 aa, Clostridium difficile
MEFKQCLKEKASFVEKVLKEYMPKEEGYQKTVIEAMNYSLSAGGKRLRPILTLEACKIVGGNEDEAIPFAIAIEMIHTYSLIHDDLPALDNDDLRRGRPTNHKVYGEAMGILAGDALLNYAFEVMLAGSINKENPEKYLKAINEIAKGAGIYGMIGGQVVDVESENKQIEKEKLDYIHMNKTAAMMVGCMRAGATIGGANSEQMEEITKYAKNIGLSFQIVDDILDIVGDEAKLGKKVGSDIENHKSTYPSLLGLDKSKEIAHNLIDEAKKSIEKLSDDVDFLKGLAEYIIDREY

SEQ ID NO: 53247 - protein, 882 aa, Clostridium difficile
MEKKLIIIDGNSIINRAFYALPEMNNKEGLKTNAIYGFTTMLFKMIDIYKPTHISVAFDRKAPTFRHLEYKEYKAGRKGMPDELAEQLQPLKDLLDKFRINRLEIDGYEADDIIGTVSKKAEENGYKVYIVTGDKDAIQLASDNTTTLITKKGVGEVEEYNFNSVIEKYEMTPTQFIDLKGLMGDKSDNIPGVPGIGEKTGIKLIKEFSSIENLIENTDKLKGSVKKKIEENKEIAIQSKRLATIIRDVPIEVDLDSMIFGDYDKDELLDKFRYFGFTSLLSRLVDLVDSDDTEHVEEKIEILKLKDIEKFIDEVNKKGQVILKTVRGQGNILEKNIIYIFISVDGEKIYYVDSNEVSKLDSIFSNNEIKKYGYNLKDDYISLKPYNINLENMYFDITIAEYLIDSTSSTSYDCSAIAMKYLSKKVKSKEELLGKGVKSKNYEDLEFEDLAEYMGQIICTVKETVPMMERSLMDMSMDGLFYHVEMPLVEVLGHMEYEGIKVDKSILDELSVEFKEIIATLEKEIYELSGEPFNINSPKQLGVILFEKLELPIIKKTKTGYSTNADVLEKLRDKHPIIDKITEYRQIVKLNSTYVEGLLNIINPESNRIHSSFNQTITTTGRISSTEPNLQNIPIKMEMGRKIRKVFIADDNCKLVDADYSQVELRVLAHMSQDENMIEAFKHHEDIHTKTASQVFNVPMEDVTSELRGAAKAVNFGIIYGKSDFGLADDLNIPVPKAKEYIESYFAKYHKIKEFMDTTVEKASEDGYAVTILNRRRYIPEIKSSNFMERNRGKRFAMNAPIQGSAADIIKIAMINVHKKLEENNLKSKLILQVHDELIVEAIDDEIDIVKKIVKEEMENAVNMDVHLDVDLNVGSSWYETK

SEQ ID NO: 53248 - protein, 571 aa, Clostridium difficile
MKRIKVLTVVLAITFMVAGCSNTKTKQSSSDSSLQSQSSIDAKYINLTMVTPKTINPITNTDKSVGYIMNLVYDSLFTIDENYNVIPQLVKEYNIAQDGMSIDIKLKDAKWHDGKNVTSNDVNYTIGLIQKSADSPYNEFTKNIASVNIKSDKDFTIKFKARYAFSIDSLIFPIVSQNHLDSKDVNDKNNNMIGNGKYKIESYTEREGMVLSVNKDYYEEVPKTMKNIKVGMVPNEDARTSMVMALDSDITNVTLNDLSKFQEKEFNITKYQGRDYECVLFNYNNPFFKDVNFRKAIAHSIDKDRIISEGYMDDATPVNFPLNSKSKYYNSEMKDLEFNKDKAIECLAKVEYANVNSVNQNDNKVKNQKKSAKKNSKKLTPEEEAKAKKAEEDRIKKEAEEKKNREKEEVKKSLSEMNLKIIVNRDNSERIKTANIINENLKAIGINSTVNQLSDKDMENALNSKNYDLALVGWKLSIIPDASSIIASSGYTDDKLNGYMSALTSSTSEIETKKAYKDVQTYIKDNATFISLAVRNNYIVSNSRLKGKITPNDFDVYEGISNLDIKSNESN

SEQ ID NO: 53249 - protein, 304 aa, Clostridium difficile
MDIIEGYIDYIKDKKKLSENTVASYFMDIKKYMEYINQKSIKLVDIVENDIISYLIKLEKDNVSIATIARMISSIKSFHDYLFLNHICTNNPAKDIKKPKIKKENINILTEEEIERLLNFPKLTTPKLIRDKAIFEVLYGTGIKVSELVEMNIEDIDLDIDYIYCNSCCKNQRVIPLCDITKLYLEKYLKEARPKMAVEGEKSLFVSSLGQRFTRQGLWKVIKKYSNLANIDKNINPTMLRHSFAIHLLNEGANIAVVSKILGNVNLSSLQVYLNHIDKNVRREIKEKHPRNDVDVELQKAEAK

SEQ ID NO: 53250 - protein, 415 aa, Clostridium difficile
MELNKVELLAPAGDLERLKIAITYGADAVYIGGEIFGMRSAAKNFSKEDMAEGVAFAHERGKKVFVTVNIIPHNEDFLQLEDYLLELEEIGIDAVIIADPGVLSVIKKVIPNMEIHLSTQANTTNYLSANFWYEHGIKRVVVARELSFDEISEIRAKTPLDMDIEAFMHGAMCISYSGRCLISNYMTGRDANKGSCAQSCRWQYHLVEEKRPGEYFPIYEDERGTFFFNSKDLCMIEYIPELIKSGITSLKIEGRMKTAYYVATVVRAYRMAIDEFYRDPENWKFNPMWMEELKKGSHRHFTSGFYLNKPTTEDQNYQSASYVRNYDFIGIVRETEDEDGLIVVEQRNKMCVGDEIEVMGPYKETMFTKIEEMYNEEGEAIESAPHPRQIVKLKLSVKVGKDYMLRKVIEEKVEE

SEQ ID NO: 53251 - protein, 305 aa, Clostridium difficile
MKNIKMGMIGLGSIAQKAYLPILTKSERFEFVGAFTPNKVKREKICSDYRIMPFDSIESLAKKCDCIFLHSSTETHYEIIKILLNLGVHVYVDKPLASTVSQGEELIELSTKKNLNLMVGFNRRFCPMYKEIKNNATEIVSINICKHGLNSLRNVRFDSTLIDDYIHVIDTALWLANEDVEISGEDLFLTDNKNLIFVSHKLKGKNFSINTSMHRDSGTKLEQVEILSKGKIQRVKNLNVLEIEEGGNLTLKQSGAWVNILKQKGFEDISNHFIDCIENNIKPAINGEECIKAQRLLEKIINSVK

SEQ ID NO: 53252 - protein, 235 aa, Clostridium difficile
MIYLKKSFNSTIKVKEMAPEERPREKMLAKGVKSLSNAELLAILLRTGNKNKNAIELANYIINRDIQGIRHLEDMTIEELCNIDGIGLSKSTQIKAALELGSRVASFKPIKYKIMNPWDIQRYYMDSLRYLKKEVFKAVLLNTKNEIISDVDVSIGTLSSSLVHPREVFKEAIRRSASKIIVMHNHPSGSVEPSREDKNITSRLIKCGEIIGIEIIDHIIIGDGLYFSFKENMII

SEQ ID NO: 53253 - protein, 353 aa, Clostridium difficile
MAKEKKKEKKGFFSFNKMTKDMGIDLGTANTLVYIKGQGIVVREPSVVAIRDDSKEVLAVGEEAKKMIGRTPGNIVAIRPMKDGVIADFDITQSMISYFIQKAADKKGVVSPRIAICVPFGVTEVEKRAIEEAARQAGAKDAFLIEEPMAAAIGAGLKVEEPEGNMVVDIGGGTSEIAVISLGGIVTAKSIRIGGDEFDESIVAYVKKEYNLMIGERTAENVKINIGSTFKDDEEINMQIRGRDLISGLPKTIEICSTEVREALKEPVSSIVDAIKSTLERTPPELASDIMENGIMLTGGGALLRGLDKLITQETGMSVQIAETPLDCVALGTGKSVEDQEIFEKVLMMNTKN

SEQ ID NO: 53254 - protein, 1184 aa, Clostridium difficile
MYLKRLELKGFKSFPVKTDIIFKEGITAIVGPNGSGKSNISDAVRWVLGEQSIKSLRGDKLEDVIFAGTDTKKPMNYCEVALTIDNSENQLELDFTEVTIRRRAYRNGESEFFLNNKSCRLKDIKEVFLDTGIGKDGYSIIEQGKVDEILSNNPLSRRKVFDEACGISKYRYKKQEAERNLSNTKENLERIDDVYIEIENQLKPLFNQQTKAKKYLEISEKLKTLEVNSFIREIEGIEKELSEVNEHRKVIEKELNEKEEQKNVVEKKQEDINKEVEVLQDVIEKSVDYINSIKGVISKKESQINLIKERIRNFTNEISRKNLEIKDIKEKLNENKQYIKELESNKLSGSEELSTLQENIKVLEGSKDKQKIKLESLNNEIELLKESIIDILNKKQEFSNKLSTLNANKENMNIRDENINSEITELNKNIEIKSSELDTINKEFNMQNENLKNVNNRHKELSINLQDSISEHNKLEDEIQKSKYNLNGYNSKLNVYIDMENHYEGFNRGVKEVLKNKNLKGVHGALGQIINVPEKYEKSIEAALGAYMQNIITDNEFSAKSAINYLKQNNLGRVTFLPLNIIKSNKISLGNLKANTKFIGIASDLITFDEKYRNIIENILGRTILINNIDEGIKFAKETGHRFKIVTLDGEILNPGGSLTGGSLKTNGNILSRKRYINEYTEKISNIKNEISHLELKRESLDKDVKNIKNEIDSHESKIKDLEKSIIIKSTSIKNVESEIESLKGSITKLENEKNDLNSNLNYTLEKSDDVRKDMEELDDLYNKNKEKIDALNEEIKRYNDLYDKEKSEFDELNLSLVKKTEVYNSIVRDIKRISGENCELEEKNKQLEESLNYEEHEIIKLQDSILTEEKEKENLTKQLGDSNRNLETRKIAKDDLKNSFDEINKELKTIDRQHIELKESLFKVGGRLERLKTSQDTYINKLFEQYDMTLVQALEIKDEDLDIDRKFLESLKREIRSLGNINIDSIKEYEEIKERYDFYSEQKQDLEESMEEIEKLIHTLEENMKSEFEIKFEEISKNFKYVYKRLFGGGCGELTILDKENLLESDILITAQPPGKKMKNLNLLSGGEKALTAISILFAILITKPTPFCILDEIEAPLDDANIFRFGEFLKDLSKETQFISVTHRRGTMEAADYIYGVTMQEKAISKVISLKLKEAQEITDII

SEQ ID NO: 53255 - protein, 426 aa, Clostridium difficile
MLKKLFGFGKDKEKEIEKKDAEEEIEVEDSVDNLENLEETIFSGLEEEVIDKVEDVEEKNEESVNDEGTEEIENFEKIEVEMDSNGKEVENISNNDSQEEIIEELENYDEIESKEIEDKEDKKVNLFERLKQGLTKAKQGITDRIDEVLKSYTKIDEELLEDLEEILITADVGVNTTMDIIERLRDKIKQKGITEPIKVREELKSIVEDILTNENSTLDIEPAPCIILMVGVNGVGKTTTIGKLANRYKKDGKKVLLAAADTFRAAATEQLEIWANRTNVDIIIHQEGADSGAVVFDAIKAAKARKTDVLICDTAGRLHNKANLMYELGKVFKIVDREFPEAKREVLLVVDATTGQNAVVQAKTFKEVADITGIVLTKLDGTAKGGVVLAVKSEVDVPVKLIGVGESVEDLQDFNAKSFSDALFGN

SEQ ID NO: 53256 - protein, 745 aa, Clostridium difficile
MKYNNTSEINPLDYILGQERAVEAMELGLKINNPAYNIYIAGEPGTGKSTYALKVLNEYASKKNTHKDWCYIYNFENPREPIIVELEKGFGRELKKDMEKLIESLLEDFKNAFESENFEIEKNKLLDEYEIEKDMLLKQIKKYGEEKGFKLKQSKMGIVFIPLKEEEDESDESDEEFYKAKRELENMAIQVVYKIRNLEEIAEKAVLELEEEIAKLVVEPHIKRLCEKYENYDKIQTYLENIKKDIIEYMYLFYLDEEELKDKYDKEHFIKYKINLFVDNGSSKNKESAPVVVEINPSPANLFGKAEYDYANGNIKTDFTKLLSGAFHRANGGYLVLYADQLLKYTMSWEILKKTLQTKKVILETQTAIKPENMPLDVKLVLIGSHYIYDILYRYDEDFEKYFKVFVDFDSEMDKNEDNEEGIARFIAYQCDKNNLRHFTKSAVEEVIKFSTRLSGDLEKLSTKFNKIMEVVIEGSAYAEFRNSEYTEQCDVKKAISEKRKRINRVETHMDESIENGFTLIETEGRKVGVINGLSVLSTGEYSFGRASRITATTSPGSKGIVNIEREVNMSGSIHNKGVLILGGYLSENFAQDLLLSLNAYVCFEQNYGGIDGDSASSAELYVLLSSLSGVSIKQNIAVTGSINQKGDIQVVGGISEKIEGFYSICKTKGLNGEQGVIIPRKNQRNLVLSDEVNDAVRDGKFKIYTVERVEEAIEILTDVKFEEIKKLVKEKLISFSKIQTVSKE

SEQ ID NO: 53257 - protein, 106 aa, Clostridium difficile
MYLMYAIVKTGGKQYKVSEGDVLFVEKLEANAGDVVTLNEVLACSKDGELKLGSPVVEGASVQAKVVEQGKAKKVIVFKYKAKKDYRRKQGHRQSYTKIVVEKINA

SEQ ID NO: 53258 - protein, 96 aa, Clostridium difficile
MLNMNLQLLASKKGVGSSKNGRDSISKRLGVKRFDGQLVTAGSIIVRQRGTKIHPGTNVGKGSDDTLFALVDGTVKFERKDKKRKKVSIYPVAIAE

SEQ ID NO: 53259 - protein, 493 aa, Clostridium difficile
MYYSSTRGTEEKVTASQAIIKGISNDGGLYVPSEFPNVKNELINLVNLTYSQIAFFVLSKFLCDFTEDEIKNCIENAYDEKFDCSSIAPLNKVNDTYFLELYHGPTLAFKDMALTIMPHLLKTSIKKDNLEKDVVILTATSGDTGKAALEGFKDIDKIKIIVFFPEDGVSPVQKLQMKTQTGKNTYVVGIKGNFDDAQSGVKKIFSDKEFNQKLLDNNYILSSANSINIGRLLPQVAYYFYSYMKLVSNSDINLNDKINFVVPTGNFGNILAGYYAKQMGLPINKLICASNDNNVLYDFFKTGVYDKNRTLKLTTSPSMDILISSNLERLLFEISNRNTDIVNKLLSDLSDKGVYKISDDMEKNLASFYGEYSNEEEVKSTINNVFKNYNYLIDTHTAVAYNCYEKYKKETSDNTKTVIVSTASPFKFSEDVLKSIDCDFKDLDDFAIIDRLSSISKIDIPKPIKNLKNAEILHKDIYEKDELKLAIKKFLKV

SEQ ID NO: 53260 - protein, 335 aa, Clostridium difficile
MGKDMRNLGNTNMKIKRVGFGGIPIQRITQDDTNLVINELEKQGINFIDSARGYTISEEAIGIAIEGKRDKFFLATKSMSRDYDSMKRDVEISLNNFKTDFIDLYQFHNVKEEEYDNLFKDKMAYSALLEAKEQGKIKHIGITSHNLNTIEKAIEDGKFDTIQFPYNIVEGQADEVFKKAHEKGIGIIVMKPLAGGALDNATLAIKYILSKDYIDVVIPGMESVEQVRQNVAVLENLVLDEKDNKEIEEIRNSLGKKFCRRCEYCMPCAVGINIPLSFLCEGYYTRYGLKEWAKEKYEVMDVKPTECIDCGLCESRCPYELPIREMLKTVVEKLG

SEQ ID NO: 53261 - protein, 251 aa, Clostridium difficile
MLKVIISGYNGTMGRVLAECVKKDNELELVCGVARSADEKGHHSDTKLYKTMTDVTEKTDVIIDFSHHETLEPILSYALKNNTPVVLATTGYDENDLNKIEEASKNIPILLSSNTSLGVNILIKLVKDASKMLEGFDIEIIEKHHNRKEDAPSGTATMIANAIREVLPESENTHGRYGRDCKRKPNEIGIHSIRGGNIISDHDVIFAGDNEVLTLSHHSQSDEVFANGSIVAAKFLIGKQSGLYKMSDILG

SEQ ID NO: 53262 - protein, 96 aa, Clostridium difficile
MTNPHDVIIRPVVTEHSMAEMGEKKYTFVVAKDANKTEIKKAVEKVFGVSVDKVNTLNYDGKVKRMGRTQGRTSSFKKAVVKLTADSKEIEFFQGM

SEQ ID NO: 53263 - protein, 233 aa, Clostridium difficile
MNENILIVDDEKEIADLIEVYLKNEGFTVYKFYTGKEALECIESKNLDMAILDIMLPDIDGFHICQKIREKYYYPIIMLTAKIEDIDKIMGLTIGADDYITKPFNPLEVVARVKTQLRRYMRYNNSYEQQSIIVNEYDIKGLIINKETHKCSLFGKEVALTPIEFSILWYLCEHQGKVVPSEELFEAVWGEKYLDNNNTVMAHIGRLREKIHEPSKNPKFIKTVWGVGYTIEK

SEQ ID NO: 53264 - protein, 276 aa, Clostridium difficile
MNDKLKYFSYSQNSINTYKSCPLKFKYKYIDRINWKNDDVGSREYYETLKTGRDFHLICERYFSNIPLGIYFNEDDKNSKKFLKWMENIKKVVPIEKGKTYLPEYEVRMTLNGDIIQAKYDLVVIGNNNIEIWDWKTESKKIDYKHVENRIQTIVYMFLAKEVIPKVLKMDINVKDINMRYYQPEFDDLPITILYDEEKHEANRNKIQNYISMIKNTNYEEHTYEDNLYNDIEKVYNKEERMCYRNKKHCKYCEFNKLCNGKEIDYSILEAEIYGT

SEQ ID NO: 53265 - protein, 122 aa, Clostridium difficile; identical to SEQ ID NO: 52853
  MISC_FEATURE (106)..(106): X=any amino acid

SEQ ID NO: 53266 - protein, 335 aa, Clostridium difficile
MVKVAINGFGRIGRLALRKMMEQQDKFEVVAINDLTDAKMLAHLFKYDTAQGRFNGEIEVKEGAFVVNGKEIKVTAERNPADLPWAELGVDIVLECTGFFTSKDKAEAHIQAGAKKVVISAPATGDLKTIVFNTNSDILDGSETVISGASCTTNCLAPMAKVLNDKYGIEKGLMTTIHAYTNDQNTLDGPHPKGDLRRARAAAGNIVPNTTGAAKAIGLVIPSLKGKLDGAAQRVPVVTGSITELVCTLGKNVTVEEINAAMKEASNESFGYTEEMLVSSDIIGISYGSLFDATQTKVMEVDGKQLVKVVSWYDNEMSYTSQLIRTLGYFAQLAK

SEQ ID NO: 53267 - protein, 321 aa, Clostridium difficile
MNKKAAIVAAIAIIGLVTVFALGGSKKNESKTSENSNNTIKITHNLGETDVKLNPKKVVVFDYSALDTMDALGVAENLVGLPKASLPASLEKYKDKKYTDLGGLKEPDLEGIKSANPDLIIINGRQEDFYEQLSKIAPTISTSKDDKKYLESVKNNIDKIAKIFGVEEKANQEFSKIEKKIETLNKKVTDKNLNALTIMVNEGNLSVFGEESRFSILYNSFGFENKDKNIKESSHGQNITFEYIAKQNPEVMFVIDRGIATGSDVKESSTAKSVLNNDIIKSMDAYKNDNIIYLDSPTWYVNDGGLTSLNKMIDDASKAVN

SEQ ID NO: 53268 - protein, 178 aa, Clostridium difficile
MNETIKEEIVEWIKIIITALFFAFIITRFIKPTLVNGESMYPTLKSHDYLVANRMTYKLSEPKCGDIMIFKTDLLQENGRKKELVKRVIGVPGDHLKIKDSKVYINGKLLNEVSYIHDNYTEGDIDMVIPKGKVFAMGDNREVSLDSRYKEVGLVDEENIKGKVILRVFPFTDIGIFE

SEQ ID NO: 53269 - protein, 628 aa, Clostridium difficile
MLMNKRKSFIRTIAVSTMAVAVTGSATCAYAAPVLQGTKTYEKVNTIDISVDSVENIVYSFQASIKVQGEVEVVDNEQKEKITWSDNIKSQIKSGNANATCRAEYNKSSNTTTLDIYVTSNEDLLDGNRLNIGRISVKKSGSNSNADYKVLGKGTSDKPALKIVTYNNKTVDYENISSDEGLIFTLINESEVKPIGGTGSSKNDPEKYKVEKSEALEYLLNNIRINYSIVSKETQESGSNVILKLGLAQKTTKGRKATINKYVEVTLPKSLEYIVENELSKPDELPPDNGSGGNNGGGSNSGGSSSGGSSGGGNSSDSTSNVTVKKLKGADRFETAIKISQSGWTKSDTVVIVNGEDKSMVDGLTATPLASVKNSPILLSSNEKLPQKTVEELKRLNPSKVVVIGGNNSMPNSVVEAIKAVNSKISVQRIGGDTRYQTSINIAKEIDRTNNVSKLYIGAGNGEADSLSIASLAGKEKTPIVLTQKDGVDNEAEQFIKSNKVSNIYFIGGVEKISNKAIEQVGKIANKDISNNRVAGQTRQETNAKVIDKFYSQSKLDGVVVANQDKLIDALAVGPLAAKNNSPVILATNTLDKSQESSLKGKNSSKLFEVGGGIASSVIDKIKSLIEK

SEQ ID NO: 53270 - protein, 664 aa, Clostridium difficile
MSNKQTFKLNMPEINLYIIVIGISSIILLYYNLYVGCLFFCIFVYMVFHNWRTTNIRRHEWTEYIQNLSLDIDETTKKAIINLPIPLCILEFDGNISWYNGKFYDMIGQKDLLDKNIEDIVKNLNLRKVLNENKEMYTEINYKEKEYTIIYNVIKNDQEKNPKYLMILYWIDKTEYLKVKQNYDDEKNAMMLIQVDGYDEVLKSAAEDKRALINVEVEKILSALELNSNGALRRTSKDKFFLVMHKKELKKLEAEKFSILDTIRHIDYGNNLPVTISIGIGIDGDTLNENLKLATGALDLALGRGGDQAVVKTKDKFVFYGGKSKAVEKKTKVKSRLIGHALREVIQQSDQVYIMGHKYPDMDAMGAAVGVYDICKSCNKTANIVLQSVNESIEIFINKINENNYYKKLFIGKEEAIDNCTKNTLVVVVDTHRPNYTECEELLKLSEKVVVIDHHRRGVEFINDAVLLFHEIYVSSTCEMVTELVQYMDEDVTINKLTAEGLLAGISLDTKNFAFKTGVRTFEAASYLRKVGADTIEVKKFFNSDVKDFIIKAEIIQSTKIINNRICLAYSSTEIDSINVIIAQTADELLNIKEVEASFVLGEKDDTIFISARSLGQINVHVLMEKLGGGGHIDIAGAQLKNVSLKEAYKMVNKIIEEYLEEEE

SEQ ID NO: 53271 - protein, 835 aa, Clostridium difficile
MKEDIGLHRMCKKEQATKNEVISEDILKSMSIGVSKHFLDDSFTIIWGNTSFYQLLGYTEEEFLVKFSSLKDYYEQNLYHFESMKNHFLEAYHHGEKSIEYQICISANNGDPVWVIMTGILIESQDNEKSMVYILYSKINELKIKQEELSDMEKESTENFKWMMSEYAGNVYISDMDTYELLYLNKHSCNTLQASANELIGRKCYEVIQGRTSPCPFCTNSYLKKDDTYEWEFYNKKLKRTFIIKDRMLNWQGRRVRIELSYDMYSAEYKLAKKDQERESILKTIPAGMVRLDARDYLTILWCNDIFLNMIEYTKEQFAEELNNQCGYLFSEDYKRSKKLAQDLKESGDNIVFEAKIYTRSREERIWTVTLCYISGEDSWDGIPSFYSIGIDITKERKQIEKLQHISEKDALTGIYNRAETERQIKKYFEKNLNVMGALFMIDTDNFKQINDTEGHMIGDIVLTEMASGMKKIMRDSDVVGRIGGDEFTIFMKNISSVKDAEKKAEELLYMFRHLFQKEKSFLKVTCSIGIAIYPKDGTTFKEIYARADKALYQAKNMGKNNYVIYNQDYFKELEEFDCSSLGTVIDSEKQYAECPDNLTRYIFRMLYQTDDIDQAINMILEVVGKQFDVSRVYIFENTEDGRYTSNTYEWCNEGISSQMAYLQNSNYQDYEDYEKFFEDESVFYCRDIHTLSPKLEELFSSQGIHSTLQCAYKEDRVFSGFVGFDECTGLRLWSQEEISTLSLISQIISMFLQRKKNNKLNQQIQQYQNILDNIDQCICVINKENNFLLYVNKKFKNTYSKFQIGQPYYLDSIDIHKISIIWNKKEAYLCTSTI

SEQ ID NO: 53272 - protein, 1275 aa, Clostridium difficile
MSSPKWTKEQLEVIESRECNLLVAAAAGSGKTAVLVERIIQMITSRENPIDIDKLLVVTFTNAAASEMRERIGDAIGKALDENPENKHLQNQLVLLNKSSITTIHSFCLDVIKSNFHRINLDPNFRIGDQTECAILKQEAIEEVFEDLYEERDEGFLNLVESYAERGGDKEVQDIILGIYSFAMASPEPKKWLIDSAERFNIDENFDFSQSIWARAILDTVKIEINGLCLNMERALKEVESIEELETFAEKLSVEYKKIADISQACNKSWDEAYKKMASMSFENYVKGVKRISKDAPSYIKESKEKAKTIRDKTKKSLESIVSATFNKDNDSIREEIKYLYNIVKPISSVVLRFEEEYSNKKREKGIIDFNDIEHFALNILTDVDEKGNIVPSDIAVGYRNKFYEIFIDEYQDSNLVQEVLLKAVANTETPNRFMVGDVKQSIYRFRQAKPELFLQKYNNYNDKKGSSHRKIMLYKNFRSREEVVDAVNYIFENIMNENIGEIEYTEKERLNLGANFNVDTDEKSIIGGATEIHLIQKDNKLDDDIINDKDDRINNKENEIEEEEKLDNIQLEARMVGNIIKDLMKVNEDGKIQKVYDKGIDGYRPVEFRDIVILLRATSAWAPVFADELMNMDIPTYADVGVGYFDTIEIKTILSLLQIIDNPMQDIPLISVLKSPIFGFTPEDLIDIRVQSKDKIFYEVLKSTAEYDGFTDSQNENESEFIPSEECINKSKDFLIKLKEFKEKSMYMSTDEFIWYLYTRTGYYAYVGALPGGSQRQANLKVLFERAKQFEETSLKGIFNFVNFIEKLKKSSSDMGSAKTLGENANVVRIMSIHKSKGLEFPVVICSAMGKNFNTQDFKKSILYHHNLGYGPQFVDYERRISFPSIAKEALKSKINIENLSEEMRVLYVAFTRAKEKLIITGSTRNIQDSIKRWSNGIESLDTISQYEILKGKNFLDWIMPCVLRHRDLSNLLEEVGLDAVFNVEHNSKWYGKLWNKNDILVEKKSDEEKESIEEILEKIDVNNPDSDYYGEIEEKLNYIYPYEFSTRKPATISVTEIKKIQNNYEEELINTIFEQKVILKKPLFIQNEEEREKISGTERGTIVHLVMEVLDLKNVSSVNDIKSQIRGFVSKGIITEKQASIVNPYKIYKFFASNIGKRMLNAEIINREKSIYAQVNMKDIYIYEKLINNDDKKLYDNESVMLRGIVDAYFEEDNQIVLVDYKTDFVNEENINQIIEKYKKQLDLYADIIETLTGKSVKEKCIYLFGVDEAVCY

SEQ ID NO: 53273 - protein, 83 aa, Clostridium difficile
MIIMRLDKFLKVSRIIKRRTVAKDACDKGIVTINGKVAKSSSEVNIGDTLEIQFGEKKMKFKINEVKEHVLKNDAKEMYEILE

SEQ ID NO: 53274 - protein, 528 aa, Clostridium difficile
MRRGVIYMMKKIQRFGGAMFTPTLLFAFAGIMVGFSIVFQNQSIMGSLATPENIWYQFWGVISSGAWMVFNQLPLLFAISLPIALAKKQQARACMEALATYLTFNYFVGSMLSFWGKSFGVDFAAEISAGSGLVSIAGIKTLDTGMVGALLISGIVIYIHNRFYDKELPDFIGLFRGSSLVVAICFFVMIPVALLTCFIWPHIQNVIRYLQTFFINSGNIGVWCYAFLQKILIPTGLHHFVYAPICYDSVVVPGGTSVYWATHIQDFQTSAKTLKEMYPIGFSLSGLSKVFGSLGVFGAFYVTAKPEKKKKVLGLMIPATLTAVLTGITEPLEFTFLFVAPLLFLVHAFLDACLQTISFALGVVGDFGGGIINWVVLNWLPLGMYHWKVYIVQVVVGIIFSFIWFFVFTFLIKKFDMKTPGREEDSEETKLYTKNEYLETKDEKGNKLSKASQQASEYIKLVGGAENVVDVTNCATRLRLTLKDDSIISKEEDFKAVGAHGLVHNGKAVQIIIGLSVPSVREEFENLL

SEQ ID NO: 53275 - protein, 442 aa, Clostridium difficile
MILVGNGRLISQDSLNPYMEDGCVVINDNLIEDIGTTEEMKAKYPVHEFIDAGKKIIMPGLINSHMHIYSSFARGMAVPGKPSENFLEILNNLWWRLDKQLTLEDTKYSAYATYIECIKNGVTTVYDHHASPNAIEGSLFTISDVAKDLGIRTCLCYEVSDRDGGNTIQQGINENVNFIKYAQKDDTDMIKGMFGLHAAFTLSDDTLNKCASEMAGLDTGYHVHVAEGLADLQYNVDKYGKRVLERFNDFGVLKEKTIAVHCIYISAEEISFLNKTNTFVVHNPESNMGNAVGCSPAIELLKRGVTVGLGTDGYTSDMFESLKVANIIHKHHLKDPRVGFEESQTMLFDNNRKIAKAYYKNDLGVLKKGAYADVIVVDYIPHTPLTENTIGGHTIFGMSGRSVDTTIINGKVLMKDRKLINIDEESILAKSRELSQNLWNRI

SEQ ID NO: 53276 - protein, 423 aa, Clostridium difficile
MLKVLKGNIIFTKTSETFTVFENSYIILEKGKVKGIFKEIPKEYKNLKVVDYTDKLIIPGMNDLHAHASQFKNLGMAMDKELLPWLETYTFPEESNYKDIEYATKMYKKFVKELWKSGTTRIAVFATVHKEASMKLMDIFKEVGLGAYVGKVNMNMNCPDTLLENTQDSITDTEEIINKYSDTDSIVKPIITPRFIPSCTSELLKGLGDLCLKYNIPIQSHLSENYDEIEWVRSLEPESKFYGDAYNRYNLFGQTPTLMAHCVHCSQDEIDLMRENNVMAVHCPASNFNVGSGAMPIRKLIDNNIRLALGSDISGGHTLSIFKAMVSAIQLSKLYWVNSGKKYNFLSLSEAFYIATKSGGSFFGKVGSFEEGYDFDALIIDDSNLNHDNYSILERLERFIYVGDDRNIIHRYVCGKLIEEPNI

SEQ ID NO: 53277 - protein, 73 aa, Clostridium difficile
MNRLKDIKCGETVKVKKLEGEGATRRRIMDMGITRGVNIFIRKVAPLGDPIEVTVRDYELSIRKSDAEKIIVE

SEQ ID NO: 53278 - protein, 292 aa, Clostridium difficile
MNFQEMILALQKYWSKQGCIMMQPYDIEKGAGTMNPNTFLRSLGPEPWQVCYVEPSRRPADGRYGENPNRLYQHHQFQVILKPSPDNIQELYLESLKEIGIDPSEHDIRFVEDNWEAATVGAWGLGWEVWLDGMEITQFTYFQQVGNIECELETGEITYGLERLAMYIQEVDSVYDLKWNDKITYGEVFNKAEYENSMYAFELCDADMLFNLFDIYEKEALRLMENGLVIPSYDYVLKCSHAFNTLDARGAIGVSQRASFIGRVRNMAKTVAETFVKQREEMGFPLLKDGDK

SEQ ID NO: 53279 - protein, 639 aa, Clostridium difficile
MKIIDLLDEKSIKLNLNSKTKSEAIEELVDLVANSGNLNDKENYKKAILAREEMSTTGIGEGVAIPHAKNSSVTKACIAAAVSKEGIDYESFDGSLSNLFFMIAAPDGANNTHLEVLSRLSTILMDEDFRNKLINSSSEKEFKEIIDKKEREKFSEEYQDEKVTEKNIIDTKENDANKYPKVLAVTACPTGIAHTFMAAESLNKMAENKGVSIKVETNGSAGVKNKLTKDEIENATCIIVAADKNVEMARFNGKKVIKTKVADGIHKAEELIDKAVNGDAPIYHGGDGSHNESNEESESGFRKVYKHLMNGVSNMLPFVIGGGILIAIAFLLDDYTINPSNFGSNTPIAAFFKGIGDKAFGFMLPVLAGYIAYSISDRPAFVVGFVGGALAGDGGSGFLGALLAGFIAGYLVEGLKKIFSVLPASLEGIKPVLLYPLLGTLLMGIIMTFLVIPPVTAINNAMVGFLNGLGGTSKIFLGLVLGGMMAVDMGGPVNKAAYVFGVASLESGQFEIMAAVMAGGMVPPLAIALATTFFKNRFTKEERDSGKVNYVMGLSFVTEGAIPFAAGDPLHVIPACVGGSAVAGALSMLFNAALRAPHGGVFVIPVVTHPFAYILAIAVGALVGMMLLALLKKPLNQEV

SEQ ID NO: 53280 - protein, 514 aa, Clostridium difficile
MRNLQKKLMFFLFICIILQITYTTPVYSLCKLYKNNSINNFESIVSNNQLISKHAIQIILIMAIICVILIFYIIYDKLNFKIKLQRIAYTDNLTGANTIDKFVIDANKILCKNTQVKYALLYIDIDKFKYINDLFGYEVGNEILCNLTKIIKSNIFEEEMFARISADNFIIIMKYIEEEDITKRLKTIFEELDLFNNNQEEKYKLVLSCGIYFILPEDRDINSIIDRANIPHKMAKGGHKSSYAFYDNKIHDQEIKEKEMENTMFSSLENKEFIIYLQPKIELNTGEIQGSEALVRWKRPDKGLIPPNEFIPFFERNGFVINLDLYVLEEVCIYLRKWIDAGINPVTVSVNVSRIHLYCNNFIETYKNIIDKYNIPAKYIELELTESIIFDNFDILIDIMNNLKKIGFLISMDDFGSGYSSLNMLKEIPMDILKLDQKFIMETYNSKRSKIIVTKVIEMAKELGMKVISEGVETEEQFKLLKEVKCDMAQGYLFGKPMPIEEFEHLIVSNLVRG

SEQ ID NO: 53281 - protein, 890 aa, Clostridium difficile
MHNYFREVFSMEKKEKVVEKSNVEVCSPEIVNSVETLRMRLEEIRLAQKEFATFTQEQVDKIFLAASTAANQQRIPLAKMAVEETGMGIVEDKVIKNHFASEYIYNAYKDTKTCGVIEKDEAFGFTRIAEPVGVLSAVIPTTNPTSTAIFKSLIALKTRNGIIFSPHPRAKNCTIEAARVVHDAAVKAGAPKGLIGWVDVPSIELTNVVMAEADLILATGGPGMVKSAYSSGKPAVGVGPGNVPAIIDESADIKMAVSSILVSKSFDNGMICASEQAVIVPEKIYEEVKKEFKYRGAHFLNKEETEKVGKVVIIDGSLNARIVGQPAHVIAKMADVEVPKTARIIIGEVESVELNEPFAHEKLSPVLAMYKSKSFEDAVAKAEKLVADGGYGHTSSLYADSINHPERVEKFVNAMKTCRVLVNTPSSQGGIGDLYNFKLAPSLTLGCGSWGGNSVSENVGVKHLLNIKTVAERRENMLWFRAPEKVYFKKGCLGVAAREFKDVMDKKKAFIVTDSFLYNNGYTKKLTDLLDEMGIKHTTFFDVAPDPTLACAREGAKAMADFQPDLIIAVGGGSAMDAGKIMWVMYEHPEVDFQDLAMRFMDIRKRVYVFPKMGEKAYFAAIPTSAGTGSEVTPFAVITDQDSGVKYPLADYELMPNMAIIDADMMMEMPPRLTAASGVDALTHALEAYVSMLRTEPADGLALQAGKIIFEYLPRAYKNGKNDKEAREKMAMASTMAGMSFANAFLGICHSLAHKLGAFHHVQHGVANALLINEVIKFNCAEAPNKMGAFSQYRYPDCIQRYAEFASFAGIKGSTDQEKVDNLIKAIDELKAKVGLPKTIKEAGVEESKFLERLDAMVEQAFDDQCTGANPRYPLMSELKEIYLKVYYGK

SEQ ID NO: 53282 - protein, 371 aa, Clostridium difficile
MPFDKIILYIMAVGVLLGALDRIIGNKFGLGEQFEEGFNSMGPLALGMVGIVCLAPVISDVLGPIIIPIFNLCGADPSMFATILANDMGGYPLAMELAHNKEAGMLAGLVVSSMLGCTLVFSIPVGLGLIEYEDRPFFAKGLLIGLITIPFGGIIGGLIAGFNLSMVIINMIPVIILAVILAVGLKFNSTLMINGSLVFGKFISILITIGLGAAAFQEITGIVLIKGMTPIREGIQVIGSIAIVLLGTFPILHLLVKVLNKPLTIVGGKLGMDATSAAGLVFTLANSIPVYKMMKDMSPKGKVVNTAWLVCATAALGDHLGFTAGLVPEMITPVVIGKLVGGVLAIALAILMTKDLTLEEEQSIKMKKDAV

SEQ ID NO: 53283 - protein, 423 aa, Clostridium difficile
MRRSKNMAKIIVKKSNPLKGSVKIDGAKNAVLPIIAATLLANGKSTLNGVPNLRDVHVISDLLRHVGAEVEYKENTLTVDASNIKTCEAPYELVRKMRASFLVMGPLLARFNSTKISMPGGCAIGTRPIDLHLKGFKALGAKIEMDHGFVEAATEKLVGNKLYLDFPSVGATENIMMAASLAEGTTIIENAAEEPEIVDLANFLNEMGADVKGAGTNTIKIKGVKELKGAEHNVIPDRIEAATYMVAAAMTKGDITVENVLMEHLKPVVAKLREAGCEITEMDNSVRVVGPKVLKPIDIKTLPHPGFPTDVQAQFMAMLTVANGTGVVIETVFENRFMHVAEFNRMGANIKIDGRSAVVNGVDELHGAAVNATDLRAGAALILCGLIAEGETQIGEIYHIQRGYVDIDKKITALGGQIEIVED

SEQ ID NO: 53284 - protein, 323 aa, Clostridium difficile
MNMLRRPRRLRASKAIRNLVRETKVNVEDLIYPLFVVEGENIKEEIKSLPDVYHLSIDMLEDEIKEISELGIEHIMLFGVPDEKDECASQAFNDNGIVQKAIRKVKEINSDINVITDVCMCQYTSHGHCGILTDTGYVDNDKSLEYLAKISVSHAKAGADMVAPSDMMDGRIQAIREALDENGLENVGIMAYSVKYASNYYGPFREAAHSAPSFGDRKTYQMDPANSNEAIIETELDILEGADILMVKPALSYLDIIRRVKDNFDLPLAAYNVSGEYSMLKFAVKEGLLNEDVILESITSIKRAGADIIITYFAKDIAKLLKK

SEQ ID NO: 53285 - protein, 113 aa, Clostridium difficile
MAKYRKLGRETAHRNLMLRNLVTCLLRSGRIETTVTRAKETRRMAEKMITLAKRGDLHARRQVLAYVMDETVVNNLFTDLAPKYAERNGGYTRIIKIGPRKGDAAEMAFIELV

SEQ ID NO: 53286 - protein, 383 aa, Clostridium difficile
  MISC_FEATURE (227)..(227): X=any amino acid
  MISC_FEATURE (229)..(229): X=any amino acid
  MISC_FEATURE (231)..(231): X=any amino acid
SVIIVAAGSGRRMNLDINKQFIKLREKEIIAHTIQVFYENINIDEIVVCIKKEEEDFFKENIINKYNFKNIKIAYGGKERQDSIYNGLKKLDKNCDIVLIHDGARPFVDHRIINESIKVAKEKKAVVVGVPVSDTIKIVSDGTVKETPERNLLWAAQTPQTFEYNLIIDAYEQAYKNNYYGTDDSMLVENIGQSVTMVMGSYENIKITSPEDLNIAEQILNMEKKRXSXQXKENYMRIGLGYDVHKLTEDRKLIIGGVEIPHDKGLLGHSDADVLIHAIMDSILGALALGDIGKHFPDTDEEYKGADSMKLLEHVYNLITSKGYKIGNIDSTIIAQSPKMAPYIESMRSNISKVLNTDIDNINIKATTEEGLGFTGAKQGIAS

SEQ ID NO: 53287 - protein, 462 aa, Clostridium difficile
MINLFIDDTIAAIATAPGEGGIGILRISGEKALKVAEEIFKSMSGKSIEEYNKRTLIYGNIVDNENIIDEVLLAYMKGPNSYTGEDVIEINCHGGFISVKKILELILSKDVRLAEAGEFTKRAFLNGRIDLSQAEAVIDVIKAKTDIAHEVAQNQLEGSLSKKIRELRDKVTEILAHVEVAIDYPEEDIEHITYQTLKEKTDELKKDIKKLYDTAESGKILREGLKTVIVGKPNVGKSSLLNSILGENRAIVTDIPGTTRDVIEEFVNIKGIPLKIVDTAGIRDTDDIVEKIGVEKSKESFTSADLIVMVLDASRKLSEEDIEILEKLKDKQTIVLLNKNDLKQEIEEEKILKYVENNSIIKISALQQEGIEELQDKIESMVYKGSIKNNSSLVVTNSRHKDALSKAYKSATDALIALEQSMPFDFVEVDLKNIWDYLGYINGDTVTEDLLDNIFHNFCIGK

SEQ ID NO: 53288 - protein, 122 aa, Clostridium difficile; identical to SEQ ID NO: 52853
  MISC_FEATURE (106)..(106): X=any amino acid

SEQ ID NO: 53289 - protein, 229 aa, Clostridium difficile
MAYDFYLDGVQLPIPPPKLEIKVTNKNKTVDLINTGEVNILKKEGLSEISFEAEFTHNKLPFYRGAFRDVQFFLSKLELLKTDCKPFQFIVSREMGGKVLFNTNIKVSLEEYAISEDADNGSDTKVAIKLKQYRDYSTKKLVLAPPKNETGRPNVKIEPKRVDSVNATNTKTYTVKAGDSLWSICQKQLGNGSLYKKVYELNKSMMDKANKGKNLSKYTIYKGQVLKLG

SEQ ID NO: 53290 - protein, 326 aa, Clostridium difficile
MMIPVSEKTIVENAYKGYNFSDMNELGHKKIYKLSNETGTGEMCCYNLIDGFTLSYNNLNMESSHQKINPCKGIIQIDHCLDGCYEFKLKSNERAFVGKGDFSVVDLGKVPFESSSIPMKRYIGLTVFIDIKIAQRSIDKYFPFAKINIKEIMDMLCKNGPALIIKSRKEINHILNELYTVSEDIRISYSIIKIIELLLFLSLIKTEDMKKIPTFSEPIYEATQDCYKALVENPFDKYSISELAKQYAISESSLKRCFMHLTGQSIGSFIKNTCLEESAKLLIDKPHITIGEVADFAGYLNPSKFASAFKTYFGVSPQQYRKNNLT

SEQ ID NO: 53291 - protein, 677 aa, Clostridium difficile
MITTNGLQEESNSSKRQITYRINKINDMLKVKNVPLICLRADKDIIVRKETKKAIKEILEKNYSKNTYYFSKTERLLYMYLMLFINMEDISINHFINSIKVSRSTVNLDFKDLIPELEKKNIKVKNNRINGYYIVGNEMEIRRVLIKNIIETLSNEKSSRVFDIFIKEYNLDSFEDAKKIILKLIKKYEITFVEDRLVEFIYIFIFLKARMYSTRIVTQENVDIPNISVMSSMKEYKFAKELLEVYGSEDKIKPHNIMYISAWILGISVGNYEEDTEDKDVISKIVNKMMTKFGYLSGVYYISQEKIFKQLYSHFRPAYYRLLFKLPIYNPICEKVKEEYKLVYRIVSNAMKEFCGLFGEEIQEEELAYLTMHFATLFSNKKEFDGFRKRIALIVCSNGVGSSAILHAELTNLFPDLHFIPMSESVGLENISEPVDIVFTTNYNTEGLKTDVPVIKVSPVMTTKEKYKITREVYIQLGDIFLRQPKIDEVMDIIKKYANVTSESILSSELLAYFTQIENFTSKEGEGPMLSEITNETLVKIKVKAKNWEEAIRQSASVLVENNKVTEGYVDAMINSAKASGPYIVITKHVALPHARPEAGSKEIAIGIATLDSPIEFGNNENDPVKYVFCLSAIDNNSHLRAMSELVELLEEDEFFKVLDSAKEAKEIIDFIKTHEL

SEQ ID NO: 53292 - protein, 347 aa, Clostridium difficile
MKGKLILEDGTVFEGKAFGYLKEAIGEVVFNTSMAGYGELLTDATYYGQIVTMTYPLIGNYGINLEDVESNKVQVKGLIVREKSDNPNNFRCEMDIDTYLKQNKVIGLEGIDTRALTKIIRNNGTKRGIITLENVSLQDVQSKLEEHCNKDSVKNVTRKEIENIKGTGAKVVVIDFGVKNSVLESLKACNCDITIVPAMTTVEEILNINPDLILLSNGPGNPEDINDIVENIKKLIGKKPLTGIGLGHQILALALGGKTSKLVFGHRGANHPVKCLETGKVFITSQNHGYNVSEMPENTEVTHINLNDNTIEGMRHKELPIYSVQYIPEYTTKEDLDCIFNKFLALI

SEQ ID NO: 53293 - protein, 897 aa, Clostridium difficile
MNNDNDKNGNKIRRKKVSSSGNTNKPINRTSANKTRSTKNKKKSKKSDKFKKLRVFGIVFLVLLVVGTAGTAGLVFASLRDVTPVTEAVLDKQTNQTTTIKYANGKTLSTAPSVNKKTPVPLDKISPYLQHAVIAIEDERFYEHKGVDIKGLFRSVLKTLTGTKQGGSTIPMQVSKMLLTTEQQTIPRKIKDIYYAHEMSKTVSKDKILETYLNNFFVGRGLAGAEAGARGYFDKSAADLTLAESALLAGSTKNPSRFSAYKTSKLEGNETKEDLENKLLFFVNTTDDDLDDPTQVDFDMIEKIKSWELISNDTYRQLKAGTLVVRKAVSNPEAKKRQEIVLKKMLELKYIKQSEYDEAIKAKIEIKLPQSSDKVSSSVEDLIESEVINALMEQGHTNDEAQNLFYNGGLIVNTTIDPKMQDALEEEFDRNSNFPGHMVGPDGVSQPQAAMVILDYKNGEIRALAGGRNISGRKTLNRATNPHQPGSSIKPLAIYTPAIDTLKITQATALSDSRGGYKFEENNKWNPRTTTAGHGSMSLRKALAKSSNTIAVKTAEMLGDSYDECVDIMMDYLKNFGITTLKNNHSGSSEASDRKFPSLTLGGMANGITPLQMAAAYGTLANHGIYVEPSIFTTITTFDGQLLVKNAPEEHKVVDPEVAYVVTDMLESVITEGIGGVATLPKGMPVAGKTGTTNSAYDAWFVGYTPYYVGATYIGDDAGRKDDSGNTIKRREVPHGSTSTAKLWEKIMEKIHANLTVTEFEVPKNVYFTKINLEDGGKQSSGSKAAFIEGTAPTKVSSQPSSEDTKKPDNNQPEENNNNNNNTGDNGGGSTPPDNGGNNGGGSTTPPDNGGNNGGGSTTPPDNGGNNGGGSTTPPDGGGNNGGGSTTPPDGGGTPAT

SEQ ID NO: 53294 - protein, 397 aa, Clostridium difficile
MDTLKELFKIGSGPSSSHTMGPQRAAERFKNENPDAESFRAILYGSLAATGKGHLTDYIIEKTIAPKKVEIVWEEDIIKDFHPNGMKFEALDKDKNVTAEWTVYSVGGGTIAEEGQRNSKSNSIYHLDTMDEIVKWCKENNKTLVDFVLECEPKDIKDYIKTIKDAMRKSIDDGLSTDEIIPGKLLLKRRASTFYNAYKKDKSFSTLVYAYALAASEQNASGNIIVTAPTCGSAGVIPGIFFAMQDFYNYDDEKIIEALLVAGIIGNIIKTNASISGAEVGCQGEVGAACSMAAAAVAYLKGGTIDHIEYAAEIALEHHLGMTCDPVYGYVQIPCIERNAMAAQRAYDAANYALLTDGSHSVSLDQVVETMKETGIDMMDKYKETAKGGLAKHFFSC

SEQ ID NO: 53295 - protein, 884 aa, Clostridium difficile
MAHKEQVIIENKKENEVMSVGLDTVNNVESLVKKLAKIREAQKIFATYSQEQVDKIFLAASLAANKQRVPLAIMAQKETGMGIAEDKVIKNHYASEYIYNAYKETKTCGVIEKDEAFGMTKIAEPIGVIAAVVPTTNPTSTAIFKALLALKTRNGIIFSPHPRAKNSTIEAAKVVLEAAVLAGAPEGIIGWIDEPSLELTTTVMKEVDLTLATGGPGMVKSAYSSGKPAIGVGAGNTPAIIDDSADIKTAVNSILVSKTFDNGMICASEQSVIVLENIYNEVKKEFKERGAYLLDKDETEKIRNIILVNGGLNSKIVGQTACTIAKLAGFEVPVDTKVLIGEVESVEIEEAFAHEKLSPVLAMYKASDFDDAVRKAEKLVEDGGFGHTSSLYIDDVNQREKLDKFTSAMKTCRILINTPSSQGGIGDLYNFKLAPSLTLGCGSWGGNSVSENVGVKHLLNIKTVAERRENMLWFRAPEKVYFKKGCLGVALKELKDVMNKKRAFIVTDTFLYNNGYTKAVTDLLDEMNIKHTTFFEVEPDPTLECAKIGAKAMREFNPDVIISIGGGSAMDAGKIMWTLYEHPDVDFQDLAMRFMDIRKRVYTFPKMGEKANFVAIPTSAGTGSEVTPFAVITDQDTGVKYPLADYELMPNMAIVDSDMMMNMPKSLTSASGIDALTHALEAYVSMLATDYTNGLALQAIKSIFEYLPRAYDNGAKDPEAREKMANASTMAGMAFANAFLGVCHSMAHKLGAFHHVPHGVANALLITEVMKFNSSDAPKKMGAFSQYKYPEALKRYAGIASFLGLKGNSDEEKFQSLLVAIEDLKLKVGIPKSIKEFGVEESKFMDSIDEMVIQAFDDQCTGANPRYPLMNEIKDMYLNSYYGR

SEQ ID NO: 53296 - protein, 366 aa, Clostridium difficile
MNNKKIAVIFGGNSTEYDVSLQSAFAVLENLNTEKYDILPIGITREGNWYHYIGDYNNIQNNTWFERDTDIIPVIVSQNRVKNGIIEFLISDAVSQNHIPNSAIESCENDIKYTKLDFVFPVLHGKNGEDGTVQGLFELAGIQVIGCGTLSSALCMDKDKSHKLVHSEGIKVPKSILLKYSDKFNVAELSKDLTYPLFIKPVRAGSSFGISKIYKKEELQVAVDLAFEHDNEVIIEENIDGFEVGCAVLGNNDLLVGRVDEIELSKGFFDYTEKYTLKSSKIHMPARIDLDCEKRIQETAKIIYRTLGCSGFARVDMFLTPSGEIIFNEVNTIPGFTSHSRYPNMMKGIGLSFEEILDKIIEVYIK

SEQ ID NO: 53297 - protein, 303 aa, Clostridium difficile
  MISC_FEATURE (136)..(136): X=any amino acid
  MISC_FEATURE (137)..(137): X=any amino acid
  MISC_FEATURE (143)..(143): X=any amino acid
  MISC_FEATURE (147)..(147): X=any amino acid
  MISC_FEATURE (148)..(148): X=any amino acid
LVIGIIVMTHGSFSEEIIKSCELIAGPAERTAAIKLNRNDNIEDLNKNFVEKLNELDEGDGVLVLADLLGGSPSNVASLNLKKGGKFHALTGVNLPMLLEALINREGKSLEELAEACIEAGQTGINNINKVLSSMXXKKEFDXKCLXXNIARCDDRLIHGQVIYKWVKHLGVKKIVVVDDETTNDVIAKGLIKMAAPKNIDLSILTVSESRRYFYNNQADDNVFVLIKNLDTANRMIEEGINIKKLIVGRIPTGIGKKKISQNVYINKKEFLLIDEFIKKNINVSIQMVPDEEEVELNQNINR

SEQ ID NO: 53298 - protein, 156 aa, Clostridium difficile
MSLNIVLVEPEIPQNTGNIIRTCAATGSTLHLVKPLGFSLDDKHLKRCGLDYWDIADIQYYDSFEELQEKYPNSKYFFSTTKAKQSHSDVKYEENCFIVFGKETKGLPEPLLKANMDTCIRVPMLDVEKARSLNLSNSVAIVVYEALRQIGYPNMR

SEQ ID NO: 53299 - protein, 363 aa, Clostridium difficile
MKLSKKIQALILFGVMGTSILTGCSSKPKEKEEAKTGKDDYTITVGYYNCDHMTAGPVAESAGIYKDLGLNVKTVGNGKVPEAMAAGKMDAGYIGTKGLVGAIPKGSPITIAANNHTGGSEYLIVSKDIKEPKDLIGKKIATDMSDFLWTSDYGPETGLPTDPSKYEVVNMDSDKDKYLALKTGKIQAFTSCDPWGSVAENDGAGKIIASTQYKEKANGKEYNCCSFSLNKNFIKEHPDLAKKLVLAHTKAIEYIYTNPAEAAKIFAKYYNVEEEVALRTIYKKTVGEGRTLTWKVTGEEYKNNLQMYKDLKALDDIPKYEDTIDTSLLDSCGADDFDKFIKEKVNPEFPEGMSYEDWKAKVL

SEQ ID NO: 53300 - protein, 245 aa, Clostridium difficile
MIKVLICDDDKIVRDDIANIAKESGYVDYVKKVKDGIEAIEFIKNEKIDLLIIDIDMPYKNGIDSAEEILSIDKDIHIVFVTGFADYSLESFKVHPIDFVVKPFKKEKILDSINIAIDHINSHKIANNNFIEDTLFVYKIRKQIHMINFDDIVMFEKNSRAINLHTKDEDIIKFYENFDDLKKRLPPNFFMTHRQYIVNLRFIHKVIPINKSSLEIRFINFQENAILNKSLEKDFLYRFYRVKRF

SEQ ID NO: 53301 - protein, 171 aa, Clostridium difficile
MKEKLTHFKVGQIVNTQGLKGEVRVYPLTDDIERFDELKDFYLGKDLNNKLAVEKVRYKGSMVIMKIKGIDSIEKAEKLKNKFMYVSREDSRELEEGEFFIADMIGMEVLTVDGKYVGILEDVLQYSANDVYVVKGEEDKEFMIPAIKKFVPTIDIDERKMIIDPIKGMID

SEQ ID NO: 53302 - protein, 1543 aa, Clostridium difficile
MKQNKLLQRGAYFNDKNILIDDFDKRYNDYDFVEFFTGISNSTFGLKSDGNLYACGDNTGFQLGLGKDSSERRMFSKVKIDNVKYVSCGSKHSVAVTKDGFAYGAGTSNVGQLGVIESTVYYEFTKLPIDDVKTVACGYDFTFVLKNDGTLYSAGLNSSGQLGLGDTNNRVTFTKVNIDSVKDVVTYNQSVFIIKMDGTAHACGLNSNGQLGINSTLNKSVFNKIEGMDNVKQIACGSSHTILIKNDGTMYTTGSNGYGQLGTGNNNNSIVFTLSSINNVKYASCGNNHTMILKYDNTLFSTGQNNYGQLANANKDVASRNTFVKVNVENIKDIKCGSQFNFLINGSKEIFVSGCNLAGQLGSFFHTTFLYEFSKVQSSNLDNYSGLLVNDDYLYVTKDNSEFLNVKLSDNFQDYKKIELTDNNMFIVMNDGTLYACGLNNYGQLGLGDTVNRSVMTKVDIDNVLDIKGNGNSTFVLKNNGTLYSCGYNSSGILGLKDNTNRNIFTKIEIENIKEFCVESNYIVALNHSKELYGWGNQSYIVYGDNRNYPYKDTRVSNVEKIATWSDTLYILDSTGATKTIGYSYNGSGGYPAPSSSSTYREGGYINKNTSYRTLEFYNTSKTKLVNLFAFYNGCVFVDENGLAYCIGENNINFRGGSTTNENNSLRFINNSGVYYTNTDGTDYTCYQWTYKLIRCSIFDSPQNIIGNSKNILYLSKNNSTFKCTGNCITYGINSQNWYSYFSDSSNGAIALGNEFILKNYSGECLLKGYGKATNGEFGNSTNISSISNYDTGLKDIKDIIVKNNTVVVVDKNNNIYVTGANQFNKLGIGEYNNQPIRKFTNITEQSNSFIFMDDIKEITTSRNTMFIVKNDGTAYATGNNSSGQLGLGDTINRNKFTQINLDNIKKISTSIDGNTTFAIRNDGTLYSTGLNTKGQLGLGDIVNRNTFTKVNIQNVRDVVLGTTHSHAIKDDNTLYSCGENTHGQLGLGSESNHPDVLTFTVNNITNVRDVYCSDTTTFIVKDTNIAYCCGYNNNSQLGMGNTTDQYSFIKCMENVKEVIPNEINTYIITIYNTAYSTGLNTDYCLGLNSNSNQSSFSEIPISNVVKVAPNRNNAVLLLTSEGDVYTAGKCSNGSGTGSETPEKIKKIASKAKDIGMNYRCGHYVSDNGDLYGTGFNDCGQLGVGNVTKRDTFIKTNTRVKKILPLEYANIAIKDTNDIYICGLNNYGQLGVGNRYDSRNNDNRIFNYKHMNFVMGDLTSIKNRHNFILLNNKIVIPTTKDIDYGLVLGNLYKGDLYTELPYEDIKEVSISKTHIIILLNDGTMYGCGTNYHGELLQDLSINQVDEFVQINVSDVKHVSCGDNFTYFIKSDDSLWSIGKNSEYQLGIGHNNPVTELQRITTISSCKEVHCGKNYTLVVTTSNELFVQGYNDKGALGLGSDSENTIIKFFTKALTDIREIKSYGSDHILVLKNDNSVWVTGKNRDVYKIEQPVEFLKEFTIVPISEDVNTVKDVLATDNTLYIISEVGTTNAAIEITEKSICIN

SEQ ID NO: 53303 - protein, 655 aa, Clostridium difficile
MVKIKCDIKFYYHPKSKEESLMKIKFIIVASIIFLIVLLVGCQSTKDTEINVLATSDLHSIIPDNLISYVEEERKYDENLLMVDAGDFFDMQSGEMNKWFTGQKLVRFKDGIPEYKKIAEPREGEVPLAKKMAKLKYDAVTFGNHEFVSNDKQSLDKLVSDFKNNNIPLVSANVYEQSGENYVKPYVMKNINTDKGTVKVGILGLTIKEVGERSRFKSFEQDKKARELGEQPQYKGKLYANDLVEDANKWVKVMEKKEKPDIIVAIVHSGEEPKNPKNPGNRIKELATTVEGIDAIVAGHTHEKIEQHTYKNNSGEEVIVTQPGAHGNSISKINFKLDKKNDKWFIKDKYSELKVFGKEVNIITTSGLNPKFSDEMAVNLFNERDRDVQPIFIDTGDFLNTNTKEMTKWAKEWQYNENKGIYKKINEWPIVYLGYDAVVLGSHDFTEDKETFEEKKSTLDYIIENFEEMKIPVLSANIYDESGENYVKPYIIHNVETREGNIKVGVLGLTTTDKDEEDLSNSSLSKDSKTSKIPEETGKLYTNNLVKDASEWVKVMQKESPDVIVAVVHSDNNSTLKNPSSEVKKLAMSVDGIDAIVVGHTKNKVEEHIYKNKSGDEVIVTQSGEDCYSKISLELRKENGKWNIINKYSKAIKMK

SEQ ID NO: 53304 - protein, 337 aa, Clostridium difficile
MIVVLKMGADKNEVKKLIEAIGREGVEVNPIDGTELTVLGLVGDTSKIDAKRIEANKVVEKVMHVVEPFKKANRKFHPEPSIINVNGMEIGSKKIAMIAGPCSVETEDQIVSIAKDVKKSGAGFLRGGAFKPRTSPYAFQGLKYDGLDLLKKAKEKTGLPIVTEIMSTQDIDIFEENVDVIQVGARNMQNFDLLKELGKTNKTILLKRGLSATIEEWLMSAEYIMAGGNENVVLCERGIRTFETYTRNTLDLSAILAVKKLSHLPVIVDPSHAAGKSWMVDSLSKAAIAVGADGLIIEVHNDPAHALCDGKQSIKPNEYDELISELKTIASAVGREI

SEQ ID NO: 53305 - protein, 92 aa, Clostridium difficile
MNKAELVSKMAEKSGLTKKEAEAALNAFMSSVQDALVNNEKVQLVGFGTFETRERAARQGRNPRDPEQVIDIPASKAPVFKAGKGLKDIING

SEQ ID NO: 53306 - protein, 408 aa, Clostridium difficile
MKQKVVERFLKYVSFDTTSNSQCENCPSSEGQRVLAKYIVEELKTMGVDDVSLDENSYIMATLKGNTDGVDTIGFISHLDTIEDVSGKDIKPRIIENYDGKDIVLNEALNVITYVKDSPELEEFKGDDLIVTDGTTLLGSDDKAGIAEIVTAIEYLINHPEIKHGDIKIGFTPDEEIGRGADLFDVEKFGAKYAYTLDGGIVGELECENFNAANATITIHGRNVHPGSAKNKMVNAIHIAAEISEMFPADERPETTEGYEGFWHLNSIGGNVENVSMAYIIRDHCKEKFENRKSIMIENIEKINKKYDNRVELDLKDSYYNMKEKIEPVMFIVDIAKEAMEELGIKPRLVPVRGGTDGARLSFNGLPCPNIFTGGLNFHGKNECIPVSSMEKATKLIVRIAEKYAERV

SEQ ID NO: 53307 - protein, 487 aa, Clostridium difficile
MTDLVNTINGIVWSPVLVAMCLCIGLYFSLKLKFFQIRDVKEMFTLLLEGDSSHVGISSFQGFATSMAGRIGTGNIAGVAVAIAMGGPGALVWMCIMATLGSATAFVESTLAQIYKDEHDGQYRGGPPYYFEKGLGWKKCSVLFSIVAIISYTFFMPGTQSNTLYLAMNQAFGFSKMTIAVASSIALAIIIFGGIKRIGLFAEKVVPIMGGAYLIMTLVIIITNISLVPEAIVTMFKSAFGFGSVFGGMLGSAISWGVKRGIYSNEAGEGSGTYGAAAAEVSHPAKQGLVQAFSVYVDTLLICMATGIMIVITGMYNVTGVCTALPGVEPGPQYVQSAINTLHPQLGDIFIAIVLLLFTFTTLLAFSYMMETNVSYLVTRIKAEKHEKYIINVCRFMLIACAAMCCFIEPLTSWALGDICIGVLTYINLIAIFTLKKPAIKAYYDYIRQKKMGIKRSDRTFNPIELDIRNAEFWENRYLKEDKHELN

SEQ ID NO: 53308 - protein, 122 aa, Clostridium difficile
MIQQESRLRVADNSGAKELLCIRVLGGSKRRYGNIGDVIVATVKSATPGGVVKKGKVVKAVIVRSKQGVRRNDGSYISFDENAAVIIKDDKTPVGTRIFGPVARELRDNEFMKIVSLAPEVL

SEQ ID NO: 53309 - protein, 635 aa, Clostridium difficile
MLVSRQIEFLKLILNENKYRPIKYFKDKLNVSDKTLQKDLKMIEKYLETFNIKIDIKRGYGILIEDLAKKNIDLINSLNIQSKENKSLSVEQRRMEILKYLLLNSNNITSINQLADKYYVSKTSIVNDFKYIEAWIKEYNLKLNKTLEGTKIIGKEVDIRKSIAKMMDDLLDENYEQHDISELTRLDSATFSALINLFDIDSIIFVETIITELEYNLGYTINQPYYINLITHILICLKRIEEGNQIESQEEREISVDNLDELVYKNVTTLIDKIENRYRVKITKDELMYIYIFLVSSGFSSESNSSYNDESDRLSESEKVSSIMIENMSRFLNINLKNDDLLQKSLAYHVRPMLNRLRYDIQIKNPLLGEIQERFSDVLGLCMMTINIMTEYDNLKNISIDEVSYLATYFQAAIERNMSSKRVIVVCHTGYGTSQLLAARLKREFPEWTIVDIVPMHQLSKRNLDDVDFVISTVNLDLKDKLHIVVSVLLMENDINNIKNALLSKPKKSMNLDTNLLGMYLEDNIYFNFDVAQMESLIGVNLGSKYESISLGKDLNIYIHKQSKLNKGIMNINNVTRTIDIYLEISNQSFLKNILMEISNLYRQKNYINYIIDCKSKEDIKILFKNNLLEKTNGN

SEQ ID NO: 53310 - protein, 340 aa, Clostridium difficile
MNKNNCLDLIFEKVDPSSVGMSSEKLSQLEPLIISQYSNINGIIIARKGKIVFEKYYNGYNADDTFHVASVTKSIISALIGIAIDKGYIKDVDQKVVDFFPEYTCSPSEICKKAVTIRHLLTMTAPYPFKNMTESLERLCKQKDWIKYTLNQLGQKGEIGTFKYSSAGTHLLSAIITKTTGKSAREFANEYLFKPIGMKVIPDYDMKDFGFEDFFGKNLKGWAKDRQGYSIGGWGLTLSARDMLRFGFLYLNDGIWNNKRIISKSWIEESVKMNSNEYGYLWWLCKKDGVLWYSAMGTGGNAICCIPQYDLVIAIPSKIVFKPRDRWEFIEKYILTSIID

SEQ ID NO: 53311 - protein, 408 aa, Clostridium difficile
MKKVVIIGGGPAGMIAASTACEKGYDVTLIEKNHKLGKKLAITGKGRCNITNACEIEELIENVPTNGKFLYSAFYTFTNDDVISMFNNLGVKTKTERGKRVFPESDKAFDIVNALERQLKSKKVNILLNSKVEKIISKNNKIEKVILNDKKEIKCDSVVVATGGLSYPLTGSTGDGYKFAISQGHTIIDTKPSLIGIEVQESFTKDLEKLSLRNVEIRVFNSKQKKVYSDFGELEFTRFGLDGPIIKSASCRMKDTRKENYTILLDLKPALDEEKLDKRVQKDFQKYTNKKFEKALDDLLPKKLIPIIINLSEINPNTVVHQISREQRKNLVHLLKNLKFTVKRYRPIEEAIITSGGVKVNEINSSTMESKLVEGLFFAGEVIDIDAYTGGFNLQIAFSTGYLAGFNC

SEQ ID NO: 53312 - protein, 331 aa, Clostridium difficile
MYKVTLIPGDGIGPEVAKAMKKVVEATGVEIEWEEVNAGEAVIEEYGTPLPEYIIDSIKKNKIAIKGPITTPVGKGFRSVNVTLRQALDLYVNLRPIKSFKGIKSRYEDVDLVVVRENTEDLYAGIEHKIGDYAAESIKIITRSASERIVDFACNYVKDNKRKKVTAIHKANIMKMSDGLFLDVFREVASKHGVEYDDLIVDAAAMNLVLNPENYDVMVMPNLYGDILSDLGAGLVGGLGIIPSANIGKDCAIFEAVHGSAPQIAGQNKANPTALIQSSVMMLRYLGEYENAQKIETALEKVFLEGSKLTVDLGGSASTTEFADEVCKYIV

SEQ ID NO: 53313 - protein, 591 aa, Clostridium difficile
MALDGLVIHSIVDELSSKLTGGKIDKIHQPEDDEVIFNIRNNKENFRLVLSASASNPRVYLTSNYQKENPLKAPMFCMLLRKYIQGGNIVEISQIGFERIIKISVESLDELKEKTVKNIMIEIMGRHSNIIITHGEENKIIDSIKRVPFSISRVRQVLPGHDYSLPPEQNKLNPLDDISKDLFIKNLEELEGPIFKSIYSKFLGISPIIAKEICYRAGVNQNAIIKDISDEQFDALHKVFCNLFNDINSNKYSPCIIIDKKVDRVVDFSCINLTLFSDLSYINKDSMSRILEDFYRTKDIKDRINQRSSDLKKSISVKLDRLYNKLKKQEEELSESENADIYKIKGELITSYIYMVEKGMESIEVANFYDENCNDVIIELNKNLTPSENAQKYFKKYNKMKHAKVEISHQISLNKEEIDYLENIILSIENCENLAELQDIKEELAKVGYIKTQKKNSKKDTIPSTKPHEFVSSDGFKILVGKNNKQNDYLTLRLADNDDLWMHTKNIPGSHVIIKCAGKEVPDNTVFEGAMLAAFFSKSKLSSQVPVDYTKRKNVKKPSGSKPGMVIYETNSTIYVTPEEETVAKLKVKSE

SEQ ID NO: 53314 - protein, 170 aa, Clostridium difficile
MSDFKEILAEEIKNNPFGLIGKDWTLITAENEGKVNTMTASWGGLGVMWGKDVAFVVIRPQRYTKEFIDNTDKFSLTFFDEDFRKELSYCGKVSGREEDKISQIGFNIEHLNDTPYFKESKMAIICKKMYSQKLEPQCFIAEGIDGRWYPQKDYHTLYIAEITNVLVKED

SEQ ID NO: 53315 - protein, 861 aa, Clostridium difficile
MVNMKDNLKIVLRYIKSYKARSLAIVVSIILATSLVVGIGTLSRSAQQADVDRLKRELGTDHVYFKNIKKNQLKSIKSSKDIKNLGITSYYASTDVNEKLPINILYANKNYLTSHSKLIKGRFPKASNEVVVEKWILNSMGLKPEINQNLTFKLYQKENPETFKVVGILEDRFIEKKMGQCEIFSNLNESKLSDFTTYIEFNEGSDINTNIDNIIKNAMLDEKSIGRNSMLIESTMKNGTLDNSSKYVAIAMSLFAGIVIYSIYVISIYQRVQEYGVLRAIGSTNFRIFKLMLYELFILALIAMPIGICIGMVGAQIFNRSVGNIQFEGNINVTPFVIPDKIILLSIACTILIILIISFFTYLKIRRISPIDAIRKTFGADKNVTKVNYLISKLTLNMSVTKSISAKNIFRNKKGFMIIVLSMSIGGIIVIKDNYKYSFLDVQNKSVQEQTYMNADFILSNVYLNETGNNTSFKDIKGFSDSQIDKIKNIDGIDKVKTASILNTRIEVNKINQLDYYEAINSKPYYKLNPLFIKNKTTGKYTLKQKLKGYNDEMIKSLEKYLVSGNINLKKMKKENLAIVYVPEISKTQKYTKTFTPGEGTPAVDIKVGDTIKVKYPKGGMDTGLYESLKDNYEYLEYEFKVGAIISYTFADNGMYSGDDGVDVITSSEYLKKLTGVDKYNLIYADLNENANKKKINNLLGKIGSEVPGTTTVDMMVEKENSDKMTSRTMIYSYGIVAIMFIISVLNIINNISYNLTSRTSEFGMLRAIGISEREFKNMILYEGILYGVLSSIITIVSGLIIQLKMYYMQGFISHGLGFSIDYKIYILVVVANIIVGILATYIPSRKINKISIVEAINITE

SEQ ID NO: 53316 - protein, 221 aa, Clostridium difficile
MEMDNMRIILLGPPGAGKGTQAVGIVEKYNIPHISTGDIFRKNIKEGTELGKKAKEYMDQGLLVPDELTVGLVTDRISQEDCKNGFMLDGFPRNVAQGEHLDIFLKNAGISLDKVVNIEVDKSILVSRAVGRRICKSCGATYHVEFNPPKVEGVCDVCQGELYQRADDNEETVSKRIQVYLDETKPLVDYYSKQGIIADIKGDQAIDKVFEDIVAALGSGK

SEQ ID NO: 53317 - protein, 200 aa, Clostridium difficile
MEVCILMGSPKKKGNTAAILKPFIEELENYNSNIEVIWLYDCKIEPCIACKKCQDNLFDFGCYCKDDVQKIFKKILMCDLIVFATPIYSWYCTSPMKALLDRLVYGMNKYYGNEKGPALWAGKPVALITTCGYRPEKGADIWENGMKRYCKHSQLKYIGMLVERDLGKPNFMNKEKEEHSRQFAKQIYYILDNSIEVDNC

SEQ ID NO: 53318 - protein, 162 aa, Clostridium difficile
MTLREITKRYGVKFIINDRVDIALICDADGVHVGQSDIDVREVRKLIGNNKILGVSARTLEEAICAKNDGADYLGVAFSTISSILAGCILPSAINFSRAILAISLLIGSNPDKITASGVSSIIRSIPVKVSKVLIFLPSLPIILPFISSLGKLTTVTVVSAT

SEQ ID NO: 53319 - protein, 686 aa, Clostridium difficile
MKREVVMSILVTLLGLLVCTTISTVFSKKWSNIPLAIYQIVLGIILSILPFKFSFSFNPEIFVICIIAPLLFSEGQNVSRKELLELRKPILLLAFGLVLITVFAGGIFIHFLIPGMPLSVSFALAAVISPTDLVAVKSITQGLNFPKNMMSILEGESLLNDAAGVVAFKVAVLATVTGVFSIEEAGIQFMITAFGGIIVGSILGYIIIKIRLSLHKWNLEEIPMVIVIQIMTPLFVYFVAEEIGVSGILAVVMAGIAHGIEKEHLQNTTTKLRIISDNTWYVLEYVLNGFVFTLLGFLLPSIYTGLSSKNENMALELTFISTLIVLILFVIRFIWVYLWHNSFIKPKKNPLNNFFVGFLGFKDEEVVKESISKCKYSLIVATCGVHGTFTLATALSIPFYLADKDVFPMRDTVLFISSEVILISLVLATVLLPRLLKNNVQESEPLLSDKEAYKLILKEAILKLSNEKAQEVQPVIHDLNEQLVDSEKGILNTPDNKLISMMIAEADQQGLLAVLKLLEDGKISDRAFKLYRFYITKSRKSVQKSIFKIVKLKISMWIINRKVKKEVKEKITKIVSENKEIIKEFHHAYALSTKTAISFINKNTDEDNRHEALIAIRFYNRYLNWITRKIQNDDKFEARVEYYRVMAIQSQRDSVQQLVETKQISREVAKELLENILYDEMMMIES

SEQ ID NO: 53320 - protein, 340 aa, Clostridium difficile
MKNIIKINSKTLLVISILMVLIFITFLLSLNMGSFSIEPMDVIKTFLGQGQRNHEIAIFKLRLPRIVIALLVGSALSTAGVILQGVTKNDLADSGILGINSGAALFVVVYIYLMNGNVYEGMSNLTVFTMPIVALIGALFGAFLIYSLAWKGGINSSRLLLIGIGVNIAFTSILTIFQLKFTTQEFNRVMAWTSGSIWGTSWKYVIAVLPFIVIFMGITIYKSKYIDVLNLGDEVSISLGVDVEKQRRRLIIYAVILSGVSTAVAGSISFLGLIAPHIGRKIIGPKHKRLIPVSALIGTLLLLIADTISRNLLAPIEIPVGIVVSIIGVPYFIYLMLVND

SEQ ID NO: 53321 - protein, 676 aa, Clostridium difficile
MYTPTWVEPRINIVPNIFGAIFYYKKSKNYFNKEEKTMIKVALKDGSIKEFENAISVMDVAKSISEGLARNVVAASVNGEVVGLDHIIDTDCDLNLFKFEDKEGKEVFRHTSAHILAQAIKRLYPEAKLAIGPSIENGFYYDIDLDHRLVPEDLEKIEAEMKKIAKEDLKIERFELPRNEALELMKEQGEDYKVELISDLPESEIISFYKQGDFTDLCRGPHLPSTKKVKAVKLQSVAGAYWRGDENNKMLQRIYGTSFEKNKDLEEYLHLLEEAKKRDHRKLGKELGLFMIPEEGPGFPMFLPKGMELKNELLKFWREIHRKAGYIEIESPIILNRKLWETSGHWYHYKENMYTVKIDDEDYAIKPMNCPGGLIYYNSQLHSYRDFPMRVAELGRVHRHELSGALQGLMRVRAFTQDDSHIFMLPEQIKDEIKGVANLIDGIYKTFGFEYNLELSTRPENSMGSDEEWEAAENGLREALEELGLPYTINEGDGAFYGPKIDFHLKDCLGRTWQCGTIQLDMQLPRQFDNTYIGQDGEKHRPVMIHRVAFGSIERFIGILIEHYAGKFPVWLSPTQVKILPISDKFMDYANEVKKELFDKGIRVELDDRAEKIGFKIREAQLEKVPYMLIVGEKEVADNNVSVRSRDKGEIGSIKLDEFIASISKEIESRESIIQD

SEQ ID NO: 53322 - protein, 89 aa, Clostridium difficile
MDYRNNFENDKSLIVYGHYMKNKTMFGQLENYTDEVFFKENNLVEINYKVQTYTYEIFSVYTADLINRDYLSIHFNNNDEFKYSLNYIT

SEQ ID NO: 53323 - protein, 234 aa, Clostridium difficile
MKEPIYKVIENHVRELINSDSLKEGDLIPSEKQLSEEFNVTRMTVRSALNNLVKEGYITRQRGVGSIVIANNIYDNISSVSGFTKEMESKGYKVSNILVSLEIVQADENLSSKLNISLEENVWEIKRVRLANDARVSYMITYMPVKLFPNLNKTHCENSLYNFVEEVCGYKIAMSEREVQAVISNEECMDNLKLEEPEPLLYISQICKLQNSEIFEYSHTYHYGYTLTLNAVVE

SEQ ID NO: 53324 - protein, 244 aa, Clostridium difficile
MTSIYSILNKEDIILTVKGQEQKVSSFKKTVEELLDEQGVKYNSEDKINPSLDTELKDDMKIKVVKVTKSKKEEIEKIPFDTKHVNDSNLLKGKSKVYQEGQEGEKKLVYNLTYHDGKLVKKVLSKEVISKEPTTKIIKYGTKEKVLIASRGANIRGGKHMKVVATAYAGDTITSTGTTPRWGVIAVDPRVIPYGTKVYIPKLGMTFVAEDCGGAIKGNRIDIFMNSEGKASNWGRKSIDIYLH

SEQ ID NO: 53325 - protein, 143 aa, Clostridium difficile
MQMMPTINQLVRKSRKALEKKSTAPALQKGYNSLNKKVTDASAPQKRGVCTSVKTVTPRKPNSALRKVARVRLTNGIEVSAYIPGEGHNLQEHSVVLIRGGRVKDLPGVRYHILRGTLDTAGVDKRRQSRSKYGAKRPKEAKK

SEQ ID NO: 53326 - protein, 267 aa, Clostridium difficile
MLKDITIGQYYPTSSAIHKLDPRIKLVATIVFMVSIFVVNKFWPYIVVLLCLLAMIKLANIPVKYIVKGVKPLKWIILFTFLINIFFLPGDEIWSFGFLAITKQGLRQAIFMAIRLIFLVVGTSLLTLTTSPIELTDGIERLLNPFKKIGLPVHELAMMMTIALRFIPTLLDETDKIMKAQMSRGADFESKNLINRAKNLVPLLVPLFVSAFRRADELAMAMEARCYRGGHNRTKMRESVISRRDYMACVFQLVYLGAIIATRFIAI

SEQ ID NO: 53327 - protein, 441 aa, Clostridium difficile
MDAREVGFKVLCDIEKNDNYSNIAINKHFKNLEISDMDRGLATELIYGVIENKYYLDYIINKLSKIKVKKMSTYVKIFLRMGTYQILFLDSISDYAAVNETVKLSKKYDKKSSGFINAILRNEIRAKETIMDITEEDSVKYLSIKYSYNSWIIKNWIDKFGQEFAEDLLEANNEKPSIYIRTNTLKISREELIEKLSEMGIVCLKVPMVEEAIKVEKMKNIEKNELFKAGLFTIQDISSMIVGKVINPKEGSFVLDVCSAPGGKSTHLATLMNNTGQVVARDIFEHKLKLINSTVNRLGLKNVFVERFDASEIDENSISKFDYVLADVPCSGFGIIRRKPEIKYKKEEELKDITSIQKKILENASKYVKVGGTLVYSTCTIQDVENINIVTFFVEENHNFEFVPIDTVNVDLDNQDKGYLKIYPNIHGIDGFFIAKLKRIR

SEQ ID NO: 53328 - protein, 1068 aa, Clostridium difficile
MPKLDSIKKTLVLGSGPIIIGQAAEFDYSGTQACQSLKEEGIEVVLINSNPATIMTDKEVADKIYIEPLTIEFIEKIIEKERPDSLLAGMGGQTGLNLAVELYEKGILDKYGVKIIGTSVESIKKGEDRDIFREVMKEINQPVIVSDIVTDLQAGLDYALTIGYPVVVRPAYTLGGTGGGIADNEEELREILSHGLQLSPVGQVLIEKSIKGWKEIEYEVIRDSKGNCIVVCNMENIDPVGVHTGDSIVVAPTQTLSNKECAMLKKASLDILNAVEVQGGCNVQFALNPHSFEYAVIEINPRVSRSSALASKATGYPIAKVSSKIALGYTLDEIENAVTKKTYACFEPTIDYVVAKIPKWPFDKFKKANRKLGTKMMATGEIMSIGSNFEAAILKGIRSLETGKYSLVHTPSEERSIEELKKRVVVPDDERLFDLAEMIRRGYKVEMIEQITGIDKWFINKFKWIVEQEEKLKVMKIEDLTKDYLLELKKKGFSDKGISDLMKISPEKLYELRSLYNIKPAYKMVDTCAGEIDAISPYYYSTYEQYDEVVVSDKKKVIVLGSGPIRIGQGIEFDYCSVHCVKSLRKMDIETIIINNNPETVSTDFDTSDKLYFEPLTEEEVLSIIEKEKPEGVILQFGGQTAIKLAKFLHEKNIPILGTDFDDIDAAEDREKFDDLLERLDINRPKGKGVWSLNEGIEVANELGYPVLVRPSYVLGGQGMEITYNEEKLSQYLQDAFDRDHKNPVLIDKYLTGREIEVDAICDKEDILIPGIMEHLERAGVHSGDSTTMYPSQNISDEIKEKIVEYTKKIALDLNVLGMVNIQFIEFQNELYIIEVNPRASRTVPYISKVSGVPIVDLATKCMLGAKLKDLGYGTGVYKEPKLVSVKVPVFSMSKLSKVEVSLGPEMKSTGEVLGVGENLEEALYKGFLAAGRHMSDERGVVLATVNNHDKDEFIEIAKDMKELGYTFVATEGTANSLRENGIEADIVNRVEESRPNILDAIRNKQVDIVINTPTKGNDSTRDGFKIRRTAIEFSTEIMTSLDTLKALVEVKKKHLNKDELKVYNIAE

SEQ ID NO: 53329 - protein, 515 aa, Clostridium difficile
MNKNSMTRIYSLNKIIFIIIGILGIVLLTRHIEVDIKVLILILLTLFSINVFISYLKIKLYEDKINLGLINNSDKFINITKDENFLKHVQNYIISNEKENCVMACFDLCRLKLINDIYGYELGDEVLNNILSNLKNYFGKEAIYGKLKSDVFVLIIKLENREQKIPYLVNLIKNKIVILSQIDSFKMDINIEASIGIYKFNNNEIDIKKAIDNADMARLKSKGLKHIEYVEFDNAMEEEIQSIMKIERDLFLAIKNKEFVIHYQPKVDSSTGNIIGSEALIRWLHPSLGMVGPNKFIPIAEKNGLINNIGRWLIQEVFITINKWISEGINVLPVSINLSRVELYKNDLVDFFKLMFNTYNIPKELIELEITETTALRDVKFISERLYEIKSLGMNISLDDFGVGNSNFINLKGIPLDIIKIDRSLILDIVTNTKTKFMVKAIVNLSHDLNVTVICEGVEDMHQVKVLSELGCNFIQGYVFFKPLDEMNYKKLLTDGSYINLKDTLLDKCMTVEEE

SEQ ID NO: 53330 - protein, 290 aa, Clostridium difficile
MLLLADKWKDYELIDMGNGEKLERWGSYVLRRPDPQVVWPMESEWALWKNPHGHYHRSNKGGGQWEHKKRYPEQWTINYKNLKFHIKPTGFKHTGLFPEQAANWDWMIEKIKKANRPIKVLNLFAYTGGATVACASAGAEVCHVDAAKGMVNWAKENIELSGLKNQTVRFIVDDVVKFVEREIRRGKKYDAIIMDPPSYGRGPKGEVWQIEEKLYSFVDLCMGVLSDNPLFFLINSYTTGFSPIVLENVLSTTIGKKTNTGDIYGGELGIPASRDGKILPCGIFGRWEKK

SEQ ID NO: 53331 - protein, 394 aa, Clostridium difficile
MNHERRGFMMLNFDVELEECAQIKVIGVGGGGNNAVNRMVEAQLKGVEFISVNTDKQALYTSKAEYKVQIGEKLTRGLGAGANPEVGKRAAEESKDEIVKLLQGADMVFVTAGMGGGTGTGAAPVVAGLAKEMGILTVGVVTKPFAFEGKIRMKNAEGGIAELKSKVDTLITIPNDRLLQIVQKNTSMLDAFAVADDVLKQGIQSISDLIAVEGLINLDFADVTTIMKDKGLAHMGIGSASGETRAIDAARQAIQSPLLETSIQGAKGVLLNVTGGPNLGLFEVNEASTLVMESCDPEANVIFGASIKEDLGDEIMITVIATGFEGLQNGALDLDTKPKSSIRSSLNTTVKQAVKEIEEEVIAEEKIEPPKKASIIEEDDDESMEIPTFLRRRR

SEQ ID NO: 53332 - protein, 441 aa, Clostridium difficile
MSISRPVVAVVGRPNVGKSTIFNKFAGKRISIVENTPGVTRDRIFAEVEWLDKYFTLVDTGGIEPDSEDIILSQMRNQAMLAMDMSHVILFIVDGKAGITAADKEIAQLLRKTKKPVILVVNKIDSQSQFDNIYDFYELGFGTPFAVSGANSMGFGDLLDEIVENFPAGLDTEYEEDIIRVAITGKPNAGKSSILNKILGEERVIVSPIAGTTRDAIDTYFEKNGQKFLLIDTAGLRRKSKIYETIEKYSVIRAMSAVDRADVVLIVIDALEGVTEQDTKVAGIAHDEGKGCIFVINKWDLIEKDNKTMSNYTKDIKEKFPFMMYAPIVFVSAKTNQRMNKILDTVEYVSNEHSKRISTSALNEVIGEAVMLNQPPSDKGRRLKIYYGTQTDIRPPKITLFINDKDLTHFSYQRYLENKIRENFGFEGTSIKFEYRQKNKK

SEQ ID NO: 53333 - protein, 278 aa, Clostridium difficile
MIKLGTHLSIAKGFANAAETAVYIGANTFQFFSRNPRGGNAKEFDEKDIIKFQEIRKENNFAPLLAHAPYTMNLGGTKDDVYEFATRVIDEDIRRMDSLGIEYMCFHPGSHVGGGVDFGIDRIVKGLNNAIKGDENITILLETMSGKGTEIGFKFEQLKSIIDKIEHKEKIGVCLDTCHIFSAGYDIVNDLDGVLEEFDKVIGIERLKTVHLNDSMMPFGDKKDRHAPIGEGKIGLKALIDFMEHPSLKHLPFFLETPFDDEGHKRELKMIKEILSSK

SEQ ID NO: 53334 - protein, 384 aa, Clostridium difficile
MNHEFMEALDELVVDRGIDKEILIDTIEQALLTAYKKNFGSAQNVRVEFDRDKGDIKVFSQRVVVDESDLYDTFLEIELADAREINPNYELGDIIEHEVTPKNFGRIAAQTAKQVVVQRIREAEREIVYNEFIEKENEIVTGEVARANKNVVYVNLGRIEGIMTQSEQIPFENYKAGQKIKFYILEVKKTNKGPQIVVSRSHPGLVKRLFEEEVPEIYEGIVQIKSVAREAGSRTKMAVRSIDEKIDPIGACVGPKGLRVKNIVDELGDEKIDIIKYSEDPAEFISAALSPSKVVRVDIDEDEKSALVIVPDYQLSLAIGKEGQNARLAAKLTNWKIDIKSESQAEQEMLNLENSKEIEAEDVEAEFIDQEELDTSEDNFSEEE

SEQ ID NO: 53335 - protein, 333 aa, Clostridium difficile
MKKVNVAIVGATGMVGRTFLKVLEERNFPIENLFLFSSSKSAGSKVMFCGKEYIVEELKETSFTDRGIQIALFSAGGSISEKYAPIAASNGILVVDNSSQWRMNPDVPLVVPEVNPEAIKNHKGIIANPNCSTIQAMVPLKALDDKYKIKRVVYSTYQAVSGSGVKGVEDLEKGMNGNPTGFYPHQISYNCLPHIDSFTENGYTKEEMKMVNETMKILDNYDLKITATTVRVPVKNGHSESINVEFNNPFELDDLVKTLEEAPGVVVVDNPAKNEYPTAVEFDDRDEVFVGRIRRDFSVDNGVNLWVVADNIRKGAATNAIQIAEMALSYDLV

SEQ ID NO: 53336 - protein, 337 aa, Clostridium difficile
MNILIYSTNINYKEVFDLKKGYVYIILTTLFFSSMEISLKTVTNDFNPLQITLSRFFVGGLVLLPFAVKRLRALSLSITKSDLKYFAFLGFMCVVVSMSLYQLAVLNTKASVVAVLFSCNPVFVMLLAYLILKEKIYRHNVISLILEVLGIIVIINPLHTKLTLSGIFLTLSSAIIFSMYTVFGKRKTLKFGGIVVTCFSFIFGSLEMLILVLLTKINFIADILNKNKLHVFANIPIFSGYTLHNMPIMIYVFVFVTGVGYALYFMAMEATSTSLTSLVFFFKPVISPILALLILKEIIPINMVVGILLIVIGSIISIIPTIITQMHNKHVEALYKE

SEQ ID NO: 53337 - protein, 249 aa, Clostridium difficile
MKKNLVSIITPMYNSEKFIEATIKSVLNQTYQEWEMLIIDDCSTDNSPNIVKSYMQQDSRIKCIKTETNKGVSNARNLALSKATGQFIAFLDSDDQWNSSKLEKQVNFMLENDYVISFTSYELMDENDKKLNKVIKVPPNVDYRRLLKGNILGCLTVVIDKSKLDFEIRMSGVRHEDYVLWLSILKKGHIAHGINEVLALYRKSSNSLSGNKIKAAMWTWNIYRNIEKIPLYKAIYYFINYGINGIKKS

SEQ ID NO: 53338 - protein, 547 aa, Clostridium difficile
MLYKQYGGYVMNNNKNKDSFLKGALILGLAGVIVKIMGGFFRIPLGNMIGSEGMGYYQAAYPVYTLFLTLATAGFPTAVAKLVSEKVAIGNFKGANKIFKVSHTVLFITGIISFCILFFGADYIVTNVMKNPGALYSMKAIAPALLFVPAMSAYRGYFQGRQDMTKIAVSQVAEQFFRVVLGLTLAYLLMKSLGQTFGAAGAISGATIGSIASMLYLVFAYMLGRKERRAEIDASQRFKDERVSYIFKKLLTVAIPITIGASVMPLVNMIDNVIVIRRLMEAGFTYKVANSMFGQLTGMAMATINLPAVITTAMSMSLVPAISKAYALGNKSKARKDTKSAVKVTLLIVLPCAFGMASLAIPIMGLLFPHEPSSVGTILFTLTPCVLFLGLIQTLTGIIQGMGKPIVPVIALCVGMLCKIVISYTLTGIPDINVLGSAFGTVTAYFVAAMINLLYVKKHMNVNFSKKEFIIKPFITVMTMFIMVKLSYGALVGFLGNSISTIIAICVGGIVYVVVILGIGGIKKEEILTMPKGDKLYKLLKKVKLIR

SEQ ID NO: 53339 - protein, 120 aa, Clostridium difficile
VVVEKAYKFRMYPNKKQQELINKTFGCCRFVYNKYLAKRIDVYKNNKETFTYKQCSSDLTNLKKELKWLKEPDKFSLQNALKDLDNAYKKFFKEKTGFPKFKSKKINRFSYKTNFTNGNI

SEQ ID NO: 53340 - protein, 158 aa, Clostridium difficile
MKLTTICYIEKDDKTLMLYRNKKKDDIHEGKYVGVGGKFEQGETPEECVIREVKEETGLTLKSLSYKGLITFPKFKDEEDWYMFLYFSDEFEGELSEKDLNDCKEGNLIWVDNDKIFDLNMWEGDRLFLNWAKTGNIFSAKIVYDNGKLKDYNVSFLD

SEQ ID NO: 53341 - protein, 61 aa, Clostridium difficile
MARKAMVVKQQRKQKYATREYTRCTICGRPHSVLKKFGICRICFRELAYKGQIPGVRKASW

SEQ ID NO: 53342 - protein, 179 aa, Clostridium difficile
MKIRMSSTISYDSIVDGPGLRMVIWTQGCIHNCKECHNPQTHDLCGGFYMDTEEIINKVKSLKLQKGITLSGGEPFLQPEPLEEIAREAKINGLDVWSYTGFTFEQLLDKKNRAYFKNLNLLKQIDILVDGKFIAEKKDISLKFRGSSNQRIIDVQKSLKYKKVFLVEQYMKDDLSIAE

SEQ ID NO: 53343 - protein, 75 aa, Clostridium difficile
MFEKIKEIIAEQLGVDNLDEITMEASLMDDLEADSLDAVEIIMALEDEFGIEIPDEEAENFKCIGDICKYIEENK

SEQ ID NO: 53344 - protein, 491 aa, Clostridium difficile
MKFANRSDVMGKISIVGLGPGDYSLISQGVLESLINSPKVFFRTEKHPIIDKLKETIQYTSLDYFYEKEENFDNVYLKISEFIIEESAKGDLVYAVPGHPRVAEKTVSIIERLANEKHIAVEILPSMSFVDAMFNYLAIDPSEGFKLVDAFEIENSYIDLDTSMIITQVYDKFIASNVKLKLMEHYDYNQEVCIVNGAGVKDLESKKFIKLCELDRNENFFDYLTSLYIPKSSKKMYNTVHDLEIIVNTLRSPSGCEWDKKQTHQSLKNSVIEEAYELCNAIDNNDIDEMVEELGDVLLQVIFHCQIGNEEGYFDLKEVVNGICKKLIHRHPHIFSGAKLDMSKFEKTWEELKKEEKGESTITDGLRRIPKHLPALMKASKVQHKAALVGFDWDNVEDVFKKIEEEYQELLDEHRVGNIKYIKEELGDLLFSIVNLARFLDIDSGEALNCTTEKFINRFDFIEKSAMNLNKKLEDMTLEEMDEFWNQAKKQ

SEQ ID NO: 53345 - protein, 361 aa, Clostridium difficile
MFCTGGYIFMNCKWISKIDERKKCHREADSSGYCIFHKENKSDEEIQLMMDTLHKEEISEFNGFVFENEFNAEEILTYNYKILDFSESIFKQKANFKKYIFKKNIIFNYTEFRDKVLFNGCVFLENCDFNRTIFSKHYINDRIFEKVKFKGPDLVVNKVENFPRMDGIIFSMCTKFVLKNVEYGKSEYEHGKINYRIARNQATKIGEYEMIGFYYYKERIYSSKIMKRSNYPTFSDYLVEKFFDQIARYTTGYGEKPWNILLVIIAIISVFALLYLFVGIESSNSTLVALDINNIGDYSLSEIFKMYMDLWYFSMATFSTVGYGDMVATSLIGKALAGIEVFFGVTIGAIWASVIIKRMIR

SEQ ID NO: 53346 - protein, 400 aa, Clostridium difficile
MKTSILIALIEKTSLIVVLFLLITKLKIFKQIFQKEEYSFNDLVCIALVFTFLAIFGTYSGINYMGSIVNTRIISIVSGGILFGPMVGITAGVFSGIHRYFMDIGGITSVPCLLSSILAGVLSGFLYKRIPKQHRVMYGILVGMISESFTILLIYLISYPHSLAIQIIGGIYLPLIVGQIGIGFVISIVEGIEKDKKDIEARNKAEIKALQRQINPHFLFNSLNTIASFIRFSPDKARELIINLSTYLRYNLEYSDNLIDINKEIEQVKSFVEIEKARFGELLTVSYDIEDVNIKIPSLIIQPLVENAIIHGILESGRAGVVKISIKKLPYSLENTVRISIEDNGIGISEEIINNVYQDNMPENKIGLYNVHLRLKLMYGRGLNIRRIDNGTLIVFYVKE

SEQ ID NO: 53347 - protein, 122 aa, Clostridium difficile
  MISC_FEATURE (51)..(51): X=any amino acid
  MISC_FEATURE (106)..(106): X=any amino acid
MLSALIHSVHSYPAMPLAGQLVHQRYVHPGPLVLRTGLLKFPTPATDRDRXFSRRSEPSSRTTLSGEQPNPWDLLQPQDVMSKHRGAKPPRRCGLLGEISLLSPGXLLSVERMAFHAEPPDH

SEQ ID NO: 53348 - protein, 402 aa, Clostridium difficile
MLYILINIINNTYYYYYYDFNLFLYIKSQRRLSTLKIICNQKILANRIGIAQKAINGKTTIELLKGILISTEEGQLKLTGYDAEIGIETYVQAEIIEKGDVVVDARLFGDIIRKLPDSFVEIETDSENNIYINCVNSRFKIKGYAAKEFPKLPELNEEDLYSIPQEILKNMIKQTVFAISQDQTKPVLMGELLEIVDRNLNLVAIDGYRLAVKSCSVDSLTENIKVIIPGKTLIDVNSLLSGEDNVKVGFNEKNAIFIINDTKIITRLLEGDFIDYKKLLPREHNSRVKLNTKELLNSIERASLLSQSEKNNLIKLSIRDKVMAITSNTEKGNVYEEVEIDLDGDYLDIAFNSRYFIEGLKNIDNEEIFIEFTTNVNPCIIKPTDDVNYIYLLLPVRISSNI

SEQ ID NO: 53349 - protein, 888 aa, Clostridium difficile
MENTNLSKTYNPKDFEARLYKKWMDEGYFKSKPNPDKKPFTIMMPPPNITGQLHMGHALDHTLQDILIRWKRMDGYEAFWLPGTDHASIATEVKVVERIKKQEGKTKYEIGREEFLKRAWEWKDEFGGKISNQLKQLGDSCDWDKERFTMDEGCNEAVIEFFVSLYEKGHIYRGNRIINWCPDCKTTLSDAEVEHEEHDGNFYHIKYPLKDSEDFLEIATTRPETMIGDTGIAVNPEDDRYKHLIGKTAILPLVGRELPIVADSYVDLEFGTGAVKMTPAHDPNDFEVGLRHNLEQLNTMNEDGTMNEVCGKYEGMDRFECRKAIVADLKEQGYLIKIKEHNHNVGTCYRCHTVVEPRLSEQWFVKMEELAKPAIDILKKGELEFVPDKFDKTYLQWLENIRDWCISRQLWWGHQIPAYYCQECGEIVVARKMPDKCPKCGSTHFKQDEDALDTWFSSALWPFSTLGWPNKTEALDYYYPTSVLVTGYDIIFFWVVRMAFAGMFCMNEKPFDHVLVHGLVRDSQGRKMSKSLGNGIDPLEIIEQYGADALRFTLTTGNSPENDMRFYMERVEFARNFANKLWNASRFVFMNIDEDIIKNMTRESVKEDLTLADKWIISRANNIVKEATNNMDKFDLGIALQKIYDFTWSEYCDWYIEMVKPRLYGEDANAKSAALYTLTYVLEKILKLLHPYMPFITEEIYTHLPTVEGCIIVSEWPKYNEEDNMAEEEDMMNLLMEGIRSIRNVRAEMNVPPSKKAKLIIIPSEEKIEAIELGKDYFITLASASNVEIAKDKSNVPEDAVGVVIDGVEIFIPLNELVDFEKEIERLSKEKKKLEGEIKRVNGKLANQGFLAKAPESLIEEEKAKKEKFEEMIKSVEERLTNLESKIK

SEQ ID NO: 53350 - protein, 150 aa, Clostridium difficile
MKIGLGCDHGGYNLKKEIISYLESKGIECVDYGTNNATDSVDYPVYGEIVANSVINKEVDYGILCCGTGIGISLAANKVPGIRCAVVSDVFSAKMSKAHNDANMLSLGERVLGKGLALEIVEAWINTDFEGDRHARRVNMIKSIEEKHNK

SEQ ID NO: 53351 - protein, 317 aa, Clostridium difficile
MRYKKFYFKKFKMRWKCMRSFEEVIKFAKERGPKTISVACCQDKEVLMAVEMARKEKIANAILVGDIEKTKEIAKSIDMDIENYELIDIKDLAEASLKSVELVSQGKADMVMKGLVDTSIILKAVLNKEVGLRTGNVLSHVAVFDVEGYDRLFFVTDAAMNLAPDTNTKKQIIENACTVAHSLDISEPKVAAICAKEKVNPKMKDTVEAKELEEMYERGEIKGCMVGGPFAIDNAVSLEAAKHKGINHPVAGRADILLAPDIEGGNILYKALVFFSKSKNAGVIVGAKAPIILTSRADSEETKLNSIALGVLMAAKA

SEQ ID NO: 53352 - protein, 285 aa, Clostridium difficile
MENILEVYNLNKTYTDFSLSNISFALPEDCITGFIGVNGAGKTTTIRSILDVIKRDSGKIKIFGKDFDGNEKELKNRIGVVFDDSYFYEELSMAEMKSIIAPSYDNWCEEDYQQNMKRFNLNPKQKIDTLSKGMKMKFALALALSHKAEFLIMDEPTSGLDPLIRSQILDILTEYMKKCGRGVFFSTHITSDLDKIADMIVMIDNGRIILEREKDTLLDEHRKVKGDIQFLNDEIKKLFLNLEITGYGFIGITSKINEVQKNMPDILIERPTIEDIMLAYIERRE

SEQ ID NO: 53353 - protein, 972 aa, Clostridium difficile
MKKGNRKALLISLIMILSMVVSTIYPTVSYASELGENSQIQSGSTNSSTGEEKESDNKKPEQTPEKDKATDNKKPEQTPEEEKPTDNKKPEQTPEEDKSTDNKKPEQTPEGEKPIDNKKPEQIPEEDKSTDNKKSEQALEDEKPLDNKNTEKTPEEDNLLEDENLLKVLEEELNEENEDYGFVVKINNNTIETESMKKISFNLTYTPTSKGIQAGDSITFKVPDVFNKVNLDYTSECFDKTESNGEYTLTFRELPNGQSVMQGKIGLEAYVKKVDEDTNAKIHIETTGKIESGSGDIDVEIKPGDKTDVPDAKGTLKKLVEGKKSTTVFMPVKNKDINYSIQVNEKQEELKDIILYDELPEGLTLINGSVSVVTSDGKEVSDFNIEQSKNSISVNFGNIDKSYTVKYKARISDKNAKHGNKYKNVARIESDGKKIQEDDATVSIFDRGDDYLLTKGHSGATNITQVGQVINYQISINDDKSPISNVVITDNIPEGMRLTTSGEAGHDFRVVEIPMNGSWTPWSKEKIANNISYKVEEKRNESGQVDKVITGFTINLSKEEVESKFFIAYTLKVISIEDSYINRAVLDANNSEIDKNDEINFKKNSGLISAKKEVDKKVLNSSDNQIVKYKINMSTYGVYDAGQVNLLDEVNSVLEISNIKYSDNLELKKEAGDGKNTIRLVNKYEFKQIKEGEPVQSWVTFDANFTNVKVGETIRNVAQINGSSPPGVETTKQGYAFEAKKVDALDKNVLSGAKFNLEDAFGNIVVKDLVSDEDGIIQSSVKNPGTYYLVEIMAPRGYEKLKDKIKVEIGNKDIGRIVDIGNIENIRQENPPVNPPAPPNTDEPIVNPPVPPSTDKPRKPSSSSDTEDTIVINPPVPPSEDIINPPIPEVLNPPVPPSEEMIETPVKQIIPIPEVVKPSVSEEKNNKVKDDTLVNPPVPPKTGDSTTIIGEILLVIGAIVGLIVLRRNKNTN

SEQ ID NO: 53354 - protein, 833 aa, Clostridium difficile
MSSNKVVESYKITGMTCAACAKAVERVTKKMDGVYDQSVNIATEKLKIEYDNSKVNFDDIKQVVEKAGYGIIKEESNKKIDMKIDGMTCAACAKAVERVVKKLDGVESISVNIATDKANIDYDPSKVKLSQIKAAIEKAGYKPIEEVRNKVDVDEDKLRKEREMKSLFVKFIVAIVFAVPLFYIAMGPMIIKPIGPWPLPEIINPMTNTFNYALIQLILVIPVMIAGYKFYINGFKSLFSLSPNMDSLVAIGTLAAFLYSLYTTLQIANGQIQGMHHHQLYYESAGIIIALILLGKYLESKSKGKTSEAIKKLMGLQPKTAIVLVDGKEVETPIEEVEIGDILLVKPGTKIPVDGVVIEGYTSVDESMLTGESIPVEKNVGSKVTGASINKNGVIKFKAEKIGGDTALAQIIKLVEDAQGTKAPIAKLADTVSGYFVPIVIAIAVVASLLWFLIGGKDIVFVLTIFISVLVIACPCALGLATPTAIMVGTGKGAENGILIKGGEALESAHKVNTVIFDKTGTITEGKPKVTDIVLNNNVKEEYLIKIASSAEKGSEHPLGEAIVKYGEEKNIKFEKVDNFKAIPGAGIQVTINDESILLGNRKLMNDNNIKLGDLEEKSNILASQGKTPMYIAVDGNLSGIIAVADVVKESSKKAIEILHDMGIKVAMVTGDNAKTANAIANQVGIDMVLAEVLPEDKSKEVEKLQNQGKFVAMVGDGINDAPALAKADIGIAIGSGTDVAIESADIVLMKSDLIDVPTAIKLSHETIKNIKQNLFWAFGYNTIGIPVAAGILYVFGGPLLNPMIAAAAMSLSSVSVVSNALRLKNFKAYKRD

SEQ ID NO: 53355 - protein, 559 aa, Clostridium difficile
MSNSIPEIENADVLFIFGYNGADSHPIVANRIVKAKKNGAKLIVTDPRVTESARIADIHLPIKGGTNMVLVNAFGNVLIEEGLYNKEFVQNHTQGFDEYKEIVKPYTAKYAEKITGIPEELIRKAMREYAKGKKAMILYGMGVCQFGQAVDVVKGLASIALLTGNFGRESVGIGPVRGQNNVQGACDMGALPNVYPGYQNVTDDKIREKFEKAWGVKLSPNNGYSLTQVPNLVLKEKKLKAYYIFGEDPVQSDPDASEVREALDELEFVIVQDIFMNKTALHADVILPATSWGEHEGVYTCADRGFQLMRKAIEPQGDVKPDWQIISEISTAMGYPMNYKNTKEIWDELRQLCPSFLGATYEKIETQGCVQWPCKSESMEDKGTMYLYEGQKFSTPNGKGNLFAAEWRPPMEVEDDEYPFSLCTVREVGHYSVRTMTGNCRTLSSLEDEPGRVQINSNDAEKLGIEDDELVRISSRRGSVITRATVTDRVKEGATYMTYQWWVGACNELTIANLDPISKTPEYKYCAVKLEKLEDQELAEKCVREEYQSLKDKMTATNI

SEQ ID NO: 53356 - protein, 260 aa, Clostridium difficile
MNCINTKNLNVSYGNTDIIKNLNLNIPKGKITTIIGANGCGKSTILKTIGRIISPNSGKIYINGEDIYKKKSKEIAKDMAVLPQSPQAPSGLTVSELISYGRFPHKSGFGNSSKEDREIVNWSLEVTGIAEFKDRNMEDLSGGQRQRAWIAMALAQETDILLLDEPTTYLDLAHQLEILKLLDELNKKQGRTIVMVIHELNNAARFADHMIGIKKGKIVCEGDAYDVMTKDNLKELFNIDAEIAADPRTNKPICITYDMV

SEQ ID NO: 53357 - protein, 400 aa, Clostridium difficile
MSMLNKKTIEDIDVCGKKVLVRCDFNVPLQDGVITDENRLNGALPTIQYLISKGAKVILCSHLGKPKGEAKPELSLAPVAKRLSEMLGKEVVFAADDNVVGENAKKATEKMENGDVVLLENTRYRKEETKNEENFSKELASLAEIFVNDAFGTAHRAHCSTVGAGEFLQERVCGYLIQKELKFLGEAVANPVRPFTAILGGAKVSDKLAVINELLEKVDNLIIGGGMAYTFLKAQGYEVGTSLLEIDKVEYAKEMMEKAKNKGVNLLLPVDVVMADHFAPDATPIVTEDANVKEDYMGLDMGPKTIANFVKTIKESKTVVWNGPMGVFEFENFANGTLSVARAMAELTDATTVIGGGDSAAAVNQLGFGDKMTHVSTGGGASLEFLEGKELPGIAALDNK

SEQ ID NO: 53358 - protein, 271 aa, Clostridium difficile
MLARRGHKLYKVDLNSDLGESFGTYKIGLDEEVLKYISSANIACGFHAGDPSHMEKTVQLAKKNGVKIGAHPGFLDLIGFGRREMKITKQEAKDYTKYQLGALMAFASSNGCNIQHVKPHGALYNMAAKDKELAMGICEAIYEVDKDIILLGLYNSEMINSAKEIGLRFANEVFADRAYDNNGFLVPRSVEGAVIHDTKHAIDRVVRMVKEGTVETLTGEVIHIKADSICVHGDNPKAIEFVKEIRKRFELESIEVCPLENIEVCSSENIV

SEQ ID NO: 53359 - protein, 537 aa, Clostridium difficile
MKEQLIFNITNLVTVVFEAFVIHMFLSDFLGQKEGYIKVVRYAKLGFIICLGFCNLITLNPKITMPLIFILIFSTSFLYKGNLKTRLFTTVLLSIFFILSEIVVTSIFVLFVKEGFEIMLENNSIRVLATILSKIVFLLTCKIICLFKKDVHLDMPIKYWLPLFLIPIFSLFLSVSIFDVSKFFSLESLKFLSLISSVGILYINFIVFYLFKFIIDKTKLSMKYELLEKEIIHKEELRLSNECYKIIVEQTDSVVFEWNIKENKSFVSQAWTEKFGYNNACKNIFKEIKDKDLVHSEDKAIFEGFLESIKKKNMHNQAVYRLKKSNGEYIWCRTSITSIYNDENELLRVVGVIVDVDSDIKKYEELRTRAESDSLTNIYNKGTFEKLVEETIVMNTGDKKDALFIIDLDDFKEINDNFGHPFGDFVLKTFADKIQTSFGSKDLVGRIGGDEFVVYMQDYVTEVNLHKKAKELNRVLSDNYTDLSFSFDASVSIGIARYPQDGTSFFELFKNADRALYSIKASGKNSYCLFEEELYVQ

SEQ ID NO: 53360 - protein, 202 aa, Clostridium difficile
MYGIATALAGTQGNYRSNNLSQLERNINDIANKQVRSKGNQTVTDNGTPIIGQGDDADKDLFMKILVAQMGNQDPMNPQDPTEYVSQLAQFATLEKMSAMNEKLDVLLALSNSTLINSALSMATSLIGKEVEVSGEEKEDENIVGVVKSTYIKDGEVHLELEVDGSDKTVGVKYEKLLKIGEVDENSGEENDSSEQESPEEA

SEQ ID NO: 53361 - protein, 267 aa, Clostridium difficile
MSLIVFDYGKRTYIMGILNVTPDSFSDGGDFNNLDIAIQHAKDMVDQGADIIDLGGESTRPGHSYVDSDEELRRVIPVIKKLKQELDIPISIDTYKADVAEEALKLGVTMVNDVWGLRKDKNMASVIGKYDAEVCIMHNQDGTNYDKDIMESIKDFFKVSIEMAMSCGVKKEKIVLDPGVGFGKDFEQNIEVLRRLNELKDLGYPILLGTSRKSVIGKVLPVEPKKRLEGTIATTVLGIRDGVDIVRVHDVYENLMAARMTDAIYRK

SEQ ID NO: 53362 - protein, 331 aa, Clostridium difficile
MIMHKFIIHVLDKNSDTPILNDFEGRVNQDMVLFFQKKISKVSRDNDIRTAVFNDYSNNLIKKCCEQIIYDESSFLNNSKEIAAYLFDVMKLNATLESCDLSICLYSQKDEKKVAILKLDYNNSYTHSIEFKDDKFNIQMSKNEINIQETKAIKIGALIGLSGINDEYHLKVLDKDAEKEEANSKFVTEFLNATKVKDDKYKTKMFKAFVDSYIAHLYSDMKQGEDVRGMLLYMLREKQKLDINEFADKAIKDDLKDSFKDHIEEKGIESFNIDKKWVEKNLKNRHIKTDTGFEIKGKMEDFEDFMKYGIRHNGNGTVDIVIKNVNLYNEK

SEQ ID NO: 53363 - protein, 216 aa, Clostridium difficile
MRFFIDTANIEEIKEANDLGVICGVTTNPSLIAKEGRDFIEVVKEISEIVDGPISAEVISLEHKGMIEEAEKLSKIHKNIVIKIPMTAEGLKAVKVLSSKGIKTNVTLIFSAGQALLAARAGATYVSPFVGRLDDISQNGLDLIEEIVDIFSVNSIEAQIIVASVRNPIHVLQAARMGADIATVPLKVINQMIKHPLTDKGIDSFMKDWEGASLKL

SEQ ID NO: 53364 - protein, 378 aa, Clostridium difficile
MIEIRNVTKKIGNNVILDDISLVVETGTLVVLIGSSGCGKTTTLKLINKLIKPTSGEIYINGKPISQENEIELRRKIGYVIQNTGLFPHLTIKENIELIPRLKKEKSVEEIEKRTLQLLEMVGLDSDEFLNKYPSELSGGQQQRIGVARAIATDAEIILMDEPFSALDPITRTSLQEQLFSLQDELKKTIIFVTHDMDEALKIADKICIMKDGRIAQYDTPENILRKPANDFVKDFIGEDRVWDNPEYIKARDIMIKNPIAVNSTRTVTQGIEIMRTSKVDSLLIIDRAKTLKGIVTVKDMKDIDDKSILLADIMSSEPLHVNEGDNLVEILNVMNRNSVGYIPVISDENKLVGLITRSSLLSVLSEQFLEMEVSVLG

SEQ ID NO: 53365 - protein, 62 aa, Clostridium difficile
MKANVNQDTCIGCGLCPSICPEVFDMKDDGKSHVIVDEVPSDAEESAAEARESCPVDAIDVH

SEQ ID NO: 53366 - protein, 118 aa, Clostridium difficile
MARVKKAMNARKKHKKILKLAKGFRGSRSKLYRPANTFVMKALKNAYIGRKLKKRDFRKLWIQRINAAARMNGISYSRLMNGLKLSGVEVNRKMLSEMAIQDPEGFAKLAEVAKAKLA

SEQ ID NO: 53367 - protein, 645 aa, Clostridium difficile
MEFEKGSISIHTENIFPIIKKWLYSDKDIFIRELISNGCDAVSKHKRLVSLGEISENKSSDYKITVSVNKGEGTLKFIDNGIGMTEEEIKKYINQVAFSGAEDFFNKYKDKMEESNDIIGHFGLGFYSAFMVSKKVQIDTLSYTEGATPVRWISEGGTEYEISESDARNDRGTTITLFIDDDSKEFLDEFTVRGIINKYCSFLPVEIYLEDVERLEREAKEAEEKAKKQKEDGKEEIVDAKVIEPLNDTNPLWLKSPKDCTDEEYKEFYRKVFNVFDEPLFWIHLNVDYPFNLKGILYFPKLKNEFELTEGKVKLYNNQVFVADNIKEVIPEFLLLLKGVIDCPDLPLNVSRSFLQNDRDVSKISKHIIKKVADKLKSLCKNEREEYNKFWDDIQIFIKYGCLKDESFYEKVKECILFKTIDDEYITLQDYLEKCKDKHENKVFYVSDKEQQSQYIKLFKEYDLSAVVLNSSIDTHFISFMEYKENGVKFNRIDADLSDVLKDKNENKDSEENKEEIAKIEGLFKEAVGERVKNYSVEGLKNEDTPAMVLVSEQSIRMAEMQSRFAGMDLGMNFEEEKTLVINENSPIIKKLVSLKDDEEKKDKITLICNQIADLALLSNKELKPDELDSFVQRSNKLMSLLIEL

SEQ ID NO: 53368 - protein, 837 aa, Clostridium difficile
MEDCVVNLKKLLLLIIVITSIFTSCIFSFGINAIGNDNRTIRVAYPIQKGLTEIDEQGNYFGYTYEYLLEIAQYTGWNYEFVQVPGEINESITKLMKMLENGEIDIMGGMLYNEPMQKIYNYAGNSYGVANTVLQALYENTDIDNIMSSQDVKKIRIAVIENSDTRLKELDEYCKMNLMSPELVYCKTNDEQLEALKSGKADVLLNVSMNPIEGVRTVAKFSSKPFYFITPKGSTNLTQKLNSAINNIEQKDPYFSTTLYEKYFTPENNQMFLSDEETNYIKETEKLKVGVLLNKPPFQNIDKDTGELRGISIDLLNHICDKTGLEFELVPVKSQEDLENMTKKREIDIVAGMIYDYEYSREHNIAMSRPFLSTQYTMMINNKLNENSLNGKRIALTKGVNYYGQFEENIVWYDNLEECIEAVNKGYADYTYGEGYSMQYYMNQPKYKNVRLVPQTYKAKSICFGIIKKDKQELLNIFNKAIISISSEKMQSIVYQNTTYRQDFSLLYIMQQNPIETIFIVASLLICIIGFMAFGLHTRTSMNEKISLELKKHTQLYEMTSEYFFEYDYKQDKLIISMPEKGIETYYGLDKNDKESENGNIENERDKIRKEYNKKFFDVIKSQENGTTEMYSIMLDDTFHWIRVTSKIIYNDRKIPMYVIGKICNIDSEKEEKNRLLDKAQRDSLTNIYNAAYIRKLTAQNLLNLSTEKNGALLIIDIDYFKSINDTYGHLLGDKVLIDVAKVLDESFAKNDIVGRLGGDEFSVYINDIINKEELINKCNDVYNHIHLIKLPNGESLSISMGVVIAKPGQEYDELYQIADNALYDSKRQGRNRFKIV

SEQ ID NO: 53369 - protein, 373 aa, Clostridium difficile
MEAKKLGFGLMRLPIKDENDVTTIDMEHLNKMVDTFLERGFTYFDTAYVYHMGKSEIALRESLVKRHKRESFTIATKLPLMALKKKEEQETIFNEQLEKCGVDYFDYYLLHNIGVSHYEVAKKFDSFKFIEEKKKEGKIKNIGFSFHDSAELLDKVLSEHPEVDFVQLQINYLDWDNESIQSRKCYEVAEKHNKPVIVMEPVKGGTLAKIPEKAEKLLNDYNPDMSISSWAIRFAASKDNVMMVLSGMSNMEQLLDNTGYMQNFKPFVQEEYNIIDEAVEIINESILVPCTACQYCVEGCPKNIAIPNYFALYNAEKQALNTGFSTQMVYYNNYTKTYGKASDCIECKQCEESCPQHIKIIDALKNVAETFEK

SEQ ID NO: 53370 - protein, 453 aa, Clostridium difficile
MKGDNMKEQIKEKVNSLQDEMISSIQESVKIPSVISEATENCPFGENVDKALRGILDLCKSLGFKTVYKDGYYGYAEIGQGEKMIGILGHVDVVPEGDLESWNYPPFEAVLEDGKLYGRGTQDDKGPTISAIYAVKALMDLNVDFNKRIRFIFGADEENLWRCINKYKENNEEIPNYGFTPDSRFPITNAEKGLLQVHLTCDSKSDIELSVGKALNAVPGKAIYIGKYSDKLKKELDKLNFEYTVEGNKICIIGKSVHSAASDTGINAVARLCIALNNIGIDSNIIKFLAEVIGEDANGNNIIPNCKDDVSGKLTVNIGRVTIDNEKEFAGIDVRIPVTYKKDDFVKELKKMTDKYNLNYEEYDFLDSIYVPEDTLLVKTLRKVYEEETSLDGTPLSSGGATYARALDNCVAFGAIFPGKPETEHQANEYLIVEDIIKATQIYALSIYELLKI

SEQ ID NO: 53371 - protein, 150 aa, Clostridium difficile
MKGMSLKQKLQEDLKSSMKNKDTVRKSVVTLIRASIKQYEVDNRVELDEDGIIDVIAKQLKQRRDALVEFEKAGREDLIKETEGEIEVLKEYLPQQLSEEELEEIVKSTISEVGATSMKDMGKIMSVIQPKVKGRADGKLINKLVKQNLQ

SEQ ID NO: 53372 - protein, 218 aa, Clostridium difficile
MELQDTIFKRQSVRKFKNQDVSDEDILKMIKAAGAAPSGKNIQNWHFVVIKRRDLMEKIADVITKKQQEILVEMDKVSVDKANRFRKFVKNFTLFYLKAPVLVLVFTKVYNPSGYYELELIDAPKETIDKLFIRNPGMQSLGAAIENFTLSAIELGYGSCWLTSQNYAADEIEAVLEAETGFEKGEYFLGAMLALGVPEDNLKSPSKKPVEEICTFIK

SEQ ID NO: 53373 - protein, 278 aa, Clostridium difficile
MLTELHCHTSISDNNFTTEEIIKKAAEKNINILAITNHDTLSGLDEALVLGEHYGITIIPGIEISAYDYKNRKRVHILGYNIDLNSQEIKNLCNPMVCDRHKASVKMVNKIIDLGYKISLEDVKKYSSKTGIFKQHIMKALIDKGYTDNIYSNLYKELFHRGNGKVYVSLKYVDYRDAIKAIKNSGGICVLAHPGQMDNFSAIEEMVKVGLDGIEVYHPSHNKELEKESLSYAKKYNLVVTGGSDYHGFYSQHNYELGSKSLNKEDLFKFRLALGGVL

SEQ ID NO: 53374 - protein, 61 aa, Clostridium difficile
MAKLQIKLVRSVIGTTPNQKKNVEALGLRKREQVVVKEDNAQTRGMINKVSHLLEVTEIAE

SEQ ID NO: 53375 - protein, 762 aa, Clostridium difficile
MAVNRRRNMNLDTLNPAQREAVEKTEGPVLILAGAGSGKTKVLTTRIAYLIEDKGVQAPNILAITFTNKAANEMRERVEQNIGPETKDMWISTFHSCCVRILRKDINKIGYNRSFVIYDSADQVTLVKDCLKELNLSDKVFEPKAVISAISGAKDKLYTPKQFKDINMADNRMVKIADIYALYQDRLKRNSALDFDDLILKTVELFKANDEVLAYYRSRFRYIMVDEYQDTSKAQYELIKLLAREHQNICVVGDDDQSIYGWRGADIRNILEFEKDYDNVHVVKLEQNYRSTQVILDAANKVISNNIERKRKKLWSEKKEGELIKIQLTGSEIEEADFIADSIAQIARKENRPYKDFAVLYRANAQARPVEDALNRSQIPYNIYGGTKFYERKEIKDLLAYLRVIQNPQDDISIKRIINVPRRGIGLRTIEKIEDRANLKQESIYSVLIDIETNSDISTKARASISGFVDIIGTLRTIKEVYPVSKLIEKVLDTTGYMDELVEIRNKNEKDLTGKGEEAQDRIDNLREFISIALEFESSNDDTYENKDLETFLTSIALTSESNDEEDNDRVSLMTIHTSKGLEFPVVFLTGMEEGLFPISRAIKSMSDSQIEEERRLCYVGITRAKEELYMSLTEKRTLYGKTNVAIASRFMEELPEECIERLYKVKKELSYSKASYNMLDKYTKKYMSTISKSKVADKVNATIKDSNKETNPDDIKLGSKVHHPKFGVGTVVSIIGTDVTIAFDQQGIKKINKEYTTLNIL

SEQ ID NO: 53376 - protein, 234 aa, Clostridium difficile
MNQAHYYLIGNFKISETILVSWGIMAFLAIASYFLTRNLKKVPTSKVQIFLEFAVGGLAKMVTDVMGKNTVKRMPYMIPYIGSLFLFFACSNLSPLLGLRSPTTDLDTTAAWAMITFFMIYFAGVKFKGLSYFKELAQPLAIMLPINIIGELARPISLSFRPFGNILGGTIIMGLFYQLLGFISSLIPGLSIPIGEILIPVPLHLYFDLFAGLLQAYIFIMLTMVFISSAGELD

SEQ ID NO: 53377 - protein, 84 aa, Clostridium difficile
MERGRRKVRIGRVVSDKMDKTIVVAVEEFVRHPLYNKRVKRTKKFKAHDEKNICNIGDRVKIMETRPLSKDKRFRLVEVVEKVK

SEQ ID NO: 53378 - protein, 363 aa, Clostridium difficile
MKTVCYLADGSNPHTLKWCSFFKNKGYDIHVISLNGGHMEGIKIYNFGSNVEELKNENISKKTGYLGSIKQIKKLVNEIKPDILHAQYASSYGFIGSLLGYHPYIISVWGTDIYDFPNNGFIQKQIIKHNFRKADYIFSNSRDMAKEANKYTAKHVDVTFFGVDMDRFKPMEVEKEDAFVIGIIKSLEKKYGIEYLIQAFKMLKDEYKDKKIILKIGGSGSQMDNLINLAKELGIENDVQFLGRISPENVSKTFNSFDVTVFPSLREGFGVAAIESEACEVPVIVTNVGGHPESVWENETGLIVEPKQPEEIKNAIIKLMENDELRLNMGKKGRQFVRENYEVNLNFNDIEKIYDSIFDKYKK

SEQ ID NO: 53379 - protein, 343 aa, Clostridium difficile
MKAVVKTKPGYDNVEVLEVEEPKATGDKVKIKVEYSGICGSDIHSFKGEYANIKAPVTLGHEFSGIVVEVGEDVKNIKIGDRVTSETTFATCEKCIYCETKDYNLCPTRKGIGTQVNGSFAEYVLSREESIHVLPENVSLLSAALTEPLACCVHAALEKTTIESSDTVLIIGPGPIGLLLAQVVKSQGATVIMSGVTKDKERLEIAKNLGVDRTVNVMEESLADVVNEMTDGNGVNKGFDCSGFMPAVNEALRLLRKKGTFVQVGIFAKKLNEMDQEAIIQRELQYIGSRSQKPSSWITALDLMASGKVNTEALVTRTVGLDEFKEGITALMNGEEIKVAVKS

SEQ ID NO: 53380 - protein, 240 aa, Clostridium difficile
MAKKQRIDKILSNLGYGSRSEIKKYCKQGSVVVNGSEVSNPGTQVDTENDEILFNGEEVIYREYIYLMMNKPDGYISATTDKYDPTVLDLIDLSYLAFEPFPVGRLDKDTEGLLVLTNDGKLSHRVLSPKKHVPKTYYAKIDGVVTEEDVEAFLEGVVLDDRYKTMPSQLNILKSDDESEIELTIHEGKFHQVKRMFESVGKKVVYLKRLSMGNLKLDESLELGEYRELTDEEVKLIEER

SEQ ID NO: 53381 - protein, 286 aa, Clostridium difficile; identical to SEQ ID NO: 52975

SEQ ID NO: 53382 - protein, 235 aa, Clostridium difficile
MNIIGNFLGLILKVIFEFVNHYGISIILFTILVKIILLPLTIKQTKSTKAMQDIQPRIKEIQEKYKNKPEKQNEEIVKLYGEAKINPLSGCLPLLIQFPILIGLFSVLREPVAHGVFANKAAFLAADNGFLWIKSLTSPDYVLAVFSGASAYVMQKVMTPKDQLQGSMKVMTYVMAGMSFYWGFIFPAGLTLYWTVSNLFSIAQYYLIMNPLKAKLAANSKEEKVNEKKPKINKK

SEQ ID NO: 53383 - protein, 624 aa, Clostridium difficile
MDGNISIYYKGDISKKEDIKFKIKESVNNTRLSSRIEYKDEEKTFDFERFNVIDAIYGNKPFEKDGKVIVFNGNIYNYHEIKEELIKKGHNFTTNDDIEVLLASYIEFGKNCVHKIKGMFNFIIYDRENESIFGARDLFGIKPLYYINKENAIIFSSEYKFLLEYMKNLNINERSLQSYFSFQYVLPEDTMIQGIRLIPAGHYFRVENGILSLKRYNKLEFRSSTKFFYTKNHLGNRDVNEDDIRNIVVDSIVTHMEEEKEIGTFLSGGIDSSIITTVASQINPNIKSFSAGFSVKGYSELEVAKKTADKLGIENIQINITQDEYIKSLPNVIYSLDDPIADPSEVGLYFLIKEAGKHVKVALSGEGADELFGGYNIYKEYSTMKSVVNSPTYIKSILGRVSELMPNIKGRNYLYRATTPLEKRYIGNAKVFENSEVKRFFFKYKEKNIYEYLLSNLYRDAQKNNYDYISKMQHIDVNTWLQGDILQKISKLSTAEQVELRVPFLYKDVFDVAKNLRMEQKINKNNTKVLLREAFREIVPEHVVQRKKLGFPTPIRVWLKDSLGDIVKETIYNSNVDEFIDKKYAIKLLDTHLKGHRDNSRKIWTIFTFCLWHQLFIEHKNVEY

SEQ ID NO: 53384 - protein, 277 aa, Clostridium difficile
MSWKHIKIPNGDTMIFCNSFITRKSSMNIVVTHTPIVTTLEMQKAYEPLAKHNVNIFAFDFSGTGKSDGYEKDFSRNSIVKDLDSVITYIEKNYSSNIHLYGNTGIGGMFAQYYACSDNKLKSFAQFACVDYKNTTGVGYTYLTVKLLNFFFKFLPNFHITVKPPKYKGYNEVYDNEFYKIFEKKNPHIWKNSTKIINTMLECFIAKDSKIKDGVNIPTLVFKTLHDRYFKTQYFDSYYNSLKCKKKLVEINNVHNSYYIDSEKFCQEAYDWFVENQ

SEQ ID NO: 53385 - protein, 1145 aa, Clostridium difficile
MIRAKSLKNVLSIVLIFLFTIISFSDFAFKTNVQEEENSKINLREISLQSSNAIKIKLDSSLSFIKSVANMVSYFNTIDNSKIVPLLANISKESDFQRISIVSPDGISHTSDGKIINVSKYQYFKKAIKGESNISEVVKSPIDGKDTFVIATPVFNKNNKIIGVLYGSYYNDKLAEFIDITSFNSEGYIDIFESSGQFVLKSSHTNKLIKSSSNIYDIFKKASFDDGYSYKKIYEDTKNNKSGFTSYEYKGENRYATYTPIGVNDWYVISVIPQYTVRRNIDKINQLAFSLIFKVFLLFIMLITYIIYKNNKSQKDILKANKEISSITNSIPGGVQKCTLGETCNINFLSDGFIELFGYTREEIKTLFNNDFYSLIHKDDVERIKKEIFKQLYKNKTVELEYRIITKNGNTVWVLDKGELITEPDGKEYFCCVTVDITRTKQLEQEMEQKNLELEMISENVLGGIIITEFNDDFTIKYANSGYLSMIGYTREQLENELKYKACNLVFYEDRKKALESIQHQLNTKGIAVYQHRIRRRDGNIIWVSIKGRLIVDDDGIEKGIWILNDITDLKNAEQKLKINEERFRIALKQTSNTIFEYDIKTKSLLNTSKELDKYNIYKITKNVPYSLVELGVIHKDFSDDFINMYENVINGAKKASCVVKMKLPDENYIWNKVTLTTIFDEDGNPVRAIGIQEDISKQKEAEIRYNQEGKYHSAILSEAMITYEINVSKDTFIKGNESWQKPFGIKPDNNYSQMVKTIANSIVHKDNKETFLNTFLCENLLDAYKNNVTEIKLEYRRMNQENKMIWVICTMHLIKDSITNDIKALAYVKDIDKQKNEEIRLKLKAERDTLTGLYNKGTTEKLINDFLNSEEASLGMHAFLIVDIDNFKSVNDNLGHVFGDKVLFEVSKNLKPIFRKDDIVGRIGGDEFIVFLKNIQSFENIKKKAEKICDIFRNSYTENKKTYKISGTVGISFVPEHGTVFEELYKKADIALYYAKSKGKDKYALYNDCIYQNELENNISDNNIKLADKCEKSKPVLKEILDSIDNYIYIVNPNTYELLFVNNKVSRLDLEIKLGETCYKSLLKSDRPCNNCPLNGLEENKHSKFKIETNTFGKNISIASWINCIDGEYNCLIECIDSSLYKNK

SEQ ID NO: 53386 - protein, 295 aa, Clostridium difficile
MKNYVCIDVGGTSIKYGFIREDGFIIDKSSLDTEAKEKGGEGILAKIKDIVKKYIEENEISGICISTAGMVDPVEGKILFALEELIPNYKGMQLKKEVEKEFNIKCEVENDVNCAGLGEMWLGAGRGATSSICLTIGTGIGGCIIINNKLINGFSNSAGEVGYMNVNGSSFQELASTSSLIKKVAKIKNLNENDLNGKIIFDLAKNNDEDCLKELDNMIKSLAVGIANICYVINPEVVILGGGIMAQEKFLKPKIDKALKEVLIERVYKNTNIEFAKRQNDAGMLGALYNFLNKI

SEQ ID NO: 53387 - protein, 646 aa, Clostridium difficile
MSKTRVYQIAEELNISNEELINKLAELDINVTDKDSVLEGEELELALEMLGEDLSQENGNVIEIDGKLTVQVLATKLDKSPSEIIMKLMKMGTMATINQEISFEIAALAAKDYGFELTVAESDDTEALEIEALMEIEEDKEEDLKPRPPVVTVMGHVDHGKTSLLDAIRKTDVISGEAGGITQHIGASEVKINGHKIVFLDTPGHEAFTSMRARGAQVTDIAILVVAADDGIMPQTVEAINHAKAAGVPLIVAINKIDKPGANPDKVKQELADQGLLVEDWGGEVIAVPVSAKKKEGIDTLLEMVLLVAEMEELRANPNKRAVGTVIEAELDKGRGPVATVLVQGGTLTVGDPIVAGVACGKVRAMINAKGKRVKTAGPSTAVEILGLSEVPQGGDQFVEVPTDKIARSVAARRQQIVRDEMLKSTQRLSLDALFSQMSEGSIKDLNIVIKADVQGSVQAVKQSLEKLSNEEVQVKVIHGGVGAVTESDILLAAASNAIIIGFNVRPVPGAESLGEKENVDIRTYTIIYKAIEDIQAAMTGMLDPEYVDEETGKAEIREIYKISGVGTVAGCYVTNGKIFRNCKVRLVRDSIIIHEGELAALKRFKDDVKEVNSGYECGMSFVNYNDIKEGDIVEAYITKEVERKL

SEQ ID NO: 53388 - protein, 502 aa, Clostridium difficile
MRIMKGKVYLVGAGPGDYKLMTLKGLECIRKSDVIVYDRLANSSYLREAKPDCELIYVGKASSNHILPQEDINRIIAEKAKEGKIVTRLKGGDPYVFGRGGEEAETLVDEGIEFEVVPGITSAIGGLCYAGIPITHRDHASSFHVITGHLKGDDSGELNWNALANNKGTLVFLMGISNLEKISENLMKEGKDKDTPVALISWATRYNQRVVTSTLENVYETAIKEEVKPPTLIVVGSVVGLREKLNFFESKPLFGKSIAVTRSRNQNSVLVEKIMDLGGNPIEIPTIKVEKIQNNINLENEIKNINKYNYLILTSKNAVEIFFEKIYEMNFDLRILSNLKVCAIGSATSNELKKRGIIADIVPKKFVAESLYEELAPILNDDDNILIPRAENARDYLVDKLKAICEVTEVHIYRTVIDEEKKGEILDILNSNDIDYITFTSSSTVNNLVEIIGKENIKILEKIKTLSIGPITTETINSLGIKLYKESATSTIDSLVDLIIKN

SEQ ID NO: 53389 - protein, 300 aa, Clostridium difficile
MIIMLEIIVPATSANIGPGFDCLGIALNIYNKFYVEEIESGLEIEGCEDAYKNENNLVYTSMKYFFDRVKPEKIPAGIKIKIQSEVPICRGLGSSASCIVAGVIAANALSGANLDKNQLLNIASEIEGHPDNVAPAILGNMIVSVTDNENIHYDIIKIPEELKFCAMIPNFKLSTEKARGVLPKEIPYSDGVFNVSRVALLISALLNKNFDLLKVACQDKLHQDYRGTLIENYNDIVEKSEQLNSIGVFLSGAGPTIMSLIKENDDSFVDNMKNYLQKLKSDWEIKELCCDSNGAVLNII

SEQ ID NO: 53390 - protein, 273 aa, Clostridium difficile
MGYKLIVTDMDGTLLGNNHKVTDENKTALQKVIKSGINVTLATGRAFDSAKCNVDFLKEDMPIIACNGSLIREQNGNIIYSNKIDTRTCLNILDVLDKYDIYYQCNSIDSMLSKKIEGREDRLSVFLGSETEVIVKDDLREEIFKKDILKFVIIEEKNPSILDEIRKELRKVQGIKITSSWPNNIEVMNEGVDKGNAVKILAEKMNIDREDIIAFGDNYNDIEMIKFAGLGVAMGNAEELIKQEADYVTDTNQDSGVAKAIYKFLELKESLSS

SEQ ID NO: 53391 - protein, 432 aa, Clostridium difficile
MNYMKTVAIVGSQWGDEGKGKVIDYLATQADVVVRGQGGNNAGHTLVVEGKKYALHLIPSGVLNPNTVNIIGNGIVFDPKGFLEELEMFKTDNISTENIKISDRAHVIFPYHKELDALSEEARGDLKIGTTKKGIGPCYMDKTERSGIRICDLMDKDKFAIKLKAQIDAKNEIVKNIYGKEELFDFETIYNEYLGYAEQIRKYVADTSVIVYDAVRAGKKVLFEGAQGTLLDLDLGTYPFVTSSHPTSGGFAIGAGIGPNMIKDVVGIVKAYTTRVGEGPFVTEQINETGDKIREQGHEFGVTTGRPRRCGWFDAVIVKYAARVNGLTSISFMLLDVLTGFDKIKVCTSYKMGDKIITDFPASLDDLAKCEPVYEELDGWNEDITQIDNFDDLPENAKKYVAKIEELVGVSVDMVSVGPNRAQTIIRRNIFA

SEQ ID NO: 53392 - protein, 464 aa, Clostridium difficile
MDAKKVKVPVREQEPAVRATNFDEVCLGYNKEEAMAEANRCLACKKPKCVGGCPVGIDIPGFITKIKEDDIEGAAKVIAKSSSLPAVCGRVCPQESQCEGVCILGIKSDAVSIGKLERFVADWSKENDINLSDTEPKKNQKVAVIGSGPAGLACAGDLAKKGYDVTIFEAMHEPGGVLTYGIPEFRLPKQAVVQPEIDNIRKLGVKIETNVIVGKTITVDELIEDEGFEAIFIGSGAGLPMFMNIPGENANGVFSANEFLTRVNLMKAYRDDYDTPISSGKKVAVVGGGNVAMDAARTALRLGSESYIVYRRSEKELPARAEEVHHAKEEGIIFNTLTNPKEILVDENGYVKGMVCIRMELGEPDDSGRRRPIEIEGSEFVLDVDTVIMSLGTSPNPLISSTTKSLDINKKRCLITDENGQTSKEGVFAGGDAVTGAATVISAMGAGKTAAASIDEYLKAKVNA

SEQ ID NO: 53393 - protein, 253 aa, Clostridium difficile
MEYTVQKLSKLAGISTRTLRYYDEIGLLKPLKINSSGYRIYGQNEVNKLQQILFYRELGINLENIKNIINSPNFDSLSALKEHHNKLLAKRKQIDLLIENVTKTIALKEGKYTMTDIEKFEGFKEKMIDENEKNYGTEIREKYGKDIIDTSNKKLKNMSKQDYENWQNLNIEIISKLKKAFKTGDASSELAQEVAKLHHKWLSYTWNTYSKEAHSSLAQMYVYDERFTSYYDREQPGLAKFLRDAIVIYTRDK

SEQ ID NO: 53394 - protein, 466 aa, Clostridium difficile
MGELKMKIVVVGGGPGGYVAAIKASMLGADVTVVEKRRVGGTCLNAGCIPTKALLASSGVLNTVKEAKDFGIEIDGTVKPNFTAIMERKNKVVNQLISGIEFLFEKRGVNLVNGFGKLIDKNTIEVTKDDGTVETIKADKIILANGSVPVVPRMFPYDGKVVITSDEVLGLEEIPESMLIVGGGVIGCEIGQFFRALGTEVTIVEMVDQILLNEDKDVAKQLLRQFKKDKIKVITGIGVQTCEVVDGKAVATLSNGKVIEAQYALVCVGRRPNLDNSGVEDIGIEMERGKVVVNEHLETNVEGIYAIGDIIDTPFLAHVASKEGIVAVENALGKTKVVDYRAIPRCVYTEPEVAGVGKTEKQLEAEGVEYNVGQFDFRGLGKAQAIGHFQGFVKVIADKETDKIIGAAVVGPHATDLLTELSLAVHLGLTVEQVGDAIHPHPSLSEGLMEALHDVHGECVHSVPKL

SEQ ID NO: 53395 - protein, 843 aa, Clostridium difficile
MSLKSLKIKENLYWVGSLDPDLRVFDIIMYTPYGTTYNSYVLKGTEKTVLFETVKDKHFDNYIERLNDLNIDFEKIDYIVVSHTEPDHAGSVEKLLDLAKNAKVVASETAIKYLKEIVNKDFEYVAVTDGDTLSIGDKTLEFFSVPMLHWPDTIYTYIKEDKTLVTCDSFGSHYSNDKIVNTLDENEEKDYLDALRYYYDCIMGPFKPSMVTAIEKIKDLDIDTVCPGHGPVLTENPRKIIDLYYNWSVNEQIKLEKEVTICYVSAHGYTKIMAEAIKAYIEKNSNYKVNLFDVIEHKQEDILAKIAVSQGVLFGTPTILGDALKPIWDILISLNPVLHGGKVASVFGSYGWSGEGIENAMERISQLRMTAVKPFAVNFKPSNEEIDKLHSYTGKFLDKLNSTFGSKKKTKKFKCVICNEVFEGDSAPSVCPVCGAKEDQFIEVEEDEVTFRKDTDEYFVIVGNGAAGFYAADAIRKRNKTCKITMISNEDELTYYRPALSDGINEELGSDFYMEDKDWYDKNNIVVILGTNVDKLDEVNKTIIVNDGAIKFDKLVIATGSRNFIPPIKGHDLENVFTLRNIKDLYSVKEALEKSKKVVVIGGGLLGLEAAWEFRLKGLEVVVVEAMDSILSKQLDKEGSKILEQCVRDTGIDVRLGVAVDGIEGDVKAQKVVFKDGDSVDCDMVVFSIGVRANTQMVQDTSVKIDRGIVVDKTLQTNVKDIYACGDVAQVGNISLAIWPSSVEMGKIAGANASGDNLTFESEVYPVSLDAMNVKVFSIGNIQNFDKEISSKDEGQRIYKKLFMKDGSLVGAILINDLSCTVKLIRLISEKGDFEDIMKADIL

SEQ ID NO: 53396 - protein, 259 aa, Clostridium difficile
MKMRKVALVVGGGRSLGEYLSKHLAKVGYDVAIADLNEDNAKKVAEEIKTEFGCKSVGYSCNAIDERQVISTVKAIENDFDRIDLLVYNAGVAVSKKITDFGYKDFKFIVDVNLNGYFLFAREVSKVMIAKGIEGRIIQINSKSGRVGSKHNSGYSAGKFAGVGLTQSLALDLAEHKITVNALMLGNLLDSDMFESLIPQYAVKLGIPESEVKQVYIDKVPLKRGCRFIDVANMLTFYASKEAEYCTGQSINITGGQVM

SEQ ID NO: 53397 - protein, 264 aa, Clostridium difficile
MYTIGQVSKFLGISRDTLKFYEDKGLVNPKKNDENGYRIYNQVDIYDIATINFYREIDIEIKKIQEIRKSKSINNLELLLEEKEQIILKEIEYKKLLLKKVQLVKEDCDKIKTYFGKYTIKEMKPLEVKGKIKHVTNYEEYEALKENTNNLKKAVTLTDLRRVINFNEEGIIEEKFIIVREVDDYNKIIEGEVLSHPNCIYTIIEDGRWSTGGENIDNKVEDRLREIAIENECELLGIVYVNILLTTYEEGIERIFLEIYAPIK

SEQ ID NO: 53398 - protein, 484 aa, Clostridium difficile
MKLNDIIQGLDIINVKGELNIDINNVQYDSRKVTKGTLFICIKGFVSDGHKYIKDAIEKGASAFIVEEDVAIKGCTFIKVKDTRKDMAKVADNFYNHPSQKFNVIGVTGTNGKTSITTILNEILTLNKNKVGLIGTIKIFDGEKDIVSNSTTPESIDLQYHFNNMLDNGCDYCAMEVSSHSLALNRVDETDFKLGIFTNLTPDHLDFHKDLEDYRKAKEKLFFKTTMANIINIDDEGGKKIYENIKGINVPCYTYGVDTKADFMARDIKSDSDGVSYRLITPSYEEVIFIPVPGMFTVYNTLAVIAACYVLGIPKPIYKEGLRLSNGVSGRFETVPNDKGISVIVDYAHTPDALENVLKTTQQFAEGKIISVFGCGGDRDTEKRPLMGAIGQKYSDLCIITSDNPRTEEPEAIIKDILEGIDKKKENYHVVVDREQAIAEAISMAKKDDVVIITGKGHETYQIIGKVKHHFDDKEVANECLSKM

SEQ ID NO: 53399 - protein, 430 aa, Clostridium difficile
MEGIKVGMLKKLCSLAMVAIMTTTLITGCSSGNGKDSKKDGEKEKLVLWMPPVENNMKEVWDPILDKFEEKNNCEVDLQIIPWDNYSEKFATAISAGEGPDVGYMYAEMYPQFIESGAVEDLTNYATKEDKEQSIYIKTSEMMGGMYGMPFQAANPGVLYYNKDILEKLGEKPPNTWEDFKRICKKATQDTDGDGKIDQWGLAQGWGAKTFGNLNWNWYPYLWQAGGDIFNDDLKSVKFNDKSGLEAAKFLKELQAYVPEDSLSKDSNEMIESVFGPGKAAFTIMLSSAATSVFDESFPDLNWGFVTGLEDKKAATFGAVDHLSLMSSAKNKELAYKLIQHMLSVESMTEFHKAIPRAPITKGEPYQGDERFKEMVENDKNVYRPLVVGPHGVEIYEYLWKELQTMISGDKTPKQALDDAAKYSNDLLAQ

SEQ ID NO: 53400 - protein, 593 aa, Clostridium difficile
  MISC_FEATURE (466)..(466): X=any amino acid
  MISC_FEATURE (471)..(471): X=any amino acid
VKVYNTLTRTKEEFVPLEEGKVKMYVCGPTVYNYIHIGNARPFIIFDTLRRYLEYRGYDVTYVQNFTDVDDKIINRSHEEGISPEEVAAKYIKEYFVDCDGLGIKRATVHPQVTDNIQQIIEFIKELEDKGYAYAVNGDVYFDTNKFEGYGKLSGQKQEDLEAGARIEVNDQKRHPMDFVLWKAKKEGEPGWDSPWGEGRPGWHIECSVMSKRYLGETIDIHAGGQDLTFPHHENEIAQSEARSGKTFSKYWMHNGYININDEKMSKSKGNFFTVRDISKLYDLEIVRFFMLSAHYRNPVNFSDEMLNQAKAGLERLYNTKEKLEFTLSNLVESPLTEKEVELVKELDDFRQKFIDAMDDDVNTADAVSVIFELAKLINSNVDENSSLEFAKKCLDEFNELTGVLNIVNKKKDTVLDKDIEELIQKRTDAKKNKEFQLADDIRQQLLDMGIVLEDTRQGVKWKRIXKWKNXISYYSPLVLAYLGDTVYETYIREYLIRQNTQRKVNDLHKLAIKYVKAKAQATIIHEIEIELTEEESKIYKRGRNQKSNTSPKNADIIDYKHATGFEALVGYLYLNNEIERLQYIINKGIKII

SEQ ID NO: 53401 - protein, 480 aa, Clostridium difficile
MRTIRRVLALGLTLAIFLINVPNVDALTSDTIKGNNIYETAGLIADKKSYDTAIMVNMDNSIADGLSASGLAGAVDAPILLAQKNKIPNETKQRLKNVKKIYIIGKELSISKSVETELKNTGAQVTRLGGDDRIKTSYSVAKEVNGIKKVDEVILTNAYKGEADTISAAPVSVRDIAPIVLTDGKSVPFSTSNVKTYAVGGSISMSTSLVNKTNAKRLGGSDRYDTNKKVIKEFYPDASEFYLSDGYDLVNALTGSTIAKENPIVLVSESSDKSILAGADKITRLGSISDSVYNKCVSAAQNNGDSSTKGESPMKNETSILGQPTASLEACLKWAKSKKANDLFIELIPILYDTAVQEGVNPVLAVAQSAKETGFCNFGGVLDASFKNPCGLKTSVGGSDTDKNAHSRFDTWEEGILAQIQHLCLYAGQDGYPLSNPVDPRHEKSLFGKAKTVESLSNNWAGGQYGQDLVRMMGEIEATK

SEQ ID NO: 53402 - protein, 416 aa, Clostridium difficile
MSKYEEKRQLKCSFCGKNQDQVRRLIAGPNVYICDECVELCDEIIQEEIEDTIDEDTTSLPKPKEMMEILNDYVIGQEKAKKALSVAVYNHYKRIYSKKSSSKDIEIQKSNILLLGPTGSGKTLLAQTLARTLNVPFAMADATSLTEAGYVGEDVENILLKLIQAADFDIEKAERGIIYIDEIDKIARKSENPSITRDVSGEGVQQALLKILEGTVANVPPQGGRKHPHQEFLKIDTTNVLFILGGAFDGLEKIIQKRGGDKTLGFGAKIESKKELDLGKLYEKVLPEDLLKYGIIPEFIGRIPVLATLELLDEDALMQILQEPKNALVKQYKKLLELDDVELEFEEGALRAIAKKAIERNTGARGLRSIVESVMMETMFEVPSRDNIKKVIVTEKSVNEDSVNPIIVLKDQEESA

SEQ ID NO: 53403 - protein, 269 aa, Clostridium difficile
MDKILLSNLGFYGYHGVLKEENFLGQKFFVDMELYIDSREAGLSDDINKSVSYAEVYNVVKDITENKQFNLLEALAENIAEEVLNKFILINGVMVRVRKPEAPVNGIYDYFGVEIRRARMNKAYLGIGTNMGDRFDNLSRACELLKNSDSIYKVKESSLYETKPWGYTEQADFLNMCVEIETEFEPYELLEYCQEIERELHRERIVHWGPRTIDVDVLFFNDVVSTDERLTIPHPRIQDRAFVLIPLMDLNEELIINEKTIKEHLNLLS

SEQ ID NO: 53404 - protein, 254 aa, Clostridium difficile
MKREVKRTKALIYSVLFFSLLLVLIFVFVYGIKYICSKSDNSKMPIYKVDTNEKKIALSFDVAWGTDNMDDILKILDKHNVKATFFLVGSWVDDNEEIVKAIDEKGHEIGNHSNTHANLKEISKEDITKEIETTSEKIYNITGKRTNLFRPPFGDVNNKAMDICSDLGYKVIKWDVDSIDWKELGPNHVIEKVIKESQPGSIVLFHANINDVDNYLDTIISRLKKDGYSLVKISDLLYKDNYVVDSNGVQKTKN

SEQ ID NO: 53405 - protein, 789 aa, Clostridium difficile
MLMEQNYTKIDHELPLIPLRGLAIFPYMILNFDIGREISLKALDQAMMDEELIFLTSQKEAEVDEPGEEDFYHVGTICKVKQMIKLPGDTVRVLVEGVSRGRVKKIEQEDGYFRAVIEEIVFDSDNLDSETEVEIEAFVRNVFDAFEEYINIGNRVSPEILISLADIEDVDRFIDTIAANIYLKSSQKQEILEEFDIRKRLELIYSILLEEIDILKIEKKITLRVKKQMNKVQKEYYLREQLKAIQKELGEEEDINSEADEYREKLKKIKAPKTTKEKIEKEIDKFSKISSMSPDVSVSRNYLDTIFSLPWNKETKDKLDITKAKDILDEDHYGLEKVKERILEYLAIRTLAKSLKGPIICLVGPPGTGKTSIVKSIARALNRKFVRISLGGVRDEAEIRGHRRTYVGSIPGRIINGVKEAQTKNPVFLFDEIDKMAADYKGDPASAMLEVLDPEQNKDFVDHYLEIPFDLSKILFVTTANSLGNIPRPLLDRMEVIEVSGYIEEEKLNIAKKYLLPKQIKEHALKENFIKIDDETLRSIINHYTREAGVRTLERTIGKICRKVAKKYVEDPTLEEVVINKSDLETYLGKDMFKYQLAEVNPQIGLVNGLAWTEVGGVTLEVEVNVLKGKGEIVLTGKLGDVMKESAKTGISYIRSIVDKFDIDPEFYKTNDIHIHIPEGAVPKDGPSAGITMALAVISALTKRPVPGNIAMTGEITLRGRVLAVGGVKEKLLAAHRAGITKVLIPKECEADLDEIPENVKEKMEFVLVEHMDEVLEQALLKSGENNEN

SEQ ID NO: 53406 - protein, 421 aa, Clostridium difficile
MKKLPIKTVVQRLLNLQEEGKSATLLGIGPMSPNLLQASFELAKDDDFPLMFIASRNQVDADELGGGYVNGWNQETFTKDIKEVADKVGFDGLYYLCRDHGGPWQRDKERNDHLPVDEAMELGKKSYLADIEAGFDLLMIDPTKDPFEIGKVIPLDVVLERTVELIEYCENERKRLNLPDIGYEVGTEETNGGLTSTETYETFITRLKVELDNRGLPMPTFIVGQTGTLTRKTEQVGTFNFRNAYDLAQMAKKYGVGLKEHNGDYLDDVTLLEHIPSQIIATNVAPQYGTEETRAYLKLAEVECKLEKEGLVEKTSNIRHVLLVNAIECGRWRKWVVGEQKNLTTEEIFKDEVLSNEILDIAGHYTFNNDDVKKEIEVLYDNLSKNNIDGQRFVVDHIKRPLRDYAECYNLKGVTTRILNK

SEQ ID NO: 53407 - protein, 292 aa, Clostridium difficile
MKNNFYHMNTFMSMDKNYEESNLIVFGVGFDGTTSNRPGARFASSSMRKEFYGLETYSPFLDLDLEDYNICDYGDLEISVGSTEQVLKEIYQETYKIVRDSKVPFMIGGEHLVTLPAFKAVHEKYNDIYVIHFDAHTDLREEYNNSKNSHATVIKRIWDIVGDNKIFQFGIRSGTKEEFKFATEEKHTYMEIGGIDTFENIVNMLNGKNIYLTIDLDVLDASVFPGTGTPEPGGVNYREFQEIFKIIKNSNINIVGCDIVELSPDYDTTGVSTVIACKILRELCLIISDKIK

SEQ ID NO: 53408 - protein, 144 aa, Clostridium difficile
MNQVVLVGRLTRDPELRYIPGTGTPVASFTIAIDRDYVKKDGSKETDFIPVEVMGKSAEFCANYITKGRLVALQGSIRVDNYQTQSGEKRTFTKVSTRSVQALDSKNKSENSYRESAPAFEPSFEPQGLDPQGFQAIDDDDIPF

SEQ ID NO: 53409 - protein, 494 aa, Clostridium difficile
MNLMNYNKKNEVLNLIQILIEGIDYIKNNNLSESIVNSSLEAINYMKKYINNSGRSNKNLLNLIDETYVKILRLSMYKNIRLIEDCELIISNLNYLSNIIENSLNKKTKIVFMPYNAKMWNSLESIWKSAVLDEQCDCYVVPIPYYKLIDTPNGITQIYTYEGNDFPEDVPVIHYDDFDLSKEKPDIIYVHNQYDDCNNATMVDSNYFSYNLKQYTNMLVYVAYGILGTYPVSFYLNFYELIASRNFDKVIVQSPAFEIIAECSGINKNQILTMGSPKFDSLIYNLKQKNINKNYESKLKGKIIFLWTTNLMKIPNGKDGVIDEIENVFDIIENSQEYGLIYRPHPLELEYVKSKVPECFNRYKTLLDSISIKNNIILDDSVSYYESFNLSHALITDRSSVLIEYIQTKKPILIYDIDMERGYYDSRIFDIFSNYVVGEEDMDLIKFMNLVKNNNDYKLNQRLNSLNSVLSNTDGSCGEKIHTNVLEYVLNNHI

SEQ ID NO: 53410 - protein, 333 aa, Clostridium difficile
MSEKKVIFSGAQPSGKMTLGNYLGAIKNWTELQDNYDCYYSIVDLHAITVPQDPKVLRANTIELLAQYIACGLDPEKNTIFIQSHVKEHVELMWVLNTMTYMGELSRMTQFKDKSQKSEANLNAGLFTYPVLMAADILLYQTDLVPVGDDQKQHLELARDLANRFNNRFSPTFVVPEGYYPKGGARVMSLQEPTKKMSKSDSNENAFILLADDSDSIKRKIKRSVTDSLGVVKYNDEQPGIKNLIDIYSNLSKKSVEEIVNMYEGKGYGIFKEDVAEVVSEALRPIREKYVDLLNNKDYLEKIYSMGAEKAEKQARKTLRKVYKKVGFIERRY

SEQ ID NO: 53411 - protein, 79 aa, Clostridium difficile
MLYSIIFVIMLLNYNTYKREDFKMAYKITDACISCGACEAECPVSCISAGDDAYVIDAGSCIDCGSCAGACPVDAPQPE

SEQ ID NO: 53412 - protein, 178 aa, Clostridium difficile
MKCTNFTFKGEEGLDIYTYKWEDENIKKPKAVIQIAHGMAETAQRYETFAKVLTKNGYIVYINDHRGHGKTAKIIENVGHLAEKEGFRCLVEDMYTLTNIIKKENEDLPIYLFGHSMGSFASQRYIMDYSNNLAGLILCGSNGKQGIILNLAHLIINREIKKYGRRSKSNKINNLIKK

SEQ ID NO: 53413 - protein, 462 aa, Clostridium difficile
MGYMDRKLDASQDLLYEVKSLIDNNKVLELRELIEEYHIIDIFDIMENLEEDMKIQLFEVLPLDMASSILEEGSVEFFISILSKLDVEHSKNILELMSLGDMADKLSELEEEEREHIINLLNQENADYVKELLFYDEDSAGGTMTTGYISINKDMTALEAIDHMREEAEEAETIYYIYVVDDEEKLVGVLSLRELIIARDANIVEDLMSENIISVYVDEDREEAVRLVSKYNLIAIPVVDRQEKLKGIITVDDIIDVMEEEATEDMYKFAGSSEHEREVAEKENPTLREQIISALRGRLPWLIITLVGGLLASLILSNLDYIMNPVYAPLVFFIPVVIGMGGNIGTQSSSVTVITLSNKDLNFSNVVREGIVGIITGLLCSIITGIVIYFVMRKLDIVLIVSISLFINMVLGATIGAFMPVLLKKMDADPSTVSSPIISTALDITGIAVYFIITTALLSKIV

SEQ ID NO: 53414 - protein, 518 aa, Clostridium difficile
MSKTAKAALWIMAATMFSKVLGFLRELVLANFYGTGMYADVFVLTLNIPGLIIAVIGSAVATTYIPMYFETKKRLGDEGALKFTNNVLNICYIMAIVIAIIGLLFTEQFVTVFAAGFRNDPAKFQAAILFTKIMISGVLFLSGSKIFSSFLQVNDSFVIPGLIGIPYNIIIIAAIALSAGKNVWILPAGALLAMASQLLFQLPFAFKKSYKYKPYINLKDESIKELVNLVLPMLVGVAVGQLNIFVDRLLATTLGDGKLSALNYANRLNEFVMALFVTSIITVIYPKLAKMSGKDNKEGFISTIVKSSNCIILVVLPISIGAIILAEPLVRILFQRGKFDALSTDLTSIALRLYSLGLLACGVRDVLYRAFYSLSDTKTPMINGSIALIINIVLNLILIRPLGHAGIAISTSTSNIITVILLFISLKKKNGYFGGDKIIKTGLKSLVASGVMAVATLLIYNNLYAFMGSGTIKEIISVGAGVLGGASVYTVLIVLFKVEEMDLAFEFLRKGKQKLLRR

SEQ ID NO: 53415 - protein, 176 aa, Clostridium difficile
MTEREKMLAGELYDCGDIELLTQWHKAKDLVRDYNQTDSSDLEKKEKILNELLGGKGKNLWITAPYYVDYGNNIYFGNNCEVNMNCTFLDDNKIIIGDNALIAPNVQIYTAFHPTNAGDRFGNAKEDGSFEFCKTQTAPVTIGDNVVIGAGSIVTKDIPSNMIAYGNPCRIIRENK

SEQ ID NO: 53416 - protein, 148 aa, Clostridium difficile
MKISIGCDHGGYELKEYIKENLINKGIEVEDVGTNSKESVDFPIYAKKVSQNVQSKKSDLGILCCGTGIGMSIAANKFKGIRAAVVSDCFSAKATREHNNTNVLCLGERVIGKGLAMRIVEEWLNSSYNGERHARRLQMIDDIEKENL

SEQ ID NO: 53417 - protein, 215 aa, Clostridium difficile
  MISC_FEATURE (151)..(151): X=any amino acid
KIIKVQKPKFTGELEIIENLEDILEDIFNDEKIFNKIIENEVISDLDSVRVSFESCIFRNVSFENCNLKKIDLLDVVFENCNLSNTFFDGGSIYRVEFKNSKLIGVRFDDCILKNVLFKDVLGKYSNFSFSKFKIVSILDSNFENSVFKKXKVTNLVFEYTNLKKANFNGTKLSGIDFTTNNIEGIEIGIDDIRGAIFDVSQAIDLTKLMGIIIK

SEQ ID NO: 53418 - protein, 506 aa, Clostridium difficile
MVMEKKYVMALDQGTTSSRAILFNKKGEIVKIAQKEFNQIYPKAGWVEHDPMEIWGSQSGVMREVIETAGIRPEEIASIGITNQRETTVVWSRYTGKPIYNAIVWQCRRTSEICDELKNKGLEESIKEKTGLLIDAYFSATKVKWILDNVEGAREKAEQGELLFGTIDTWLIWNLTRGKVHVTDYSNASRTMMYNINDLEWDEDILRELNIPISMLPLVKPSSYVYGHTDERMLSGAKIPIAGCAGDQQAALFGQNCVEEGTAKNTYGTGCFLLMNTGSNIVKSKHGLLTTIAWGVDGKVTYALEGSIFIGGASVQWLRDELKIIESAKDSEMYANRVEDTNGVYVVPAFTGLGAPYWDMYARGSILGLTRGAKKEHIVRATLESIAYQTKDVLEAMQNDSKLKLKSLKVDGGASNNNFLMQFQSDILNVDIDRPKIVETTALGAAYLAGLSVGFYIGRNEITSKWSVEKEFNPNMSEEKRCKLYKGWKKAVSRALSWEKEDELDI

SEQ ID NO: 53419 - protein, 1155 aa, Clostridium difficile
MGLRFVLGRSGSGKSTYILDEIKKEAQKNETTSIILLVPEQYTFEAENRVSKLFLGKEKDKYLRVRVLSFKTLSNIVFSQVGGLTDVNINSSGKAMMVYRAIEDVSEELNVFSKSKSQSGFVSSITDMISEMKQYNISPEMLENISGELDNETLSLKLKDISKIYNSFEGKLHENYVDAQDMLTSLTSKIELSSYLDGACVYIDEFTGFTPNQYNVIKSILNKSKSVNISLTVDDINYIGYSKSDMFSRTKFTYSKLTQLCNEEGIKILPQVNLNTGVIKRFEKVKELQHLERFYNAYPYKIYSNPTENIKIKEFNNLYSEVEEIAREIVHLVRDKNVRYRDITIATRDLNRYDFLVHSIFNEYNIPNFIDKKREAKSNPIVILIISALEMKNRRYGYETMFRYLKSGLIGIDNDDINLLENYVLANGIKGKKWFDEKWDYRITQSLSGQESEFELELKEKINEIKNRVLEPIVILQEKLRGKNRVKEICRYIYEFLLDINMPETIESLIVNFKDKGELDVANQYSQVWDIVVDILDQMVELMGDEIISLEKFIKLITLGFDEYELGLVPPSIDQVLVSSVDRMKNPDTKYLYLVGTTDGVFPLITKDSGILSDNDRESLGNKGIEVDIDSKTRSFEEQFLVYKALTSTSKNLTITYPISDHEGKTLRPSIIISRLKKIFPNIENKSYLVEENKNTDKDILKKITVKSPTFNELINVIKNYDSDGYNTEEINSIWLDIYRYYLKDEIYSSITKKVIKGLSYTNQVHKIEEKKIRSLYKSNSLSISRLEKYAECPFAYFIQYGLKAKKRKEYSFTPPDLGTFIHNILDRFSKELLQDNLTWRDIDEKYIELKIGIIVDEIILKIPGYILNSSERYKYLAYRLKNMLTTAITIISQQIKQGSFEPIDYEVKFGDNGKYPPIKMVLENGQEVSLIGQIDRVDEFEEGENKYIRIIDYKSGNKSISLTEIYYGLQLQLLVYLDAILESAKDEDMNINPAAILYCRINNPIAKFNEDKDDEEIQEAILKELRMKGLVVKDSHIVKEMDKSLIDGERKNSLVIPVGLTKDGNVGKSTSAISYEDFKLLRKYVRHAIKDLCEEMLSGEIRIAPYKHKDGTSCDFCDYSAICQFDSTIKDNKYKNLNNKSNEEIIKMMKGDVN

SEQ ID NO: 53420 - protein, 631 aa, Clostridium difficile
MIKFEAGKYDVIVVGAGHAGCEAALATARMGYKTLIITMSLDSIALMPCNPSIGGTGKGQLVKEIDALGGQMGLNIDKTYIQSRMLNTAKGPAVHSLRAQADKFKYHEEMKKTLEDEPNLDIAMDEVVEILHEGNVVIGVGTKLGCSFKSKAVILATGVYLNSKIYMGEVAFYEGPNALGYAKYLTDSLVELGLRMRRFKTGTPARVHRDSIDFSVMSLQEGDEKVTPFSFMNENIEKKQEPCYLTRTTEETQKVILDNLKRSAMYSGVIESTGPRYCPSIEDKVVRFSDKTSHQLFIEPEGLNTKEMYIQGISTSLPFEVQLDMYKTIKGLENCKIMRPAYAIEYDCVDPTQLKISLEIKGVENLFSAGQFNGTSGYEEAAAQGLMAGINAVRKIEGKEPFVLDRSEAYIGVLLDDLVTKGTNEPYRMMTSRAEYRLYLRQDNADMRLTQKGYDIGLVKKDRYERFLNKKAAVEKEFERLKNERVTPKEVNSLLEEKGATPIKVGISLYEFLKRPEVTYELLEELGKGAGDDVSREVKEQCVIITKYEGYIEKQLKQIDQFKKLENKKLDEKINYSSIEGLRLEARQKLDDIKPISIGQASRISGVSPADISVLLIYLEQIRRTRGGKGE

SEQ ID NO: 53421 - protein, 1118 aa, Clostridium difficile
ERLNQNLEAISMLNRVGSRQRSLDSTAQEVLARYVGWGGLSEVFDEEKGGQWKEARSFLKENLSQAEYEAARESTLTSFYTPKTIIDGIYKTLSDMGFKQGNILEPSMGIGNFIGNIPDEMNKSKFYGVELDSVSGRIGKLLYPESEVQIKGLEETSFSNNFFDAVIGNVPFGEYKVNDREYNKNNFLIHDYFFAKSIDKVRNGGIIAFITSSGTMDKKDESVRRYLAARAEFLGAIRLPNDTFKGVAGTEVTSDIIFLKKRDSIRERDEDWIHLAEDEKGFVYNKYFVDHPEQVLGTMREVSGRFGNTLACLPKENADLKELLTKASEEISKGSTYEEIELLDDEITSVPATDDVKNFSYTVIDGEVYYRENSLFVKKEVTEKNKEKIKDYLELNTALKDVIYKQKEDYSDDEVKKAQEKLNEVYDNFSKKHGFINNLSNTRALKEDSNFPLVSSIEILDEEENFKAKGDIFSKRTITKAKIIDHVDTSLEALVLSMSEKGYVDFDYMGSLTGKDRPTLIEELRGEIYLNIREEQNFYRPLSFNLEDGDLPFACANGSNSYKYGYVTKDEYLSGNIRDKIAIVDSYLSKIRQTERELPHLGYAEDGKEKELISYEMNRLEYQKAELTKVLPKELEASEINVRLGATWIPIKDIEKFIFETLKTPGWARWDIKVKFSNLTSEWNIEGKSKDRGNDLAEMTYGTSRVNAYKLIEDALNLKETKVFDQIVNSDGSKTSVLNKKETLLAGQKQELLKEEFKNWIFSDQERRNRLVKLYNERFNSIRNREYDGSNLSFEGMTTEIDLRSHQRNAIARSLYGGNTLLAHVVGSGKTFEMVASAMESKRLGMCSKSLFVVPNHLTGQIGREFMQLYPSANIMVADKKDFEPKNRKRFIGKIATGEYDAVVIGHTQFEKIPMSKEYQEKHIQDQIDEIINYVEEYKHDRNQNFTVKQLEKTKKKLETRLEKLNDDFKKDDVITFEELGVDKLFIDEAHNYKNLYLYTKMRNVAGIGQSEAFKSSDMFMKCRYMDEMTNGKGIVFATGTPVSNSMTELYTMQRYLQYENLKKNHLEHFDSWASTFGETQSAFELSPEGTGYRVKTRFSKFYNLPELMSMFKEVADI

SEQ ID NO: 53422 - protein, 409 aa, Clostridium difficile
MMKVLLSGGGTGGHVYPAIAIANKIRDEHPDAEIIFVGTEKGIESEIVPKYGFELKTVTVQGFKRKIDFDNVKRVFKLFKGLEQSRKIVKKFKPDIVIGTGGYVSGPVLFNASMGKIPAIIHEQNSFPGVTNKILSKTVTKVLTSFEDSHKRFPEAAEDKLVFTGNPVRKEILLSRKNIARKNLSISDEKRMVLCYGGSGGSRKINDAMRLVIKNMVNEDIAFIFATGKSYYDEFMGSISDINLKPYQKVVPYLEDMANALAASDLVIGSAGAISLAEITALGKPSIIIPKAYTAENHQEYNAKSIEKQGAGIAILEKNLTPESLNTAVFKLLGDRELLVDMANASKTIGKPEAIDLIYDEIMKVYNSTQKSTSKKTKKEKVIKEVKEIKKETTPSIEGQAKVIGIKKR

SEQ ID NO: 53423 - protein, 458 aa, Clostridium difficile
MKTIVRRLILYADGMRPTQIMVSGFAAIIVIGALLLTLPIASQSGESIGLLNALFTATSAVCVTGLVMVDTATYWSLFGQIVIITLIQIGGLGFMTVATMFSLMARKKIQLRERLLIQESLNQADLSGLVRLTRFVLIITITIEGIGALVLSTVFIPQFGLSKGIWYSVFHAISAFCNAGFDLMGSVSGPFTSLNSYVNNFTVSMTVCALIVLGGLGFPVVLDIVRKRRFSKLNVHSKVVLFSTATLIFVGALFIFLIEFNQKATMADLPLKGKVLSAIFQSVTARTAGFNTLDLATLRESSVFVMIILMFIGASPASTGGGIKTTTLAVLIITVRSFLSGKSDIEAFERRLAPSTIKKSLGIFVISISAVIFGTLIISITQPNFTLVQSAFEVTSALATVGSSLAGTPNLNALGKIIIIIFMFMGRVGSLTLFMAILSGGRRKSQPIRYAEGKIMVG

SEQ ID NO: 53424 - protein, 266 aa, Clostridium difficile
MKRIITINTNQLNKSLETKELLTRKLINAGFEVYSDIYPDTELIISIGGDGSFLRTVRDFDFPEIPIMGINTGHLGFFPDILPDKIDSFIEAYTKKDYIIQEMSLLNAEVYTTTSGSNMLAVNEVVIRGDKSRTIHLNLSLDNKHIQNFSGDGMIISTSTGSTAYNYSAGGSIVDINLELMQITPLHPINTNAYRCFTSSIICSNESVIKIAPEYRFEDSVLIVVDGVEHRFRQIENIKVSISDAKIKLLRMSNYEFWHRVSEKFL

SEQ ID NO: 53425 - protein, 300 aa, Clostridium difficile
MNGGIKMKFVTFCSSNEEKIGVFNSETNSIYEINSLGLSKLYTDMNDFIENVSTGDLEKIKNNSFENAKCYKLEEVKLCSPIVRPKKDIICLGLNYKDHVNEIPDGVIKNVVMPDYPIYFSKRADKIIGVDDKISLHGDLVEKLDYESELAVIIGKEGINISKEDAYEYIFGYTIVNDISERALQDKHVQWFRGKSLDTHTSMGPCIVHKEEFEHPLKLDISSVVNGEVRQDSNTEYFIFDIPTIINDLSRGMTLKPGDIISTGTPAGVAMGMNPQVYLKHGDIVECKVEGIGVLKNIVD

SEQ ID NO: 53426 - protein, 1128 aa, Clostridium difficile
MNDVFLYPLQNSKEYKDIINCIKNTKGSLLVNGLLPVQKPHISYSIFNDLSRQMIFITSSDLEAKKVYEDLSFYMEDKVEYLGFQDIYFYHLDAKDRNEEAKKLKVLLKLANKEKIILVTSIEAVLRKYIPKQVLLDSVSHYKVGDSLDLEKLTEKLVSLGYERVSKIEGFGQFSIRGGIIDVFSLEYTNPIRMELFDDEIDSIRTFDVYSQKSIDKLQQFSITPSREFIYPEKTTDALVKLKKETTKNTDEGTFQNIDYISSKTYFEGVENYIDYIYPEENKSIFTYLADDAIVFINDITRLKERCENYINEFRENYKLNLERGLAIKNQGKLLYHYTDLEYLVKDKSVVLNSLLPKSINNFSIKSIINFESREVPTFNGKVDLLVEELNRLKYNGYKIILATNTLERANKLGKDLLDKGLETTISKDRDIEIKSSQVIIVPAHINSGFQYKSIKFVVITDNEMIGVYKRASKTSNKKVKKGKKIESFLDLSVGDYVVHENSGVGRYTGIEQITVNAIKKDYMKIVYQGGDNLYVPIDQMDKVQKYIGAEVEKVKLNKLGTNEWTKAKAKVKKEIEDMTKDLIELYAKREKIQGYKFSKDTPWQAEFESLFPYQETEDQLKAIEETKKDMESSKVMDRLVCGDVGYGKTEVAIRSIFKACMDQKQVAVLVPTTILAQQHYNTFKERFENYPLRVEVLSRFKTPKQQKQIIEDAKKGLVDILIGTHRIISKDINLPNLGLVVIDEEQRFGVKHKEALKKIKSTVDVLTLSATPIPRTLHMSLSGIRDMSVIEEPPQERHPVITYVTESKESVIQDEIERELSRGGQVFFVYNRVEHIEEMASMIQKLVPDARVAVAHGRMTSKSLENIILGFLNKDYDVLVCTTIIETGMDISNANTMIIYDADKMGLAQLYQLRGRVGRSSRQGYAYLLYEKDKTLSEIAEKRLKAIREFTEFGSGFKIAMRDLEIRGAGNILGSQQHGHMAVIGYDLYVKMLNDAIKKVKGEPIVEEIDVEIDLSVNAYIPDNYIKDELIKIEMYKKIASIENKEDMLDIQEELEDRFSDIPKPVQTLLTIAYIKSLCKILKIEKIRQLKDEILLVPITKYRTKQKIGYNIVTELEELLEKMCKVK

SEQ ID NO: 53427 - protein, 252 aa, Clostridium difficile
MDRFFVEKNNINLQDKTCTIEGEDVKHISKVLRCKLGEKLEICDKNNNEYICEIMNIDKSIVNLEILEKVDINRESELKVRLYQGLPKAPKMEMILQKLTEVGVEEIILVQTKRSVVKVDDKKEDKKFERWERIIYEAAKQSKRGKIPKLRGVLSFKEALEDMKKNNVNICPYENERTVSIKHALKKCDSNIDSVGIFIGPEGGFSEEEIEQIQKNNCNVVSLGPRILRTETASVVASTIALYELSDLGGEK

SEQ ID NO: 53428 - protein, 390 aa, Clostridium difficile
MSVENKSNKKELKKVTAKTLIEKGKKQGSLTLAEIMEAFSETELDKDQVENLYETLGNLGIEITETKNYKADIDFSVADDDLSIGHLDEDAEAISHDDSSAIEIETVDLSLPKGISIDDPVRMYLKEIGKIPLLKPHEEVEFARRMHEGDEIAKQRLVEANLRLVVSIAKRYVGRGMLFLDLIQEGNLGLIKAVEKFDYTKGYKFSTYATWWIRQAITRAIADQARTIRIPVHMVETINKLIRVSRQLLQELGRDPKPEEIAKEMEMTEDKVREIMKIAQDPVSLETPIGEEEDSHLGDFIPDDDAPAPAEAAAYSLLKEQIEDVLGSLNDREQKVLKLRFGLEDGRARTLEEVGKEFDVTRERIRQIEAKALRKLRHPSRSKKLRDYLD

SEQ ID NO: 53429 - protein, 372 aa, Clostridium difficile
MIAVKKAYKFRMYPNKKQQELINKTFGCCRFVYNKYLAKRIDVYKSDKETFTYKQCSSDLTNLKKELKWLKEPDKFSLQNALKDLDNAYKKFFKEKAGFPKFKSKKINRFSYKTNFTNGNIMYCGQYIKLPKLGMVKIRDKQVPQGRILNATISKEPSGRYYVSLCCTDVDIEAFENTNNHIGLDLGIKEFCISSCGEFIENPKYLKKSLNKLAKLQRELSRKTIGSLNRNKARLKVARLQEHIANQRKDFLQKLSTKLIKENDIICIEDLQVKNMIKNHKLSRSISDVSWSEFIRQLEYKANWHGRQIVKVGKFFASSQICNKCGYKNEEVKNLNIREWICPSCNETHDRDINASINILKEGLRLITIQNK

SEQ ID NO: 53430 - protein, 306 aa, Clostridium difficile
MMNIVSINGLSKGFGNRKIIDNLNFTVPEGSVFGFVGKNGAGKTTTMKMVLGLLEPDSGTIDVCGEKVTYGRTSSNRHVGYLPDVPEFYNYMRPLEYLSLCGEITGLSKKEIQIRSEELLSLVGLGNEKRRIGGFSRGMKQRLGIAQALLSRPKLLICDEPTSALDPVGRKEILDIMLKIKDSTTVIFSTHILSDVERICDHVAILNKGSIALSGTLSEIKSMHGKDRLLLEFASNDEIQKFKSSDGIKSLLKDSEETNMEIVLHGKDIKAIQKTVISTLAEMNLCPVKMELIELSLENLFLEVVK

SEQ ID NO: 53431 - protein, 359 aa, Clostridium difficile
MSRRKKGISLVILVAIISSILSSFLTIILVKDNLVSKSTGSSTPIVVNDDGKSQNIYQAVAEKATPSVVGITTTSVDTSNMFAIPTETQGVGTGIIVDSNGYILTNSHVISDGQATSVNVLFNDGSTTSGKVVWFDQQLDLAIVKVDKTGLTPAEFADSDKVKVGDISIAIGNPLGLDFQKTVTQGIISGLDRTIQTEKTNMTGLLQTDASINAGNSGGPLLNQKGQVIGINTAKASQAEGLGFAIPINTAKSIVEEVIKNGKYEKVTLGIKGTDVSNYEAATGTKLSTDKGVYVAEVISGSSAEKAGVKVGDIITKVGDTDITGMNDLNKKLYTFSKGASTKITVNRGGKAVTINVNF

SEQ ID NO: 53432 - protein, 803 aa, Clostridium difficile
MRKYKSKKLSKLLALLTVCFLIVSTIPVSAENHKTLDGVETAEYSESYLQYLEDVKNGDTAKYNGVIPFPHEMEGTTLRNKGRSSLPSAYKSSVAYNPMDLGLTTPAKNQGSLNTCWSFSGMSTLEAYLKLKGYGTYDLSEEHLRWWATGGKYGWNLDDMSGSSNVTAIGYLTAWAGPKLEKDIPYNLKSEAQGATKPSNMDTAPTQFNVTDVVRLNKDKETVKNAIMQYGSVTSGYAHYSTYFNKDETAYNCTNKRAPLNHAVAIVGWDDNYSKDNFASDVKPESNGAWLVKSSWGEFNSMKGFFWISYEDKTLLTDTDNYAMKSVSKPDSDKKMYQLEYAGLSKIMSNKVTAANVFDFSRDSEKLDSVMFETDSVGAKYEVYYAPVVNGVPQNNSMTKLASGTVSYSGYINVPTNSYSLPKGKGAIVVVIDNTANPNREKSTLAYETNIDAYYLYEAKANLGESYILQNNKFEDINTYSEFSPCNFVIKAITKTSSGQATSGESLTGADRYETAVKVSQKGWTSSQNAVLVNGDAIVDALTATPFTAAIDSPILLTGKDNLDSKTKAELQRLGTKKVYLIGGENSLSKNVQTQLSNMGISVERISGSDRYKTSISLAQKLNSIKSVSQVAVANGVNGLADAISVGAAAADNNMPIILTNEKSELQGADEFLNSSKITKSYIIGGTATLSSNLESKLSNPTRLAGSNRNETNAKIIDKFYPSSDLKYAFVVKDGSKSQGDLIDGLAVGALGAKTDSPVVLVGNKLDESQKNVLKSKKIETPIRVGGNGNESAFNELNTLLGK

SEQ ID NO: 53433 - protein, 706 aa, Clostridium difficile
MGKILVLAEKPSVGRDIAKVLGSKNEKNGYIEGPKYVITWALGHLVTLADPESYGERYKSWSLEDLPILPKHLKTVVIKKSGKQFNTVKSQMNRNDIDEIVIATDAGREGELVARWIIEKSQVKKPIKRLWISSSTDKAIKDGFAKLKSGKEYENLYYSAIARAEADWIIGINATRALTTKYNAQLSCGRVQTPTLAMLLKREEEIRNFKPKEYYGLELIATKGNSDIKFIWNDKNNNSSTFSKEKIESTLKKVKGVDIKISEVNKSYKKKYSPALYDLTELQRDANKMFGFSAKETLSIMQKLYEHHKVLTYPRTDSRYLTSDIVGTLKDRIKAVNISDYSKICNRLLKSNIIANKSFVDNSKVTDHHAIIPTEQKVFMSDFSDKERKIYNLVVKRFLAVLSPPFEYEQTTISATVEGEIFKAKGNKVINLGWKESYKDIEDEDEYESIPNVLEKDVLKVKGLKITSGKTNPPPYLNEGTLLTAMEKNGLGTVATRADIIEKLFNSFLMEKKNKDIYITSKGRQLLDLVPVDLKTPELTASWEKKLLDISKGKLSKNTFINDMKDYSKDIVLEVKNSDNKFKHDNLTKNRCPECGKFMLEVNGKKGKMLICEDRECNTRKTISQVTNSRCPNCHKKLELRGEGEGRIFTCSCGYREKLSSFNKRKQEEKQKASKKDVNQYLKNQNKNQETFNNPFAEALAKLKNK

SEQ ID NO: 53434 - protein, 273 aa, Clostridium difficile
MNLIDNHIHTNFSSDGKDSMEDTIKKAISIGVRYLTFTDHLEHDEDRGFCINYNDYVPVFNKFKEKYKKDIELLLGVEVGYRKHLKNEIEEIINSNPFDFVLCSTHTIDNVPVPSKAYFKGLSKEDAYYKYFNSILETNREFGDYNIYGHLDYISRYGIYSDNRVIYNDFKDVIDEVLKSIINNGSGIELNTSGYRYGLNAIHPNEDILKRYKELGGFIVTVGSDSHRVEDICKDFDVAYDMLKYLDFKYVSLFKERETYFVNIEKVKSNNIA

SEQ ID NO: 53435 - protein, 521 aa, Clostridium difficile
MGVGIMRYKKRNIDKSSELSFQSLAKYFITFYIVIILIILSMFCINTIWVMKKDNQDLLSTTSNRIEDRVGETIKLLNSLSKDNYIIDNSVNGIDKSKELSMYSDEFGYMMICFVDKNIIVWDEEGGNISLAGRDYMQKLFATKKYQVTDSFAAGADGKTLNYTIASPIIKNGNVDGCVFAAIYFDEIKDILKQGKGQQQQNFILFGSENQIMNLTSDETAYGEKYMKLSQKTKYLGTNAKKVEKDMFNNKSGDYWAFENGKLYFMSYKPIKNTNWSLFCKVNFLDIFALNLIPMGAILSVITLVFIILICMEKSFMKKRMEVIDMLLGSVQELEKRIYQTERPSEVDFKEIIQLTSKGLTDGLTGVVTRTVFFDQIYNRVEMEENDKLSVISFVDLDDLKCINDLYGHEIGDMVLKNVGYVLREYEIKYNGLIGRYGGDEFVMLLSGFTSREEVEDLLDEIAIRLHTEVLTDDGIIQTHCSVGAVVCSVKDNKDIDNLLKQADEALYYVKRNGKGNYHLV

SEQ ID NO: 53436 - protein, 641 aa, Clostridium difficile
MKIKFVIMPLVIFLMVLFVGCQSTKDTEVKAKDTEIKILGTGDLHSILTDSMVSYVNEEREKNKNLLMVDAGDFYGTQSREMWEWSSGKKLINIKRNGRAEYDDIIKSSKDEVPIVKDMAKLKYDAVVLGDNEFVSNDKQSLDKLVSDFKNNNMPLVSANIYEQSGENYVQPYVMKNIKTDEGNVKVGILGLTIKEVGETLGLEDFEKDKKARELGEQADYKGKLYANDLVEDAKKWIKVMEKESPDIIVAVVHSGEEPKTDRNPGNRIKELATTVDGIDAIVAGHTHEKIDEHKYKNKSGDEVIVTQPGWHGDRVSEINFKLNKENGKWDIKEKSSKLKIIDKEVSIVATADLHSHFSDKLTVDLVNERSNPIEPVVVDAGDFLDPQTDEMTQWYKEWKSIRDNNSDKTISRCPMVMDMNQGMYDAVVLGNHEFVSEKDEFWSDERLLDAVIEDFEQVAISVLSANIYRQSGKNYVKPYIIKDVETSEGNVKVGILGLTIKEVGKGLKNVNLQEQFQYKDKLYANDLVEDAKKWVKVMKKKKPDIIVAVVHSGEEPKNPKHPGNRIKELATTVDGIDAIVASHTHEKIDEHEYKNKSGEKVIVTQPGEHGKYYSKITFKVNKEKGSWIINDKFSKTIEVE

SEQ ID NO: 53437 - protein, 159 aa, Clostridium difficile
MNISIVVVGKIKEKYLKLGIDEFKKRLSKYCKLEIIELDDEKAPENLSVKEMEIIKDKEGKKILGKIKHNSYVIALAIDGKGLSSEELAKTMSDLAVRGNSSLCFIIGGSLGLSDEVLGRADYRLSFSRMTFPHQMMRLILLEQIYRAYRINNGEPYHK

SEQ ID NO: 53438 - protein, 119 aa, Clostridium difficile
MTKKGGITMEAKATAKYVRVSPRKAGQICDLVRGKNVDEALAILKFTPRGAASIIAKVVKSAKANAENNHEMDTEKLYIASIVANQGPTMKRFMPRAMGRATTIRKRTSHIEVVVKEKK

SEQ ID NO: 53439 - protein, 238 aa, Clostridium difficile
MRINKYIASCGIASRRKAEEIILGGRIKVNGSVVKELSFNIDEEKDIVEFDNKKVKPSENYIYIVLNKPEGYITTVKDQFNRPSVIDILKDVRERVYPIGRLDYETSGLLILTNDGDLTYKLTHPKHEIDKTYVASVKGIISDDEIRQFETGLKIEDYTTAPAKIRVTKENKEKNYSVCEITIHEGRNRQVRKMCKAINHPVLNLRRISVGKIVLKDTKVGEYRYLTEDEIKYLKSIK

SEQ ID NO: 53440 - protein, 411 aa, Clostridium difficile
MTLFFYDIILVFIAKVYFFGGVPLMNREKLVAFIRYLSLFILVVSYLKNVENTLYPVITMIILFLIIINNQVRFFSLSNENKFILISYFLELILIFILCNYTKTFNSIYFVPLILDISFLIKEKYKYILFSFVIISSLIISLDKNIYLALESSSILLIITVLSIYIENENLSKLYSQNLYDKLRISKDELKKVNADLETYASSIEELAILKERNRISREIHDSVGHSLSTTIIQLNAIEKLLKDKPLIYDLVHELREFVTESFQDVRRAISELKPVEYENYQSLFKIKELVKSFIKLTNINVKLTISKNTWNLSRNQSIALYRLIQESLSNSSRHGKATEIRIFITFNTSNLIITISDNGIGCGNIKKGNGLNSINERIYELNGKVEFDNSNNGFTIRASFPKFSGGDFFE

SEQ ID NO: 53441 - protein, 247 aa, Clostridium difficile
MKNNVGFDSSLSKFGIGLFETIRVKNGIAVDLDIHIERMLSSINCLDLDINYKKDFLINEIVTYIKKENVINKALRITVFDEGYNISIRDIPYNQETYEKGFKLAISPIVRGNSLIHRHKTTNYFENIYTKNIANKTGYNDGIFLNSEGVILECSMSNIFFIKGERVYTPSDRLPILNGIIKKRIIEICDELHIELIENEINISEISSFDFVFVTNSLMGAIKVTEIDKIKFNKENVVFDKIVKLLE

SEQ ID NO: 53442 - protein, 409 aa, Clostridium difficile
MSFLKKFKNKRFRNNSFKSNNFRNSSFGSSGFKSKNKGFKNNPFKNKRFKIYAGIAVIILLILGVLAYVDSKNTELQANENFIETYTIPENEKIFINGMVVPKQTKDFNISGDYELSDVNVTNGQKVNQGDLLFTAKNPTIIAEIDSLKSQLSQYKKQKISLSDIAENKDAIASINAQITALNSQIASLDKKAYDRVTAPFDGTVYLNDQTGNPDQPVSFMTIQGLEFYMKGQASEQDLPKMKIDQMVNILVFSTDQKLTGRISFISDKPSTPNTEMGAQQNTLSYYDINIAFDNQEGLVNGFHLQASLEVANSSFKIPASCVLKDNKHSYVFKDLDGILKKQIVDVASQNDDFAVVRGGLEQGDIIIKHPTKEMKEGDPVQGDGVTAGSNNGDTTPNKKVEEVTMDVN

SEQ ID NO: 53443 - protein, 457 aa, Clostridium difficile
MECLTIKELVLATNGKLIYGDYNDCVSDIVIDSREANAQNAFVAIVGENLDGHTFMKSAYDSGCKTFIKNESNGIKLESSDINLIDVKDTSLALGDISKYYKEKFDIPFIGVTGSVGKTTTRDMIYSAISAKLNILKNEKNLNNHFGVPLTLFNLNKEHECAVIEMGMSGFNEIKYLVDIVNPKIAVISNIGLSHVEKLGSQEGILKAKMEITSNFDETNTLIVNGDDKFLSTLKEKEHVYKLKTFGFNKNNDVYCESYTMEEDSLTFICVINGKKEEIFIPTIGEHNIYNAMSAILVGLCLNISLDYIKKGLKNFKGTKMRLDIIKNEKLTIINDSYNASPDSMDAALKILGRYKGRRVAILGDILEMGEISEYGHRLVGKSSMNNTDIIITIGENSVFIGEEAKQLGFNSANIYHFENREDVFNKLNELVKTGDTILVKGSRGMRLEKIVEYLNK

SEQ ID NO: 53444 - protein, 1068 aa, Clostridium difficile
MPKLDSIKKTLVLGSGPIIIGQAAEFDYSGTQACQALKEEGIEVVLVNSNPATIMTDKEIADKIYIEPLTIEFIEKIIEKERPDSLLAGMGGQTGLNLAVELHDAGILDKYNVKVIGTSIESIKKGEDRDLFREVMKEINQPVIVSDIVTNLEAGLEFANKIGYPVVVRPAYTLGGTGGGIADTEEELREILSHGLQLSPVGQVLLEKSIKGWKEIEYEVMRDGNGNCITVCNMENVDPVGVHTGDSIVVAPSQTLSDEEYQLLRKASIDIINAIEVQGGCNVQIALNPHSLEYAIIEINPRVSRSSALASKATGYPIAKVAAKIALGYTLDEIENAVTKKTYACFEPTLDYVVVKIPKWPFDKFRHANRKLGTKMMATGEIMSIGSNFEAAILKGIRSLETGKYSLVHAPSEGRTLEELKARVVVPDDERLFDLAEMIRRGYKVEMISEITGVDKWFINKFKWIVEQEEKLKVLKIEDLDKEYLHELKKKGFSDKGISDLMKISPEKLYELRSLYNIQPVYKMVDTCGGEFEALSPYYYSTYEQYDEVVVSDKRKVVVLGSGPIRIGQGIEFDYCSVHCVKSLRKMGIETIIVNNNPETVSTDFDTSDKLYFEPLTEEEVLNIIEKEKPEGVILQFGGQTAIKLAKFLHEKNIPILGTDFRDIDAAEDREKFDDLLERLDINRPKGKGVWTTNEGVEIAKELGYPVLVRPSYVLGGQGMEITYNEEKLIQYLDDAFDRDHKNPVLIDKYLTGREIEVDAICDKEDILIPGIMEHLERAGVHSGDSTTMYPSQNISDEIKEKIVEYTKKIALDLNVLGMVNIQFIEFQNELYIIEVNPRASRTVPYISKVSGVPIVDLATKCMLGAKLKDLGYGTGVYKEPKLVSVKVPVFSMSKLSKVEVSLGPEMKSTGEVLGVGENLEEALYKGFLAAGRHMSDERGVVLATVNNHDKDEFIEIAKDMKELGYTFVATEGTAKSLRENGIEADIVNRIEEPRPNILDAIRNKQVDIVINTPTKGNDSTRDGFKMRRTAIEFSTEIMTSLDTLKALVEVKKKHLNKDKLKVYNIAE

SEQ ID NO: 53445 - protein, 1182 aa, Clostridium difficile
MKKVNQQMRPIRLELTGLNSYIDKQVIDFEKLIERGLFGIFGTTGSGKSTILDAITIAMYGNISRNTKEYINSVCDKAIISYEFEIGSKNTRRRYIVDRTIARSKTGTKTSNARLIEVLNDNTQNVLADKVVEVNEKVAQVVGLTANDFTRSVVLPQDKFNEFLRLSRADRRDMLERIFNLEKYGRSLGEKVKKRKNIQLQNLKDLKSKLSQYDGITEEVYNNINQELIELKNLEKDKNNALDLAQKSYEESKTVYEEQLKLEKNELRKNELDLKNSEIKEKIALVENDSNAKKVDPYISSVQNLEKKIDEDSFAVSNLEKKLAILNQELEVTKNRYEKINKIKNEEVPKLSEEKIRLQQAIKLEEELVLLDRELKELKESGINLNKTKVELEKVKQVSESRKDAVTKSIKEVEGKIDKVNISAELKQKIFLAYEYEKDYNNVLEEKNQKLNKLEEILKETENINLKVRYIDKDKNDVNRNLENLSLHLDVLLKKCPGKSADLLLKSEYVTELRNKANNTKENEIKKSSIQDELKIILESKFNTEREVNLLNEKLENNRKNRDDLEKELEELKYLNLASELRRELKENMPCPVCGSKHHENHDITKYDENISFVKEKLEKLEKEKISIRNNIEELNAKVSGYLSIEKMKTKELEDVKGKLGEIPSSQLLKKLDEEQRKLALLKSNIQEWEKEKESTENKVTLAKEEKNKIEKEELKIRESLNNYKKLTRDLNIEIEGLENKCKKIKQEYLGLKTITKVSNLLSKVKEIRENEKELELLSTGHSNLLKNRDSLDIKIRENESKLHEIEIELIKARELYVEKKLSRDNKYKEVISITKGDLAKNLLHNVEENICKILEQEESSKKKLEEQRLEYEKNIAEKHNIDGRLKTAKEQYKDQKSTLNKLLAENKFESIYAVKRALLDTDAVKKLIEEILEHEEEQKLLSFKIKSSKEKLNGRSIKKEYFEQLKDEIYNLKVEIGNISKDIGANQNQLITLKDSLDKINDFNKQLKVVEHNVDLLEELDKCVQGNKFVEYVSTNQLKYIALEASKRLDGITKGRYALEIDSTLNFVMRDNFNGGERRSIDTLSGGETFLTSLSLALALSSQIQLKGSAPLEFFFLDEGFGSLDSELLEIVIESLERLHSNNLSVGIISHVEELKNRVPVKLLVSSSEAGIGSKVKIEYS

SEQ ID NO: 53446 - protein, 372 aa, Clostridium difficile
MIAVEKAYKFRMYPNKKQQELINKTFGCCRFVYNKYLAKRIDVYKNDKETFTYKQCSSDLTNLKKELKWLKEPDKFSLQNALKDLDNAYKKFFKEKAGLPKFKSKKINRFSYKTNFTNGNIMYCGQHIKLPKLGMVKIRDKQVPQGRILNATISKEPSGRYYVSLCCTDVDIEVFENTNNQIGLDLGIKEFCISSCGEFIENPKYLKKSLNKLAKLQRELSRKTIGSLNRNKARLKVAGLQEHIANQRKDFLQKLSTKLIKENDIICIEDLQVKNMIRNRKLSRLISDVSWSEFIRQLEYKANWHGRQIVKVGKFFASSQICNKCGYKNEEVKDLNIREWICPSCNETHDRDINASINILKEGLRLITIQNK

SEQ ID NO: 53447 - protein, 191 aa, Clostridium difficile
MKLFLKGDRCYTDKCAIVKRNYAPGQHGQGRKKVSNYGLQLREKQKVKRIYGVLETQFRNLYERAENMPGKAGENLLSLLERRLDNVVYRMGLASSRKEARQLVTHGHFTLNGNKVDIPSLIVKVGDVIEVKEKSRSSAKFKNLVEVNSRIAPKWLEANVEGMTAKVVGVPTREDIDLEIAEHLIIELYSK

SEQ ID NO: 53448 - protein, 49 aa, Clostridium difficile
MTTVAEGIETSFQKDFLQEINCDMLQGYVFSRPLPIKDFEKLMFQNSSN

SEQ ID NO: 53449 - protein, 677 aa, Clostridium difficile
MQKVSVKDEINKLIETINYHNERYYNQDSPEISDYEYDKLMKELISLEEEHPELKRIDSPTNRVGGKPLDKFNQIVHKTPMLSLSNAFSEQDLRDFDKRVQEYVGENVEYVVEFKIDGLSVGLTYNNGEFEKGATRGDGVVGEDISQNLMTVKSIPLKINDKKELIVRGEVYISKDNFRKVNEQQEEQEQPLFANPRNLAAGSLRQLDPKLTAKRPLDIFVFNMENIEEYDLESHSESLEYLEKLGFSVSQSYKVCKSIDEVIEHIEYWTDNRGNLDYEIDGMVIKVNNIKQRDEMGYTAKSPRWAIAYKFPAEKKKTKIVDIIVEVGRTGTITPSAILEPVRLAGTTVSRATLHNEDYIREKDIKINDTVLVQKAGDIIPQVLEVIKEERTGDEIDFKMPEKCPVCSEPTIRLEGEAAVKCINMSCPAQIRRGIIHFVSRDAMNIDGLGESIITLLLNEKIIQDVSDLYYIKKEDVVDLERMGEKSADNLINSIEKSKENDLWRLINGLGIKFIGVKAAKILAYNFKDLDEVISATSEQLEELEEFGSIMANSVVEFFKEDKNMNVINKLKNVGVNTKSLDNTGEKVEKIFEGMKIVLTGTLPTLKRNDAKEMIEKRGGKATSSVSKSTTFVLAGEEAGSKLTKANDLGIKVIDEERFLELLKLSSKDEVKAVLES

SEQ ID NO: 53450 - protein, 105 aa, Clostridium difficile
MIKVKYYYNDDFLLQGFCLKGHADFAEIGYDIVCAAVTSNAIAVINSLDKLQKIEFEKVVGEEGHIECIVKDTHVKDAQLLLNHFQLAVKEIKREYPKNIKILKK

SEQ ID NO: 53451 - protein, 190 aa, Clostridium difficile
MNLENINQRLNQMLPVGRLSHSKNVAKCAEKLCEIYGCDKEKAYLAGMIHDCAKYLSDKEIEDYVNKYEIYLDPIEDGNRSLSHSVIGAYICEYEFEVEDEDIINAIKYHTTGREDMSLLEKIIYIADLIEEGRKFPVVDTLRELAYGGKLDEALLTSFNNTLMFVINKKEEIHPRTVMARNYLIKEKLL

SEQ ID NO: 53452 - protein, 768 aa, Clostridium difficile
MEVSVMVNKEVRKIDSEAIVTGKPIYTEDLIFHKDVLTIKLLRSPHAFAKIKNIDIKNALKVKGVVNIFTYKDVPNYRYSMVGESYPEASPHDQLILEDVVRYVGDEVAIIAAEDERAAIKAMKLIKVEYEVMTPILDARESEGNKILIHEEDDLFCPFDFGLDATKNIVSREKMGKGDVEKEFKESDVIVEHSYMTQSQAHCMMETHRAYTYIDTNGRLVVTSANQSAYHMRRQVSKALGIPLSKVRVIKPRIGGGFGGKNIAVTEIYASFVTWMTKRPAKLIYTREETFAMTNTRHQMFFDIKIGSDKEGNIKAIDMKALNNTGAYGDNGPSVCSESGHNVLPTYNNVPAIKFDGRTVYTNLVPGGALRGYGATQGTFALDCAIDELAHKLNMDPTEIKLKNIIKKQTEGGIMNFPIRSCALDECIIRGKKLIGWDEKYPVRDIGNNKVRAVGMSVGTHGSGIANIDMAIVNMRMDEDGTYKLFSGSSDLGTGSDTILAQIAAKALNTSIDRISVYTGDTDMCPYDTGAYASCTTYVTGNATIKSAESLKQKILKVAQKKLDLPIDDLILYEDRVCYSEDVEQFVLLSELGKESVGGGNQEVLYSSESYGIQESAKPFLAGFAEIELDKTTGEFKVINYACSTDCGTVMNPALARIQVEGGVTQGIGLAMYEDPRHGSDGKLQTSNLLQYKVPTKKDIGNIIVDFVDNYEPTGPYGAKSLGEIVIHTPAPAIANAIYNATGVRIRELPITSEKVYMAMKKLNQGGK

SEQ ID NO: 53453 - protein, 263 aa, Clostridium difficile
MENIDPVGVHTGDSIVVAPTQTLSNKECAMLKKASLDILNAVEVQGGCNVQFALNPHSFEYAVIEINPRVSRSSALASKATGYPIAKVSSKIALGYTLDEIENAVTKKTYACFEPTIDYVVAKIPKWPFDKFKKANRKLGTKMMATGEIMSIGSNFEAAILKGIRSLETGKYSLVHTPSEERSLEELKKRVVVPDDERLFDLAEMIRRGYKVEMIEQITGIDKWFINKFKWIVEQEEKLKVMKIEDLTKDYLLELKKKGTELV

SEQ ID NO: 53454 - protein, 400 aa, Clostridium difficile
MTLILSYFNKDKLSVKTLKGNVKDIGRVSVVYTPNISKFSYEEVIISKNGVRNNTNPKSRIRNDYLNIDKKYSDFVNDKGKEFIYKDDLNIGEAYTSVKSDLVQGMNALNDCIKVSNKNLKSGVEENFDINLNKSDFKENSWKTLFNKIYKGNLYMVISETNISGSKVNNICILKIDIKNKSYKLLNRFNLGLQNGEQQNINEIKFSIGSKLYLEIVNNKSKNGYIEGHDSYSNFIIYDIEDNTFNISNKFMDNLNKEKNANPKEIGLLSKTKLDYMVKNNKLNLIVTDMSNSITNLVYDINSNEIKLEDYEILDLKVDYNEASSGVRKVKLLDDKIYSISGIKNSISGELKGFKGIIDVVGTKPVKFQVFDMKLKKNIYEAELINGDISLQEKLFFVAN

SEQ ID NO: 53455 - protein, 445 aa, Clostridium difficile
MIKMEDMTRIPPHSVESEQSILGSILLDKDAIITVTETIKPDDFYKEAHKIIYECMITLSNKGEPIDLITLTEELRKQGHLNDIGGISYITSLSTIVPTTSNVKYYADIVKEKSVLRKLIKASNEIINLGYSGATKIEDVLEQAEKSIFDISQEKTSDDFKSINLVLMDAYDMIEKLYTNKSDVTGITTGFKDLNKKINGLQRTDLILIAARPAMGKTAFSLNLVQNAALKGDASVAVFSLEMSKEQLVQRMLSSQSSVELKKIKTGTLNDNDWPRIIDAMAVLSDAKIHIDDTPGIKISELRSKCRKLKIEKGLDLVLIDYLQLMEGEGNNESRQQEISKISRSLKILAKELNCPVVALSQLSRAPEQRADHRPMLSDLRESGAIEQDADIVMFLYRDEYYHADSESKNIGEVIIAKNRHGETGSVELVWLGEVQRFGDKLRDL

SEQ ID NO: 53456 - protein, 638 aa, Clostridium difficile
MGKKMILGVTGCPTGIAHTFMAEEALKNSARELGCDIKVETNGAIGVENKLTAKDIEMADAIIVACDKNVDMDRFNGKPVIEVPVKEGIHKANELIQRCIDGKVAIRKGNLSSSKIAEEGSLSFGQKLYKDLMNGVSHMLPLVVAGGVLTAISFLWGIYSFDPNSEQYNQIAATLKSVGGYSMNLMVPVLAAFIAQSISGRAGMLAGLVGGMISFDTGSGFLGGIISGFLAGYLVKLFVHLLRKLPRQLEGLKSIFIIPIVSVGLVGIAMLLLGGPCSALNNAMMNFLSGLQNSSPIILGIVIGCMSAFDMGGPVNKAAYVTGTMLLGQGNYLFMAGVSAACITPPLVIAIASTLFKNRFTEEDRAAGLINYILGSTHITEGAIPFAAKNPLKVLPVLMIASSISSILTYIMKIEVPAPHGGFLVLGLVNKPLLWVGCIFVGSLVGAVLYMMVTPKVVNAKNTIENTNATKDEHKNESAESENVSNNISLYSEETVILDVKGKNKTDVIDEMIGILDKSGVLLDKKKFKEEILKREEISSTGFGMGIAIPHAKTDAVKVPRVAVGVSKEGFDFESEDGSLAHIIFMIAATDNGDNLHLKTLSQLSSKLMNEEFLNELLNSKTSREIVSKLNNEEIKSV

SEQ ID NO: 53457 - protein, 168 aa, Clostridium difficile
MTRGKLNMSEVAKKEVKVKKGNVIDAFIGGARNGFQISTNSMAPNVIFGFAIISVFNLTGLLDVIGTIFTPVMSIFGLPGVAATAIMTIFISMGGASGVIAGLFTAGQISQAHVAILLPMLLLSGAQIQFMGRLLGTAELKTKYYPHMFVIATLNGCIAMLIMNYFVV

SEQ ID NO: 53458 - protein, 537 aa, Clostridium difficile
MNITKFEDLPISEGIKKAIAEMGFEEPSPIQAQSIPAILSGKDVIGQAQTGTGKTAAFSIPILETIDPNNRSLQAVVLCPTRELAIQVSTEIRKLAKYSHGIKTLPIYGGQPIDRQIKSLKSGVQVVIGTPGRTIDHINRKTLKMDNVKMIILDEADEMLDMGFREDIEMILSKIPEERQTTFFSATMPRGILELTKRYQKDPEHIKVVRKELTVSNTKQYYIETRSSNKLEVLCRLVDVYDPKLSVVFCNTKRKADELVGDLQARGYFADALHGDLKQTQRDIVMDKFRNGTIDILVATDVAARGIDVDDVECVFNYDLPQDEEYYVHRIGRTGRAGREGMSFTFVFGKEMRKMKDIERYTKSKLIKHNIPTITDVEEKKVGTFFAQVKQTIEEGHLTKQLQWLEGFCNDEDYAMVDIAAALVKLSLGEEMKEEIIEEKPRRERGDRKGGTGAKDGMIRLFINIGRNQRVQAKDIVGAIAGEVGIPGKVVGTIDIYDKYTFVEIPKKDAKTVIEKMKDIKIKGNKINIEKANKKKK

SEQ ID NO: 53459 - protein, 759 aa, Clostridium difficile
MLSDAKNNRYGLSIIAVISILVITISCLIYGSRLNKTLGEETNQYLSEIANQSVNVLKKQINGDIKLLESISIFIEGEESFEVDNILSILKRQAINSSFKRMGVILPNGTAYTTDGYIEDFSKRDYFLKSMQGEVVITGKLKDVIEDDKNTNSNINVYSVPIYKDNEVKGVIFATHSTKLYEKILSVPTFNGKGYSYITRSNGDIVLNPSSKNANSTKENLFSYIGRSDSISKSSINNMKSNIKNFKSGSLSYSMFGKGYYLSYAPIGINDWYLFSEVPKTAISEKSYAIIKLTLSACVVLIIIFTALTIYILFIHKKSKEKLEEFAFKDNVTGIGNSNKFNLEGGKFLSSHEKKNLVLIYFDIDKFKLVNDRFGYEEGDRVLKEIAEIIKNIFKEQSVFSRISNDNFAIIFEKKNNRESIIEICELIRKKLSMIKTSLGVELNLIPSIGVYFVEEGETNISTCLDKAMIAKTTVKRKYLKVYEIYAENLKETLIEERDIEQEMHDALKNEQFKVYLQPKVDLSTTKIVGAEALVRWQHPKKGLISPGVFIPIFEKNGFITELDMFVFTQVCKNFKRWENENFPTFPISINLSRVHLENPGFISELERITKEYEIEPNLIEIELTESAIFDNTKILFKIMQTLKSVGFKISMDDFGSGYSSLNMLKDMPIDVLKLDRQFFITVGNAKKSQIVVSSIVQMAKQLDIKVVSEGVETVEQAEFLRFIGCDMAQGFLFARPMPIEEYEKLILDRYSLNRKETN

SEQ ID NO: 53460 - protein, 288 aa, Clostridium difficile
MELSVERLTKQYNNKIIVDKIDFKLNEGIYGFLGENGAGKTTLMRMICGILSPTSGEVKVDGKNNLDMGEDFRDMIGYLPQNFGYYPDFTAKEFMLYIASLKGLMPSYAKRKTQELLEMVGLSEVINKKIRTFSGGMKQRLGFAQTLLNDPKILILDEPTAGLDPKERVRFRNLISEFSKEKIVILSTHIVSDVEYIADKILIMKKGRFVLTGSVEEVTSKIKDKVWKCVVNENEIDYMSDRYCLANIHHSGGVANLRIVSDIKPHDNACNLKPTLEDLYLYCFNEVL

SEQ ID NO: 53461 - protein, 301 aa, Clostridium difficile
MIHVSNEYEEYLMNDNLHINWYPGHMKKTKELVKNNLKLIDVVIELLDARIPFSSKNPDIDRLVGDKPRVVVLNKSDMADRDKLNQWIEYYKKINIKAIPVDTIKGVGINKIIEECKNVTREKMSSLKDKGRKERAIRIMIVGVPNVGKSSLINKLTGRKSTQTGDKPGVTKGKQWVRLKGNLELLDTPGILWPKFEDQEVALNLAFSRAIKDEILDTETLALRLIEKLMKIEPEKLKARYKLDCLGETPIETMDMIGHKRGFITGKKELDYTRIATTVLNEFRDGKIGNITLEVPENVKR

SEQ ID NO: 53462 - protein, 669 aa, Clostridium difficile
MGDTILGNRYEIIRKIGDGGMAFVYEAKDRLLNRTVALKVLRPEFVDDDEFLTKFKREAEAVASLSHPNIVNVYDVGEDGKVHYIVMEFVDGKNLKEIIQDEGILDEYTALDITKQIAMALSAAHKKGIIHRDIKPHNILISNEGRVVKVADFGIAKAVSNSTMTNIGSIIGSVHYFSPEQAKGKFVTNNADLYSLGIVLYEMLIGKVPFRGDSPISIALQHINDDIDFTSEEKVRIPQSVRTTIKKLTEKSSADRYQTAEELIEDIEYIEKNIDLDFIKEYDDFATKKIDEKEINKVVNPTLAKPAPEKVVKPVEVADLDDDEDYYDDFYEEDDDEEEEEIMRAKKNQRPKSTPSKRTKKKKKKQESPKSRRRLKVIAAVLILILCAQVFLAYKFLFAGGFGNKSLTVPNLVNMTLEEAQSAVEKEGLYLSVKSEEYNSEVDENCIISQTPEGGSTNVKKGDTINVVVSKGSSQASVPNVVGLTLSNAKQLIEENNLKVGTVKYEYSSIYKEGTVLSQSPGAGSSRAQEGDEVNLYVSKGSEKSNTQTPTVPDKKPTTPENNTPTEPGSNSGNSGGNSGGSNSGNSGGNSGNNGSNSGGSNSGNSGGNSGGSNSGDNGGSSGGSNSGDNGGSSGGSNSGDNGDSSGGSNSGDNGGTSSGTGANIGKTE

SEQ ID NO: 53463 - protein, 185 aa, Clostridium difficile
MTEKEKMLSGKGYYANDELLVKEREYCKKLTRLFNNTLEDEYEKREDILRQLFGSVGKQINVEQNIRCDYGYNIHVGENFFANYDCIFLDVCKIEIGDNVMLAPNVQIYTAYHPIDAQLRNSGIEYGSPVKIGDNVWIGGGVIITPGITIGDNVVIGAGSVVTKDIPPNTVAVGNPCRVIKKIEE

SEQ ID NO: 53464 - protein, 792 aa, Clostridium difficile
MNEKSLRVLEYNKIIDLLKKKASSSLGLKYIENLVPNTDFVEVKSMLEETSEAQSIIIKRGSVGLEGIHDIEDKVKRAYIGASLDPGSLIMIADTLRVARRLRNSLSSSDEEDFNYPIIQSLSNSLYVYKDIEDQIYNAIISEVEISDNASSILRDIRRRIAQKNQSIRSKLNSIISSTTYQKYLQDAIISLRGDRFVVPVKSEYRSQVAGIVHDQSSSGATLFIEPMTIVEMNNELRQLKLGEQEEIERILSELSAMVGEVSEDLISNQEILGRLDFAFSKGKLSIQMRGIEPTLNEDKYLNIKNGRHPLLDKKKVVANTIYLGRDFHTLVITGPNTGGKTVTIKTVGLFALMTQSGLHIPADYGSSMCVYDNVFADIGDEQSIEQSLSTFSSHMTNIVSILQNVTADSLVIFDELGAGTDPVEGAALAIAVLEDINSVGAKCIATTHYSELKNYALTKSGVENAAVEFDIETLSPTYKLLIGVPGKSNAFEISRKLGLSDYVISRAKEYINTENIALEDVLQNVEKNRIKAVEDREEAERLKEEIEKLKVEYDEKLEKLVSQRDKMIEKAKSEAFSIIRQAKEEVDIIIKELRSLEQERASKEKNRKIEELRKELTSSMGSLQPTVKSMIVPKVSNKEIKDLKPGEEVKVITLNQNGSVVSVDKKRKEAVVQIGIMKMTLPFKSLQKTRKDVSTNVTKSTRNIIRSKSGSVKNEVDLRGLNLEEAIMEVEKYLDDAYVAGLESVTVIHGIGTGVLKAGLQDILRRNRHVKSQRGGQYGEGGAGVTIVKLK

SEQ ID NO: 53465 - protein, 257 aa, Clostridium difficile
MGKVIAVFNQKGGVGKTTTNVNLSASLGTLGKKILVLDLDPQGNTTSGYGINKNEVENTIYEIMLDGLHIKEAIISTEFENIDVVPSATELSGAEIELTSKTNREYILKNSIKAVIDEYDYIFLDCPPSLGMLTINCLTAVDSVLIPIQCEYYALEGVSQLMETIKLVKSRLNADIEIQGVVLSMFDGRANLSIQVVEEVKKYFKGSVYTTLIPRNVRLAEAPSHGKPVIYYDKRCRGSVAYLELAEEFIDLEEEEW

SEQ ID NO: 53466 - protein, 246 aa, Clostridium difficile
MKVILMKTISKQELEKTLEKHYLWLKNNNAGEKADLKELRLENMDLRGYCLSNIDFSWSDLINLNLEKADLENSIFNNSYLSDCSLKNSILKNADLSGASFRFCDLSNSDIRGANLENSNLEYATLNGVISDESTRFFKLYCPETGAFIGYKKCFNFRMVQLLIPSDAKRVSATSNACRCDKAKVLSITSVDGKESFKSARAYADENFIYRVGETIVAEDFNENRWKESTTGIHFFLTREEAIGYL

SEQ ID NO: 53467 - protein, 93 aa, Clostridium difficile
MSRSTKKGPFVHARLLKKIEAMNASGNKEVIKTWSRSSTVFPQMVENTIAVHDGRKHVPVYITEDMVGHKLGEFVPTRTFKGHKDDEKSNKRK

SEQ ID NO: 53468 - protein, 455 aa, Clostridium difficile
MYFVSMFLMPLKKEYKFYILGGKKMKIAIAGTGYVGLVTGVCLAEVGNENVVCVDVDEQKVKSMKLGIAPIYEEGLEELMVKNYNRGRIDYTTDYKKAYEDVDVILIAVGTPERSDGSANLDYIKAVAKQIAETVTKDTLVVIKSTVPIGTNEEIEDYINRNLKNDVKVELASNPEFLSQGTAVKDTLHASRIVIGVESEWAREILEEIYKPFNQPIIVTNRNSAEMIKYASNNFLALKISFMNDIANLCEIAGANIEDVALGMSYDDRIGSKFLKAGIGYGGSCFPKDTKALHWLSEHNGYELKTVKAAIEVNESQKLKLVRKASKLVESFQDMKVAVLGLTFKPDTDDIREAPSIPNIKYLLERGARVTVYDPIGVNNTKKIFGDSILYADSVDDAIEDAEICFIMTEWKDVLNYDIHKYKEKMKNPLVLDGRNCYKIKDMEELGIEYYSIGR

SEQ ID NO: 53469 - protein, 448 aa, Clostridium difficile
MIFMINIEIPKKVDYIIKELEKNGYEAYIVGGCVRDCLLERVPNDWDITTSARPEVVVELFEKTIPTGIQHGTVTVMIEHEPFEVTTYRIDGNYSDGRHPDSIEFTNNIVKDLSRRDFTINSIAYNSKTGLVDPFNGYEDIQNKYIRCVGNPVDRFEEDALRMLRAVRFSAQLNFKIAEGTKQSIHKKADLIKNVSIERIQTEFNKILVSDSSKLNLLKSTGLLKFIIPEICELEDVTQHNPYHIYDVQKHTLIATEVIEDELYLKLTMLFHDLGKKVTKTTDKNGVDHFYTHSRESVKIAKKILKRLKYDNYTINKVLILIQYHDYRIEPKRKIIKKLLNKLEDVGLFEDLIKVNWADTLAKNPKYAKQKILNLIECEKEFKHIINQKECFNLKDLAINGKDLISIGIKPGKDIGYILNKMLEIVINNPELNEKEILKEKALNIYTF

SEQ ID NO: 53470 - protein, 350 aa, Clostridium difficile
MKSVRFYGIRDTRVEDVDVPKILEKDDVIIKVKVAGICGSDISKYSKTGPHMVGEILGHEFSGEVAQVGKEVRSFKIGDRVAVCPAMPCFECDECKKGLYSRCNNVAIIGNKELGGCFAEYTKVKERNLIKIPDEISYETAAALEPVCIAGHGLFRSEAKVGDTVVVLGTGPIGLFSIQWAKIFGSTKIIAVDVFDEKLDLAKELGADICINAKEKNIVEEIKRLTDGDGADIVIESAGTPLTCGQVLLLAKKGGTVLYAGVPYGDVALTREQFEKIVRSELTVKGTWFGNSFPFPGKEWSAGLYHMQKGDMNVEKLVTHRINLEEAPAYFEKVYKRDIFFGKIMINIDN

SEQ ID NO: 53471 - protein, 542 aa, Clostridium difficile
MNIIISLMGGLGLFLYGMNLMGEGLQKSAGTKLKKIIKLLTSNLFMGVLVGTGVTAVIQSSSATTVMVVGFVNAGIMTLKQAIGVIMGANIGTTVTAQLVSFDLTGMAPVALGVGIILYLFGNKPRIKNIAEILIGFGILFTGMDFMKMAVEPLRDYQGFTDLLVTFGRYPLLGLLLGFGITAIIQSSSASMGMLVALAAEGLVPLSAALPILYGQNIGTCVTSLLSSIGANKNARRAAMMHLIFNVLGTVIFLIFLNKPVVSMVTSWDPSNVARQIANTHTLFNIISVLILLPFTNLIIKLAIKLVPDRAGDIDEDETKTIKYIDDRMIETPSIALANTIKEALRMGEKAKESLNASMEALVEHSTEKIDKTYRRERLINDLQKAILNYLLKLSKAPLDDDSREVVDTLFNTVNDIERIGDHAKNIAELSQVAIDSNISFSEEGQSELDVMYNRVVSAYTYALESMRTDNVDLACKVIKIEEQVDIMEKSCRANHMYRLNNNLCSIENGVIYLDVISNLERISDHAVNIAQQVIAKRLGND

SEQ ID NO: 53472 - protein, 423 aa, Clostridium difficile
MEFIISLLSTPAVLLGVVACIGLILQKKSAVEVFTGSSKTLIGFLIFGIGASAMTGALQNFNKLFQHGFGITGVIASPEAATALAQGTYGFAVSCTLILGFILNLVFARITKFKNIFFTTGHSLFFSCVLVLIMKAHGFDNTITILIGGTILGFMSAALPQFCQPFMRELTGGDEQAIGHFNMIGYGLSGYIGRLFSKHKDDTTETIEFPKWLSIFRDFLMGLSIVMLILFYIATLKAGQAFTQEIAGSTHWLVFPLIEAFTFVAGMSILMSGVRMFLAEITAAFVIISEKYIPGSRPALDVPTVFPYAPNAVIIGFISAYAAGLLAIAIMASFPSIFPVVIIPAAHICFFSGGTAAIFGNTSGGWRGAIAGSFVVGLLLAFLPVILYPVYGTLGIEGATFPNIDYNVVGSILHNILQFIKPI

SEQ ID NO: 53473 - protein, 318 aa, Clostridium difficile
MNLREVTMEFHHVSVLLNECIENLNIKPDGVYVDCTMGGAGHSKEIVKKLSDKGLFIGFDQDKNAISTAKERLSEYESRVKFVHSNFENIKEELEKIGVYKIDGVLADLGVSSHQLDEADRGFSYMQDAPLDMRMDVRCEFSAYDVVNTYTEDELTKIIKDYGEDNWAKRIAKFIVEERANKPIETTGELVDVIKKAIPKKARIVGPHPAKRTFQAIRIEVNNELGVITKMINDASSIMNEGGRICIITFHSLEDRIVKNAFKHLASDCICPQHLPICQCDKESEVKIITRKPILPSEEEIEVNPRSRSAKLRVAEKI

SEQ ID NO: 53474 - protein, 1044 aa, Clostridium difficile
MNLTQTSVKRPLTIIMVFLVLIVFGGIGYKKMSINLMPDIEIPVVMVMTTWTGAGPQDVDEQVSQKVDESLSAVSNVKSTISSSQESVSMVVAQFEFGTNLDEIMNDVRSKVDALQTSLPDDAAKPTVLKLDMNAQAIGQLVISGGNENSSQALRKYAEDVIQPKIESIDGVTSADLKGGKKAQVNVIADPAVLSNYGVSLSTIKGVLSSSNKTFPYGSITQGEDKIVLRAIDKLESLDDIKQIQIPVKGGNTVRLDNLCSVDYGYADKDSIYRYNGKDSLVIDISKQQDANTVKVMQSAYKYVDELNKENPQFKIKIANDTSSYISESINSVMSNLLISAVIAFIVIFAFLKSVRASLVVAVAIPISIIGAIAILYFTGESLNLITASSLVISVGMVVDNATVVIENIFKYRKSGRLSLDDCAIEGTRTVTNAILASTLTTIAIFLPIMFTEGIAKITFGALGKTLIASLAFSFIGAITLVPSVFAKLSRGKNSQKMQEKDSPIFDKVSEAYKKLLSVCLRHQRLVVISSLLIFVASLFGMGFIGMDFMPAADKGELSISIELPKGLSLESNDYYVSMTEKKVSDIPEIKTLITTLTSDSNNSKASIAIELESQKNRKRTTDEIEKEIIDRVATVPDCKINVSQNSSVMGGAGGADFTLEMKGPDLDVLKILGKEAEKEFSSIKGFRNVETSLTDTTQEAQFTIDKHKAQEYGVNTAEIAGMLRTAINGDSVTTATIDDYKVDVNLKFKADTIDSLEDIKQLKVNSATGKEVPLGAFSDIKMADGLQSISRTDGDFSVNITATLDNLDAGTATKLALEKTNKMVIPKDYSIGVGGETEMMNESMASLGFSMVIAIALVYMVMVAQFESFSKPFIIMFCVPFAFVGVVLSLLVSGQSLSTVGMLGIILLIGIVVNNGIVLIDYIEQLRKTNRNNDLIGLVSIGCAARLRPVLMTTATTILGMLPTALSLGEGGETMQPLAIVIMGGLTVSTLITLVLIPTIYLIFDKWENKFSDKMPKIFGKITDKIGSIKRKIIKKPKLKAKV

SEQ ID NO: 53475 - protein, 92 aa, Clostridium difficile
MRNYELVYVVKPNSDEEVREAILNKVKEVVATDGEIVKVDTWGTKKLAYPIAKFTEGFYVLVNFKSAVDVPKEIDRNLKINENVIRHMIVVA

SEQ ID NO: 53476 - protein, 149 aa, Clostridium difficile
MKVILLKDVKGTGKKGEMKEVSDGYARNFLFPKKMAVQADSVAIKELNEKNKSKEIKAQKEYEEAVLLGKQMEEINIEIYSKAGEGGRLFGSITSKEIAEQLKKQKDIDVDKRKILLDEPIRSLGSTFVEIKIHQKVTTKIRVDVKEKQ

SEQ ID NO: 53477 - protein, 262 aa, Clostridium difficile
MYNLIKDVKKLNPLVIHYTNNVTINDCANVTLAVGASPLMSFSYEEVEEMVSVANSVVINIGTMNSNMLDLFLLAGKAANKYNKPVVLDPVGVFASKARAELTSRLLNEVKFSVVKGNVSEIKFIGGFNVRGKGVDSFDEEEDSTEIIRKIAEKLECVVVATGKIDIITNGKGTYKINNGTDKLKGITGTGCMTASLIASFMAVTENILEAATMGVLTMSLSGELANLNNPPIGTFKENLMNAIYQMDIDALSKNSNIEFLN

SEQ ID NO: 53478 - protein, 365 aa, Clostridium difficile
MKLYMSVKTMLKGLKSSFILNLIYFLALPLILSWFLGMVTESMFQNPIKTESTPIVIYDKDNTRLSNDLTKYLKNDLSYILTVKKDDSKAELKLTIPKGYESSLLNEKSNTLNIEKLGTRDDIAILLQDILDTYHEKFYLNNSQKISSEDFSKLFNKNSIDTSIINNNVKQSSYEYFALVSLGFLVIIFIMNNILSNYISESKGLSKRLYSMPITRVQFLIYDFVGLWIYSFIFLLLYVLFFRILGITFKGNFAILLLLCALSSYFMTSISTFVTSFFSKKYGTAIVYALLFLQTIFGGIFSMISDTFTKLTSLSPTYLIGELFSNYETFKTIDSIGDLIFTCLIISTILIALAIVKEKYKWREV

SEQ ID NO: 53479 - protein, 75 aa, Clostridium difficile
MMNKKRRKKKRVCQFCADKNAKIDYKSTQRLQKYITERGKILPRRISGTCAKHQRELTVAIKRARNIALLPYTLD

SEQ ID NO: 53480 - protein, 295 aa, Clostridium difficile
MNKLEIENLSKIYGKKVANDKITVTLENGVYGLLGPNGAGKSTLMKQITTLIKPDEGQILYNGEDIFKMDADYRNILGYLPQEFGVYKNFTAKEFLQYIGALKGLRGKYLNSKIGELLDLVGLYDVRNKSIGKFSGGMKRRVGIAQVLLNDPKIIVLDEPTAGLDPQERARFRNLIAKMSRDKIIILSTHIISDIESVAKETIMIKDGKLLMKGTHKDILSHMENKVYNVQVKNECEVDDIQSKYKVVSIQSDINSIVLRIVSEDIPSEDNIQPVQAKFEDVYMFYFDLEDAREV

SEQ ID NO: 53481 - protein, 210 aa, Clostridium difficile
MIDKESLKKCLKLYLVTDSEMLKGRDFYKCLEDAISSGITTVQLREKNASGREFLRKAMKLREITKRYGVKFIINDRVDIALICDADGVHVGQSDIDVREVRKLIGNNKILGVSARTLEEAICAKNDGADYLGVGSIFTTSTKLDAKSASFETVKEIKEKVDMPFVLIGGINLDNIDKLKCLESDGYAIISAILKAEDISKEVEKWTLKI

SEQ ID NO: 53482 - protein, 259 aa, Clostridium difficile
MEENMKRKVQVKNITIGEGRPKICVPIIGKNKKDIIKEAKELKDACLDIIEWRVDFFENVENIKEVKEVLYELRSYIHDIPLLFTFRSVVEGGEKLISRDYYTTLNKEISNTGLVDLIDVELFMGDEVIDEVVNFAHKKEVKVIISNHDFNKTPKKEEIVSRLCRMQELGADLPKIAVMPQNEKDVLVLLEATNEMFKIYADRPIITMSMSGMGVISRLCGEIFGSALTFGAAKSVSAPGQISFKELNSVLNLLHKSIN

SEQ ID NO: 53483 - protein, 277 aa, Clostridium difficile
MDNIVKVNNISFEYITDEAKLKAIDNLSLDVKKGEFVAIIGHNGSGKSTLSKNLNAILMPTEGNILIDDMDTKEEERLWDIRQTAGMVFQNPDNQIVATIVEEDVAFGPENLGIEPKEIRRIVEESLKSVGMYDLRDRQPHLLSGGQKQRVAIAGIIAMRPKCIIFDEATAMLDPSGRKEVMKTIKRLNKEENITVIHITHFMEEAVEADRVVVMEKGKKILEGTPREVFSKIKMLKEIGLDVPCMTELSSLLIEEGINISSDILTVDEMVMELCQL

SEQ ID NO: 53484 - protein, 806 aa, Clostridium difficile
MSVYNFKEVESKWQKIWKDNNQYKMDTAQTEKPNYYTLEMFPYPSGKIHMGHVRNYSIGDVVARFKKMEGYNVLHPMGWDSFGLPAENAAIKHGIHPHKWTMENIEEMKEQLNLLGISYDWDKEVATSTPEYYRFTQEIFLKFLEHGLAYKKKSYVNWCPSCETVLANEQVVQGACERCKATVLKKDLEQWYFKTTEFAEELLNDLDTLDGWPEKVKTMQKNWIGKSTGADLVFDIDGTDKSMTVFTTRPDTTYGVTYMVLAPEHELVKELVAGTEYEADVEAFVQKMHTMTEIERTAADVEKEGMFIGRYVINPLNGKKVPLWIANYVLVEYGTGAIMAVPAHDERDRDFAEKYNLDIIDVITEDNKMINSEEFNGLDASEGFEGIIDKLEKEGRGKRTINYRLRDWLVSRQRYWGCPIPVVYCDECGIVPVKKEDLPVLLPTDVEFTGKGESPLTTSKQFMSTTCPHCGKPARREVDTMDTFVDSSWYFLRYVDSNNENEPFSKELVNRWHPVDQYIGGVEHAIMHLLYARWFVKAFKSMGMVDFNEPFKNLLTQGMVLMDGSKMSKSKGNTVSPMDIIDEYGADTARLFVLFAAPPERDLDWSEQGVDGCFRFLNRVYRLVDELADVVKKDVEFGELNSQDKDMRYTIHSTLKKVTADLSEKFGFNTAISALMELINDMYKYKELDNINEAVIKEGVQTIVTIIAPFAPHLGEELWTMIGKEGSVFDIDWPKYDEKALVKDEIEVVVQVNGKVRGKLTVNSNISKDEMEKVALEDEKIKGLVEGKTIVKVVAVPKKLVNIVVK

SEQ ID NO: 53485 - protein, 158 aa, Clostridium difficile
MNLKRSNEKREEYRKMYSDKESFLSLIQNFTSVSIAKELTLKNIELETSFICEYKGKEVDIIYKVFSKSGKVSHYIVLEFQTEMDTEIVPRLKSYREQIWKSFIMKKSLEEIEDKNFKLPKVIPVVLYSGPERLSRKKGILDIVESISEFSNNSSMKN

SEQ ID NO: 53486 - protein, 469 aa, Clostridium difficile
MEVSIILVKDIKQDIESMPRKILDISLIEDNKSDLTFFNIEEEDGDETLKALKQSYVTTNYKEETLLNLQGALNSKSDTTSKELKLESYKRYNNALDLAYKNYITSAINMVNKALEINPKDIDILNLRGLLKLLKCDFAKSFESFYTALCYENNHISRKYVNLISSEDFKTFLGRYNHSIRFINEELNYESIHILENIIEEEPELIEPYVILSLLYDKLGNVKKREGYLDKLKELDKDNPVFEKNEEEKEEEKEDTSKNEEIKKVKRKKSILPYIIVGCVLIGMGIYLIQSKKRIENLNNQISSKEEKLSETDKKLGETSKKLEKTNKELNEVKNKEPEREITVADEEDLYYQALNLKKNKEYEKAIDNFKSIVSSGKTKKYISESIYQLAITNKLLGNKDEAIKYYKKYINTYTKNDQYYDDSYYELGMLYYDNGDLKNAQQTFYSLRSEVPDSMYNNSKIKEILSEK

SEQ ID NO: 53487 - protein, 197 aa, Clostridium difficile
MISDSISKRRSIRKYKNQSISHETIEKIIEAGINAPSSKNRQPWRFVVITEKEKESMLKAMSKGIQNEINDNGLLPGSRQHIAGANYTVEIMKQAPVTIFILNILGKSPLEKLSPEERFYEMANMQSIGAAIQNMSLTAVELGLGSLWICDVYFAYRELCEWLNTDSQLVAAISLGYPDEEPSRRPRLQLSDVTEWR

SEQ ID NO: 53488 - protein, 527 aa, Clostridium difficile
MINLEEKYLTRKDTYMIKILEYNGHIRNWKVLCEELGIDSSLCRDERERAILVEAYKTWGYDMANHMHGMFAFALWDTVEKKLFCLRDQFGVKPFYYYETENGKLLYGSSIRKIMEQPGFVKELNEDMLQIYMSFTYVAGENTFFRGVKKLMPGHYLVYQNKTVCIGRYWKPEFHPDNSKSIEEWTDEIHTTLQKIMPEVKSENETAELFLSGGVDSSYILAMSDIEKTGSCGYEEERFDESKLAQQTANILGCKNSRYIITPEEYFASVPYVMYHMEQPTGDASAIVFAIGCKAAAENTNICYSGEGADEFFGGYNIYHKAECYGENLKTFYIGNTNIMNEGEKRKILKKYNPDVLPIEVVKGIYEETEELDTLTNMSNVDIQIWLEGDIYFNIDKMSTAVGLEVRMPLTDTRIFDIASRIPSEYKVKGKENKIAFRTAASKTLPEEIAFRNKLGFIVPIRIWMADDQYNKDIRDKFNSEIADKFFNIDEINEIFNDYISGNSDNWRKIWMIYTFLVWYEIYFVKC

SEQ ID NO: 53489 - protein, 265 aa, Clostridium difficile
MITNINSKDNEKLKYTRALLKSKNRNKESKFIIEGYRIVMLALECMANLDYVFINEEFENKKEHVKLLEDLDKKNTKIYKTTNKNFKELVDTENTQGIIGVVSFKKKKLSESINKKDKFVLILDRIQDPGNMGTIIRTADSAGVDAIIALKGCVDIYNPKVIRSTMGSIFDMNIIDASQDETVDMLKSLDFNIVSSYLNTENFYDKIDYGSKVALVIGNEANGINEELVSKSDILVKIPIYGKAESLNAAISSAILMYEIKKYLI

SEQ ID NO: 53490 - protein, 288 aa, Clostridium difficile
MSIIVKNLTHIYNEGMPFASKALDDVSFEIKDRDFVGLIGHTGSGKSTLIQHLNGLLKPSSGEIFINDFNITDKNLNLTEIRKRVGVVFQYPEYQLFEETIDKDIAFGPSNLGLEESEIHNRVKASMEAVGLDYEGFKDKSPFELSGGQKRRVAIAGVIAMNPEVLILDEPTAGLDPGGRDEIFNLIKDLHEKKNMTIILSSHSMDDMAKLAKTLIVMNHGSVEFMGTPREVFKSNASKLKDIGLDIPQVLELALKLREKGFDISEDILTLEEAKQEILKVVRGRGLC

SEQ ID NO: 53491 - protein, 73 aa, Clostridium difficile
MAAQKNDGAKTKKRFSLFGYLKETKQELKRVTWPTKKELFKNTSIVLTVVISCTILVWGIDTILSGALALLLK

SEQ ID NO: 53492 - protein, 376 aa, Clostridium difficile
MPKENLKKQIDIRMKTEFDGVVFYTTMLLVFVGIVMVFSASFIQSSFKHNDAYYFLKKNVIYAVLGFIVMIITSRIDYSFWKKNATAIGAIAVVLLLLVLTPLGIEANGAKRWLGIGALTFQPAEIAKFATIILTAKLIEKNYDKIKSLTKGVVPLLVVPGIFFALIILQPNLSTAGTVILVTFVMIFVAGMDMKIVFAMIGSGAALFAALVIAEPYRLSRVTSFLDPFQDPLGKGYQVIQGLYALGSGGLFGLGLGKSKQKYFYIPEPQNDFIFAIIGEELGLIGCIIVIMLFVVLVYRCVRIALKTSNVFACMVVIGIGAQIGIQAALNIAVATSSMPATGVALPFISYGGTSLTIFMGAVGIVLNISKHVKIN

SEQ ID NO: 53493 - protein, 254 aa, Clostridium difficile
MTYFNYNDKQCYYNEIGDGTPLLFLHGNTASSKMFNDIIDFYKDEYKVILIDFVGHGKSQMVDKFSADLWFDEAMQVICFLEAMNYKKVNIIGSSGGALVALNVALERPDLVNKVIADSFEGEVPLESFVQNVKIEREASKQDDGAKAFYIYNQGENWEKVVDNDTEAIFEHYKTIGKFFHKPLETMQPEVLLTGSREDEFVSLISSDFFENTFSLLLEKIKNGKMYLFDKGGHPAILSNGLDFSNVAKKFLEE

SEQ ID NO: 53494 - protein, 204 aa, Clostridium difficile
MYLMLILISSLCVIVYSYKITSLYIFKNFKIGILLFFYFLFSQIIFGLIISDNQFDYKNFLNYILLPIISLVYIYPFLCEEYGWRSFLQSILFDRFGKKIGIVMVGTCWSLWHLPLQFTLYSPQTPIIGAIAHLIYGIGLSIFLGYVYMKTKNIWFCSIMHVLINSLGLIFNDSEIIINYHSIIQRLIFILLFYTPFLFTKEYK

SEQ ID NO: 53495 - protein, 123 aa, Clostridium difficile
MARIAGVDLPREKRAEIGLTYIYGIGKATANEILAKAEINPDTRIKDLSEDQVNELRKVIDDDFLVEGDLRREIALNIKRLRDIKCYRGIRHAKGLPLRGQRTKTNARTRKGPRKTVSRKKKK

SEQ ID NO: 53496 - protein, 113 aa, Clostridium difficile
MIYNINNKNKNKFEVNDIMEENIINLIDENGVESQFEIILTLEAEGKEYAILMPLDDEEAEEALIFRIDEDEEGEILIPLESDEEYETVVAVYTAIMEEEGLNYDEDESNGLN

SEQ ID NO: 53497 - protein, 1184 aa, Clostridium difficile
MSMMNRLKPRILGISILFIIIIILTCGAVFKFKFKLDNKLKETTHTYLSEFTEHNIINLKTRLSGQFDMLESIANFIGNLNNINDEMVIDLMDSDVKRSSLIRMTISTLDGECYSNDGITHNVQDRDYFKKAKNGEKNISEPLKSIVNNKEIIVLSTPVYKSGKIVGVLSGIYDSKKLNELLGLSAFDEKADVFVAKKNGDIVAQKTNKNRKTLSCIFQLFDKDNCDEDDCLKTIKENMKNDKSGYFNYNLDNEKFMLNYQPLGVNDWYVFSVVPNKIVSIQSENISYDVYIFALEILLVILIFIIYIACIINNNTKIIINEKEKFKVLTDNILGGVKTCLKDEYMTMTYVSQGFLELTGYSCEDLNKIFKNRFKDMIYKDDLDKFNCIILNQLEKQDKIEVEYRIVRKDGSIIWILERSKSINDNKGSECIQGVLTDITELKKIQEELDSKRFEIQAINDSIVGGIVITEINDDFDSIYLNEGYLNMIGYTRKQLEDELNNKLIKLIFKDDRTELINSINKQLKLSDTFASEQRVEKRDGTIIWILLKGRKMIYDNGKSVLCCVIVDITSAKLLEQELKKSEERHEIILKQTQNIIIEWDIEKDKMNISPNWYNKFKYDPITENATKNIIKSVDIYHDDMDKFISLIKLTSKGSEYEECEIRLRTRDTIYAWFSIKATTLFDNNGKPYKVVGSLTDIDESKREAEKLKERAEKDPLTDLYNKKASQSLIEEYITLDKKRKGALMIIDIDDFKGINDNLGHLYGDAVLSEIANDLINLFRATDIVGRIGGDEFIVFIKDISETRDIINKAEELVKTFERSFLGKGRNYKISLSVGIAKFPQDGMDYMTLFRNADIALYSAKGKGKNCYTLYDKKIDKVQYITNTRNAGDSDNVEMSFKEHITNYIFDILYESSDIEVAVNLILSIVGKHFNVSRMYIFENSDDNRVCKNTFEWCNEGVTSEINNLKNICYKDLGNYLLNFNADGLFYCNDIENLGSDVKKVLKPQGIRSILQCKILEGNEFRGFIGFDECSYNRMWTNDEVNTLTFISKTLSMFLLKMRIQSKLEESLTIQKSVMDNMDIWAYVVDRNTYELLFINKKMLESAPNTHVGDLCYKAIWNNQDKPCKKCPMIYLKDGDDTYKSFMHNKKFEVQANITTTTLKWFDGKDACLIFGSEITSIEAEENT

SEQ ID NO: 53498 - protein, 62 aa, Clostridium difficile
MAKVCSVCGKGKVSGNQVSHSNKHNKRTWSANLRSVRAIIDGAPKRVKVCTRCLRSGKIERA

SEQ ID NO: 53499 - protein, 340 aa, Clostridium difficile
MDYNDLLKSARENFNGTCKVCKICNGLACAGDVPGMGGKGSGSSFIENRKSLEKIKINMRVIHNVSKPDTSIELFGRKMSSPIFAAPVSGTILNMGGKVSEKEYIEPVVRGCSNSGIYAMVGDTNVDTFLLDNLDVLKDNRGNGIVFIKPWNNSKIIDKIRLSEEAGAFAVGVDLDACGLINNQFQENPFSPKTIDEIRELVESTRLPFIIKGIMTVDDALMAVESGASAIIVSNHGGRVLDYTPGTCEVLPDIAKSVKGKITILVDGGVRTGVDVVKMLGLGADAVLMGRPFVTASFGGGLDGVEFFIEKVRNELCETMILTGCQNVKDIDGRVIWNLL

SEQ ID NO: 53500 - protein, 424 aa, Clostridium difficile
MIKLKKVLSLVMVGILSVSILAGCSKKEDSKGKEGKEKLVVWSAPLTDHDADAWKPIFEKFEKENNCEIEFQIVPWDNYAEKYATAISAGEGPDIGYMYAEMFPQFIEMGAVEDLTPYLEKSGTSDNYLYLDDAKMMGGIYGLPIEAANPGVLYYNKDILEKLGEKPPKTWDDFKRICEKATKDTDGDGKIDQWGLAQGWGSKVFGSLNWNWYPYLWQAGGDIYNDDLKSVKFNNAEGLKAANFINDMKKYIPEDALSKDSNEMIESVFGPGKAAFTIMLSSAATSTFDKSFPDLNWGYVTSLEDKTVGSFASVDDLTLMSACKNKELGFKLLEYMLSKESMEAFHKEIPRAPVAKGEKYQGDPRFEEMVTRDKHMYRPLTVGPHGVEIYEYLWKQLQMMIAGDITPEQALNESAKYANGLLAQ

SEQ ID NO: 53501 - protein, 480 aa, Clostridium difficile
MSIYKCSVCGYIYDESKNDKTWDELSEDWECPVCTKGRSYFGKISTVYYEEDEKIAEDIVEDESKLNTEKEGDLNYLSTYLRRDDEVEKHMDIIHEMAVTGKSIIEPMRTKLPVISWDDILIMGAQLNPLPLNEHDEVNTTTIIGKKAKKPMIIENPVYISHMSFGALSKELKIALAKGAAQNKTAMCSGEGGILPEEKEASYKYIFEYVPNKYSVTEENLKNSDAIEIKIGQGTKPGMGGHLPGEKVTEEIAKVRNKPVGQDVISPSCFEEIQSKEDLKKLVDELREVSEGRPIGVKISAGHIEKDMEFIAYAKPDFVTIDGRGGATGASPKLLKDATSIPTIFALYRARKYIDTHGLDIDLVITGGLRISTDFAKAIAMGADAVAIASSALMAAACQQYRICGSGKCPVGVATQDEELRKRLHIENSANRVANFLNVSLEELKTFARISGHKDIHDLSVDDLYTVNSEISNYTNIQHV

SEQ ID NO: 53502 - protein, 462 aa, Clostridium difficile
GIYNSKRIVQRKRTVHREDVKVAGWIRTSRVSKNFGFIELNDGSFFKNMQIVFDEKVENFKEVGKLAISSSILVEGELVSTEGAKQPVEIHAKSIVVEGESDSSYPLQKKRHTLEYLRTIAHLRPRSNTFSAVFRVRSIAAYAIHKFFQERNFVYAHSPIITGSDCEGAGEMFRITTMDLNDIPKTEDGKIDYTQDFFGKEANLTVSGQLNAEIMALSFRNVYTFGPTFRAENSYTGRHASEFWMIEPEIVFADLEDNMELAEDMIKYVISYVLENAPEEMEFFNSFIDKGLLERLNKIVNSEFIRITYTKAVELLIESGHEFEYPVEWGCDLQTEHERYITEQIYNCPVFVTDYPKDIKAFYMRMNEDGKTVRAMDLLVPGVGEIVGGSQREEREDVLLDRINEMGLREEDYWWYLELRKFGTATHSGFGLGFERIIMYMTGMSNIRDVIPFPRTPKNAEF

SEQ ID NO: 53503 - protein, 385 aa, Clostridium difficile
MQSLTPAQHVIKIVNEELTSLMGDVQSKVMISSKPPTILMMVGLQGAGKTTTAGKLGGYFKKQGKKPLLVACDIYRPAAIKQLQVVGEKLDIPVFNMGDKENPVNIAKAGLNHAIKNANDLVIIDTAGRLHIDEVLMDELKSIKSEVKPHEILLVVDSMTGQDAVNVAESFNEALGVDGVVLTKLDGDTRGGAALSIRAVTQKPIKFMGMGEKLDDIEPFHPDRMASRILGMGDVLSLIEKAQENIDLEKAKELEQKIKKQELDFEDFLQQMEQIQNMGPLDKILGMIPGMGNVKDQLGDVDLNGKEMKRTKAIIQSMTTYERRNPGVLNASRKKRIAKGSGTSVQDVNRLIKQLNEMKKMMKMFAGSQKSMKKRGGLGGLPFFK

SEQ ID NO: 53504 - protein, 455 aa, Clostridium difficile
MKEYIINNVEEIREELIDLSKKIWENPELAFEEKYASSIQKEYLKSKGFKIEEVENLPTGFIASFGEGKPVIGILGEYDALPELSQCVSAERKPLVEGKAGHGCGHNLLGVAGVGAVVSIKKLIEENKFNGTIKYFGCPAEEEGGGKTVMCINGCFDDVDCAFTWHPFDINAPWRGGSLANLSVKFKFKGITAHAAQAPHNGRSALDAVEIMNVGANYLREHVIDSIRMHYVITNGGGRPNVVPGFAESWYFIRGKKAKDAEHVLDRLIKVAQGAAMMTETEMEYKVTDGIYDYIPNQCLTDLVYDNMVFVGCPKNTPEEEEFAKKLCDTLTREERLGVATSLQNDKSIVESYIHKEIVDGDKDKGLAGSTDVGDVSYVIPVAQFAMAAWPVGIASHTWQSCSSAGSNIGFSAMINSAKVLACSAYDVFMDTKIIDEAKIEFDKSLDGQKFKPLV

SEQ ID NO: 53505 - protein, 102 aa, Clostridium difficile
MMRVKKGDTVVVIAGKDKGKKGSVLKVYPKTSKVLVEGVNVITKHQKPSAMNQQGGIINKEAPIHISNVMPFDPETGKGVRVRYEVKDGNKVRVSAKSGKEL

SEQ ID NO: 53506 - protein, 217 aa, Clostridium difficile
MYQFFLKGRDPISSLTHFIGACLSLLATIILVFQSVTLQETSLLMIVSVSVFGLSLIALYSASSYYHFLKGTPEQELFFRKVDHAMIYVLIAGSYTPICLNFMEKKEGIIFVTAIWIVAFIGIIIKIFWMDAPRWLSTSIYLLMGWAIVFDINAFNSIPKDCLRLLIMEGVSYSIGAIIYIIKKPNISPEFGFHEIFHIFIMIGSLFHFLAVLLYVL

SEQ ID NO: 53507 - protein, 516 aa, Clostridium difficile
MRKINSQEKNKDSGLLMRALNVVERAGNKLPDPVTIFLLLCIIVVILSAVISNLGVEEIHPSTKEVVKVVNLLEKEQIQSYLGSIVTNFQSFAPLGLVLVTMLGAGVAEKSGFMEVLMKKGISKVPQKLVTVAIVFAGMLSHTAADVGFIILPPLAALVFLGIGRHPLVGMFAAFAGVAGGFAANVMLSTTDVLLAGFTIPAAQMMDPSYQGNPAMNLYFAFISAIVLTFAGAFVTEKFIAPRFTKYNDSTNDKDIQELSELENKGIKYALLSLLVVVVVIVALCIGDNAFMKDPETGSILSSNAPLMKGIVPIITIIFLTPGLVYGKVSKKIKSDKDLVSMMGSSMSDMGGYIVLAFIASQFINLFNLSNLGTILSITGAKLLAESGIPSYGLIIGFILLSGFINLFVGSASAKWAILAPIFVPMFMLLDFNPALTQIAYRIGDASTNPISPLFPYFPVILAFARRYDKDIGIGTVISNMIPYSVVFTLIEIIILLLFMGIGIPLGPGGGISYVL

SEQ ID NO: 53508 - protein, 500 aa, Clostridium difficile
MNLKPEEISSIIKQQIKNYENKVELTDTGSVLTVGDGIASVYGLEKAMSGELLEFPGEIYGMALNLEEEVVGAVILGDDSEIKEGDIVKRTGRIVEVPVGEALIGRVVNSLGQPIDGKGPIAYTKTRPVESEAPGIIDRRSVYEPLQTGIKSIDSMIPIGRGQRELIIGDRQTGKTSIVIDTILNQKGKDVICIYVAIGQKRSTIAQLVSSLEKGGALDYTIVVSATASESAPLQYIAPYAGAAMGEEFMYNGKHVLIVYDDLSKQAVAYREMSLLLRRPPGREAYPGDVFYLHSRLLERAAKLSDELGGGSMTALPIIETQAGDVSAYIPTNVISITDGQIYLQPELFYSGVRPAVDPGISVSRVGGSAQIKAMKKVAGTLKLAYSQYRELAAFSQFGSDLDEDTKKRLAQGERIVEILKQGEHQPIKVENQVMIIYAVINNHLEDIPIDNIARFESELYAFVDNNYPEISRKILGGEDFTHDLTDAINEFKEKFVVEV

SEQ ID NO: 53509 - protein, 251 aa, Clostridium difficile
MSNIKIQIDKTVEWLINKVNEANAKGLIVGVSGGIDSAVVANLIKKAFPENSMGVIMSIKSNPQDREDALKVIEGCDIEYLDLDLIEPQSAILDMVVGNLKDKHLYREEYLKMTDANLRARVRMSTIYTIANNLGYLVVGTDNAAEIHTGYFTKFGDGGVDILPIANLTKGEVYEWAKELGVHEDLINKAPSAGLWEGQTDEDEMGTTYNMIDAVLEGRLDEVPKRDQEIIERLHRLSEHKRKTPAQPPKF

SEQ ID NO: 53510 - protein, 433 aa, Clostridium difficile
MEEMSMEKIVNDILKEEVYYEKLQNGLDVYFMPKRGFMKKYAILATNYGSNDLEFVPIGEDKKIRVNEGIAHFLEHKMFEQPDGGDAFDKFSKLGVNANAFTNFTMTAYLFSATENFYESLEHLIDYVQTPYFTDENVEKEKGIIAQEIKMYNDDPDWNVYFNCLKAMYVNYPARIDIAGTVDSIYKITKEELYKCYNTFYNPGNMALFVVGDLDVEKVIDVTKKSNNYKVDRLSKSIERFYPEEPESVKEKEVIEKFPISMPMFNIGFKDSNVGLKGKELLRKEIVTDILVGMLFKKGSKLYEDLYMQGLINENFGAGFSSQVDYAFSIIAGDSKEPKKVKEIILDYIEKSKKEGLSKEEFERTKKKKIGSFIKCFDSINFIGNSFISYVFKDINLLDYLDIIKDITFEEVEERLKEHFKEEYCVISIVEPK

SEQ ID NO: 53511 - protein, 449 aa, Clostridium difficile
MGKINFDYSKATEFFCQNEIDVMQPYVDVAHDMLHNKTGLGNTFLGWIDLPKNYDKEEFDRIKKSAEKIKSDSDVLLVIGIGGSYLGSRAAIDMVSHSFRNGLKKEQRKAPEVYFVGHNISSTYIMDLLDIIEGKDISVNVISKSGTTTEPALAFRIFKDYLEKKYGKEEARKRIYATTDASKGALRQLATEEGYETFVIPDDVGGRFSVLTAVGLLPIAAAGLDIDAMMKGANDAREAFQNPDLKSNDSYRYAVARTILHRKGKDVELLVNYEPQLHYVSEWWKQLYGESEGKENKGLFPASVDFSTDLHSMGQYIQDGKRLLFETVLNVENCKRNITISSEEVDLDGLNYLAGKTVDFVNHKAFEGTLLAHTDGKVPNLVINIPQLDEYNFGYLVYFFEKACGISGYLLGVNPFDQPGVEAYKKNMFALLGKPGYEKEKEELEKRLK

SEQ ID NO: 53512 - protein, 435 aa, Clostridium difficile
MSWQELYQSKLCSATEAVKQIKNGDTVVFAHCVGEPPALVEAMIENAEQYKDVEIKHMVSLGSGGYTAKGMEAHFRVNPMFVSGNVRKAIENGDGDFTPAFFHEVPKLLREKRLKCDVVLAQVTPPDEHGYCSLGTSVDYTYEAIKTARTVIVQVNDQFPRTYGEVVHVSEFDYIVEKSQPLFELQPAKIGEVEEAIGKNCASLIEDGSTLQLGIGGIPDAVMLFLTDKKDLGIHSEMISDGTLALYEKGVINGKYKNFDKEKMTVTFLMGTKKLYDFANNNPAVEVKPVDYVNHPAIIMKQHKMVSINSAIQVDLMGQVVAEAMGLRQFSGVGGQVDFIRGVSMGEDGKAIIAMPSITTKKDGTVISKIVSIVDEGAPITTSRNDVDYIVTEYGIAELKGKSLRERARNLINIAHPSVRESLAVEFEKRFKEKY

SEQ ID NO: 53513 - protein, 152 aa, Clostridium difficile
MSNGIISKFKNWIVDEEEDYIEDEYESGMDDIVQEEEMNSGFSTAKANKIVNLHTTSQMKVVIVEPKVYDEAATIADHLKQRRAVIVNLEGLTNSEVRKSIFNFMNGAVYVLDGSIQKVSKSIFILAPNNVDIDANMKKELESKAFFPWQNK

SEQ ID NO: 53514 - protein, 136 aa, Clostridium difficile
MNKKKILVPIDGTERSMHSLEFIKGIFKKDEVEVEIMNVKELVFIDGISLAEEIKNSENLGRRILDKAAEIMGEYDVKVHFTFGYPGDEIIRKAKEDNVDFIVMTKSTKKGLTRMIGSVTASVVKQAKCIVMIVPE

SEQ ID NO: 53515 - protein, 739 aa, Clostridium difficile
MNTIYVFSIRRILKTKIKKSSIISLVIAFSMVFTAFTPIVSYADEVTSNDTILNGEEQSNGQTPDVEKPSDGQVPGGEKPSDSQVPDGEKPSDGQVPDGEKPSDGQIPDGEKPSDGQIPDGEKPSDGQIPDGEKPSDGQMPDGEKTSDSQTPDVEKPSDGQMPDGEKPLDEQTPEEEKPLEEEIVIEEMSLKQDIDKILDMTLSQINKIVYNFWEDEEDVKADEQSEINQVFTSEDSFISLWYDKKAKVKNSCLLKEIDGSDRPYHDLRFDDITKTLTFDYVIKGLVGASSKDDKYVIEGEDGEQTAFCYNNHLRPPSSNGKSPYLPAEDFNGQENQNEEAVKSILYAGSEFDGFGYKQQFNLGGEENELMTYSATQSAIWIILGQMDEQERLKQYQGSINLCDKLIERAKTEEERAEYQKKKEVAINIKAYLEALLKAGREELKPNNTGKPSLSNGLTKINFEKNEDGTYETEAVALVGYSGVVKLRLPDGVTAYDVDGNIIGTGEVEISTQQKFKLKSVGKPDAKANISAVSYDYIFPKAIQYYKAVLDLGQKDHSSSLPSSKQNLLSYTIEKKNGQEVNFNIGLPTDDDDVVNPPVPPIDDDVVNPPVPPTDDTNGHKPKPSPPIDDTVINPPVPPMDDTIINPPVPPTEDAVLNPPVPPMEDAVLNPPVPPTDDTVLNPPVPPVSDTVEKTPELSRDDTIVKSPKTGDETQLMSYVFISVIAICGLAYQCKIKRN

SEQ ID NO: 53516 - protein, 403 aa, Clostridium difficile
MRFIHTSDWHLGKSLEGHSRIEEQAKFCEEFIKIVESNEIDMVIIAGDVYDTSNPPAQAEKLFYQTVSRLANNGQRCVLIISGNHDNPERLSAITPLAHEQGILIYGYPLSATIEAKYKGFEITYATQGCTKLNINGENIVVATLPYPSEKRLNEVFSSEDEFEKQKNYSEKVGDIFRSLEENFRSDTINIAVSHIFVIGGESTESERPIQLGGSFLVERKDLPEKAQYTALGHLHKQQKASERLNAYYSGSPLQYSKDERAYTKGAYIVDIKAGEKPIIEDVYFNNYKPIEVFKCNGIEEALDICEQNQDREIWSYFEINTDEIISQNEIKKMKELLKDIIEIKPIITSCYEQESVDIKEKSMAELFREFYSFSKGVEPKGELMDLFLDIISEEGESADETN

SEQ ID NO: 53517 - protein, 797 aa, Clostridium difficile
MLVSLKWLRDYVDIDIDVKEFADKMTMTGTKVETIDYYGEEIENILVGKILEIKQHPNADKLVVTKVDIGDKVVQIVTGATNISEGDYIPVAVNGSKLPGGVEIKQTDFRGELSDGMMCSAAELGIDEHYIEEYKRGGIYILDHEDSYELGKDIKDVLGLKDALIDFELTSNRPDCKCMMGIAREAAATIGTKVKYPEIEVKESDEEIDFKVEIDNPDLCRRYVARMVTDVKIEPSPYWMQRRLTEAGVRPISNIVDITNFVMLELGQPLHAFDINQVETGRIVVRNAKDGEKLVTLDDVERTLDKDMLVITNGEKSLGLAGVMGGANSEITSNTKTVLFESANFKPENIRMTAKKVGIRSEASSRNEKDLDPNLAEIAANRAAQLVEMLGAGKVLKGVVDVYPNKPEPKKLVVNPQRINHLLGVDVPMEQFVGILESLEFKCNLVANDKLEIDVPSFRTDMEQEADVWEEIARIYGFENIPSVQLEGNTTAGIKTSKQKFMDALKDNSTAVGLNEILTYSFVSPKGVDKIRVPEGNAKRNFVKLLNPLGEETSVMRTTLIPNMLDVLSTNVSHKIEEVSAFECGHIFIPQDSELPKEENRMCVGMYGKDVDFFTLKGTIETILVNVGFKCYEIEPQDNNTTFHPGRCAKIVYNNKYVGTLGELHPDVIENYNLGQRVYVAEIDIDFVFDNSDRTKNYVPLPKYPSTSRDIALIVKDDVFVKQIEDIIKENGQGLVESYKLFDVYKGSQIEAGYKSIAYSITYRSKDKTLTDEDVAKVHDKILSELSEKLNANLRSN

SEQ ID NO: 53518 - protein, 194 aa, Clostridium difficile
MIIIGKIWFYMVSIGIIGSLISKNMGELNKVILSETSKGIEFAISLAGIMALWMGIMNIAKESGLIEKIGQKLNPIMRRLFPSIPKGHKAMSYIVMNIALNMLGAGNGATAFGLKAMSELQTLNNKKDTATNDMIMFMVINISSIQIIPFTIIKLRMDMGAQNPSEIIFTTLFATIISTAVAIITCKFFQRRYR

SEQ ID NO: 53519 - protein, 37 aa, Clostridium difficile; identical to SEQ ID NO: 51732

SEQ ID NO: 53520 - protein, 230 aa, Clostridium difficile
MNTKVLVIDDEMHIVELLKFNLEVSNYEVSYSYDGFDGFIKAKEIKPDLILLDWMLPNISGIEVLRKIRSDKDLKNIPVIMLTAKNMENDKVEGLEIGADDYITKPFSIKELLARISSVLRRYNLTSLGEENNILTTGNLKLDLSKHEVTKGSEKIELTLKEFELLKLLIQNKGKVLSRNYLLDKIWGYEYYGETRTVDVHIRYLRKKIEDEDKSEKYIETIRGVGYKID

SEQ ID NO: 53521 - protein, 66 aa, Clostridium difficile
MKNGIVKWFNNEKGFGFISVEGEDDVFVHFSAIQNDGYKTLEEGEKVSFDITQGNRGPQAENVNRI

SEQ ID NO: 53522 - protein, 613 aa, Clostridium difficile
MKIRRYLILVIIILITTSQSFISYGLERFEEITIFHTNDIHGRYAEGDDHIQIGNLATLKKETPNSILVDAGDCLHGLPIVNMDRGKSAIELIKCAGYDYITPGNHDFNYGKDRLFELSKSANLGEHTLKFLSSNIFENGKKVFDSNDIKEIDGIKIGFFGLSTQETKSKTGFKNVEGLEFKNPIESATEQVNELKGKGANVIVAICHIGTNSLSKPNSIDIANEVQGIDLIIDGHSHTKFENGKQVGDTLIVSAGQYLENIGEIKLTLDTNDVENIKIENKSVRLIGKEEALKYKLDSAVSKKVDEIKEQQEKILDKVIGVTTNTLDGSYENVRTKETNLGNLISDILLDKTKADISLFNGGNIRDTIEKGNITRRDIVDVFPFNNTIVTKELTGAQIKDVLEHGVKLYPEKSSAFLQVGGISYYFNPKQKEGEKITNIQKEGKPLDLNKKYVVATNDYIASGGDEFPCFSKEPILKEFGNLESAVIEYIEYKKEISKNVDGRIGIKSKDELISKNHESDLILSENEKNINDNEENLSNNIKSSDSDKNKSLDKTSSRESSNLGISKREAKEKSPKTGDLGFSNSIIIFIVSSTLICLLNFNQKELKDKKSK

SEQ ID NO: 53523 - protein, 742 aa, Clostridium difficile
MRHLKKTNSLKEILNWNNIKNLRPSKGLKNILEIFKSDLKDIRGNYAVLVIVLGLAFLPSLYAWFNIKASWDPYGSTANMLVAVTNEDKGNEIAGQKINVGDQLIEQLKDNKSLGWQFVDEKTALEGVKKGTYYASLKIPKNFTKDLTSLITDDVKKGEIIYTVNEKINAVAPKITDKGASTIQLQVNQTIVKTVSEIVLGISNGVGAGIEHSLPKLTKVENSLIDLQKRFDHINKTVDLASDATSKLSDTVKDIKSDLPTIKKTLNDTKLLSSDLKKFLEDTNDNLDELSPLIKSDLNLMVDLSSSASSLTLNLIDAVNSGSEDVPKLIDNLSEKLSNLQSLNDTLVDFLTKLNQLTSNNRLDDVIDNLEDSSNKIDSSISTLNDIKNKVISGQQPSISALNNVLSLSNGIGRINLNILNNFDSKISKPINNIFANSIKVANDIITVLDKAEAKLPKVEEILTTSLKLSGNAQESISLIRERLPLAKGMLDDLIDTLSKISNGEDMKKLVSLLESDILTKSNFLKEPVEVKTEKLYPIENYGSAMTPFYSVLSTWVGILLISALLSTSVHGNYKPYEIYFGRGLTFLSIALVQGFIIGTGDILLLGVTAKHPILLIVLLMFTSMVFNFIVYSLVSVFGNVGKAIAIVLLVVQIGSSGGTFPIQVTPTFFQRINPIMPFTYAIGATREAVGGIYAPNLTKDILVLLLFMILSICLNVLLKGPINRVIKPFNDKFGDSNLTGH

SEQ ID NO: 53524 - protein, 275 aa, Clostridium difficile
MRDHKGLNEIARIIRRDIVSMIHRAKSGHPGGSLSVVEILTALYFDEMNVDSSNPKMEDRDRFVLSKGHAAPALYATLAEKGYFDKEELNGLRKIGRMLQGHPDMKGTPGVEISTGSLGQGFSVACGMAMASKLDNAPWNVYTLLGDGEVQEGIVWEAAMSAAHYKLDNLIAFLDNNGLQIDGDIESVMSLGSIVDKFKAFGWNVIEIDGHDFDQIFAALDIAKSTVKKPTMIVAKTIKGKGISFMENQAGWHGTAPSDEELEKALLELGGADNE

SEQ ID NO: 53525 - protein, 429 aa, Clostridium difficile
MEDLNSIYFFIVMLSIAIVILAVRYTITLRKYLKEFIYVSKKVSNNEYHARLNISAKGELGELARNFNHMIKNMDKTLEEVQYKHLQLRSILKSISHGILAIDVNGNILLINDEAKEMIKSEPNQLVEGHNINVVIKEEEILKQILQFIGSKDNETANITTKDDIVYKIKVDPVYLQNTNNVIIGSIVNIEDITKKVKLENMRSDFVANVSHELKTPLTSISGFVETLKSNENIDVNTRNRFLEIIESESDRLKRLIDDILLLSFVENKDTLLMENVVVYDVFKEVYEITQHSASEKNIEVLYKCDDKSISILSNKDYIKQVFLNLVDNAIKYTQDNGIVQVVVLKDEEKIVIKVIDNGVGIPKEDVERIFERFYRVDKARSRDVGGTGLGLAITKHIVKSLNGCIKVKSELGIGSEFIVTILQKNFLK

SEQ ID NO: 53526 - protein, 1432 aa, Clostridium difficile
MESIKEYLDKLEINNSGLGKQLKEVYINRVVYFKEDKIVYFYLTSKDIVSHELLDKFKEELMYKLDYFKDMRMKIRFTGLERKSNKDVIKKYWNNILYILKYLCPSIAGWYKQVEFLCLEEELKIKLPKGIFYERLMKKNVTYVLKTVLSEELGLDLNITIEKAVDEKVNKERLIRINDREMEEKIRALEIGKVNNCEENEEESYVIKSDVDENLIYGDNANAMIENIVELNASSGTVAVVGDIFDVDTKELKNGKILMIASITDYTSSISCKLFLTDTNKDGVLENVKKGAYLKIKGDIVYDTYQREISMMISGIRKETRIEREDKSEEKRVELHAHTQMSSMDAICSVKKLVERAAKWGHSAIAITDHGVVQGFPDAMNAGKSNNIKILYGVEGYLVEDDSLIIEDANDKELSQTFVVFDIETTGFSNTNDKITEIGAVKIENFKIVDRFSELINPEKDISYKIQELTGITNELIKDKPTIEEVLPKFMEFVGDSVLVAHNAEFDTGFISQKCREQGLLYNNKKVDTLMLARVMLPNLKRHRLNVVAKELGIPLLNHHRAVDDAEATALIFNKFLQMLTEKGAKTLSDVNNILGKIDYTKLSTNHITLIAKNSIGIKNLYKIISDAHVNHFFRAPRILRSVLNEYKEGLIIGSACEAGVVFQAVKKNVSDEEMKKIIDLYDYIEVMPIDNNRFMIDKGEVKDEEELRELNRKLIDTAKKFDKIPVATGDVHFLDKHEAVLRKVLKYSQGFKVDEEETYLHFRTTDEMLEEFSYLGEELAYEVVVENSNLIADMVEDIKPIPDDTYPPIIEGSDVELREMCYKKAKRIYGDPIPEIVQKRLDRELNSIISNGYAVMYIIAQKLVAKSLSDGYLVGSRGSVGSSFAATMSDITEVNPLPAHYICENEDCKYSFFYEIGEWGSGVDLPDKDCPKCGRKLAKNGHDIPFEVFLGFEGDKEPDIDLNFSGNYQPTIHKYTEELFGEGYVYRAGTIGTVAEKTAFGYARKYVEENNISVPNAEVLRLSNGCTGVKRTSGQHPGGVMVIPDYKDVYDFTPIQYPANDTSCGVITTHFDYHSISGRILKLDILGHDGPTIIRMLEDMTGINITEIPLDDKETMSLFTSTEALGVTPEEINCPIGCLAVPEFGTKFVRQMLLDTKPTTFAELVRISGLSHGTDVWVNNAQDLVREDIVGLKDVISTRDDIMNYLIFKGLPPKMSFTIMESVRKGKGLKPEHIEEMKKNNVPEWYIGSCKKIKYMFPKAHAVAYVMTSFRIAYCKVHYPEAFYATYFTTKVEDFDADLIVKGLDAIKSKINEIESLGNDATTKEKGMLTVLEVALEMYARGIKLLPVDIYKSDATEFIVVGEKTLLPPMAAIQGLGGNAAINIQNERKNGEFISKEDLRKRTKISKTVIETLTNHGSLENMSERNQLSLF

SEQ ID NO: 53527 - protein, 301 aa, Clostridium difficile
MNIVVGTRGSNLALIQTEWVINELKKKYPEISFEIKIIKTKGDLIQNVSLDKIGDKGLFVKEIEQQLLDGKIDIAVHSMKDMPSYLANGLKFAHTPKREDPRDVLILREGYKNLDDLPHGAVIGTGSKRRKFQLLKQRPDLNIVQVRGNVETRIRKIKDENMHGIVLAASGIIRANLQDKISSYLPVDVVIPAPAQGALAIEIRSNDSAIEGIVNSLKDENTEIQILAERGFLDGVNGSCHIPMAAYCEIIQDKIHLTGLYGDSEGKKVVIKSIDGDISSPRELGLKLAKLVLKEYENYEG

SEQ ID NO: 53528 - protein, 363 aa, Clostridium difficile
MYLCYNLYKYIYLGGNNMNLNLTNTINLMKKYLDIPSPAGYTENAVLEIKKDFENLGLDTILTKKGALIATLPGEDDSNQITISAHMDTLGAIVKEISSDGTLKYHKVGGGCWAAIEGENCTVITRKGKKIRGSVVFKYASTHIYGQTKAATERNEETMIIRLDEKVFTKQDVLDLGISVGDFVCLDHRFEATESGFIKSRYIDNKSAVAMVLEICRYFKENNLTPKHTTNFYISNYEEIGHGVSKCLPEKTKEFVAIDIAPTGPSQTSSEHGVTIVAKDNLSLYDFNLRNKLVDVAEDNNLDYAVDVFTFYGSDASEAIRWGEDVQIACVGPGTNNSHHYERTHIEAIENTLKLLINYMLKE

SEQ ID NO: 53529 - protein, 281 aa, Clostridium difficile
MCIKFTKREIVMKKILGILGLVACLTLGTVGCNSNEDKKDNGKQEKTTKSSDSVELNISAAASLKEAMAKIEEEYKKVDSNVKLTVNYGASGSLQQQIEQGAPCDLFISAGQKQMKVLDEEKLLVSDTMKDLVKNDLVLISSADSSVSGMKDLTTDKVKKIAVGEAESVPAGKYADEVLTNLNLKDKLKDKLVFAKDVKEVLAWVQSGNADVGFVYFSDTVNNDKIKVVEKTDEKTHSPITYPVSVIKASKNVDAAKKFEEFLLSESGQKIFEEFGYKKVE

SEQ ID NO: 53530 - protein, 114 aa, Clostridium difficile
MDFNRTKGLKKDSDFRKVYKHGKSFANKYLVIYILKNKSDYSRVGISVSKKVGKAITRNRVRRLIKEAYRLNIDEKIKPGYDIVFIARVSSKDATFKDIDKSIKNLVKRTDISI

SEQ ID NO: 53531 - protein, 291 aa, Clostridium difficile
MRDYVLRATSGNGQVRAFVATTRNTVEEARRLHETTKVATAALGRTLTATSIMGLMMKNDSDKLTVIIKGGGPIGTIIATSDSKGMVKGYVGNPQVEVEDYPNGKLNVAAAVGTEGVVKVIKDLGLREPYNGTYPLVSGEIAEDFTYYFAVSEQTPSVVALGVLTKEDEVEFAGGFIVQLMPDAEEETIAKLEENVAKLPSITNMLKEGKSPEDILNIVLDGLEPKILDTCEVGFMCECSKERVKTALVAIGKKSLAQIIEEDKKAEVGCQFCNKKYMYSEEELLEILKEM

SEQ ID NO: 53532 - protein, 329 aa, Clostridium difficile
MTRERSFMMLGITELTYTALIAFLIVIIIGPIFIPMLRKFKFGQTVRDDGPQTHLAKNGTPTMGGIIMIVAILITGLTRVKVSHDMAVGLICIAGFGFIGFLDDFIKIKLKRSLGLKAYQKIILQVALSFYVAFYQYTSSSSASQLMIPFTDFVINVGILYIPIMMFIIVAIVNAVNLTDGLDGLASGVTLIVSVFFMLFASSIAGNTEVAVLAAATVGACLGFLGFNSYPARVFMGDTGSMALGGAVVAFSVLTNSVLIIPIIGGIYFAEALSVLIQVGYFKATRKRFFKMAPIHHHFEQCGWPETRVVFIFWIITVVLAWISIIAVF

SEQ ID NO: 53533 - protein, 212 aa, Clostridium difficile
MSNQRKDFDITNDMFQESIPITTKIILEDMPSNDELNHVFSKGCERKMKKRKIVLITLLLIGVLLLGSILYNLFLGKTANISMLKESWNFDIPIPNKEIEVFDTQDSINGDGQSYFIQGFSEKNFKKVFNLKGGIVVSKDNINEIEKYIDKFKRDSVNINKSNKNKIEEDFKKYKLEVKKDDKYIYKRNYENYVVLIIKKDEQKLYSLIWNQ

SEQ ID NO: 53534 - protein, 380 aa, Clostridium difficile
MNNMKCLINGKIILKNQILENKVLVFDEKIIDIADSVPKDCEVIDADGKYISPGLIDIHIHGNMGKDTMDSTDESIETISKSIMRHGVTSFLPTTMTMDKEHVYDALEVIKKAQNRKLEGAQVLGAHLEGPFINENYKGAQNEKFIINSKYEFIKEYKDVIKVITYAPEKDIDFDFTREIKRCTDIVLSIGHSNANYDQAKEAINLGVTNVTHMFNAMTGLNHRDPGVVGAALTTNVYSELIADTIHINKDLFQFILNNKGKERLILITDSIEAGGLEDGNYSLGGQKVIVKGNEARLENGALAGSVLSLNKMVFNFLDNTNLKVNEAINLASLNPATSLGINDKKGSLEIGKDADIAVFDENLDCKMTLCLGEVVYKNI

SEQ ID NO: 53535 - protein, 385 aa, Clostridium difficile
MQKITVPTWAEINLDNLRFNLNNIKNLLEEDIKICGVIKADAYGHGAVEVAKLLEKEKVDYLAVARTAEGIELRQNGITLPILNLGYTPDEAFEDSIKNKITMTVYSLETAQKINEIAKSLGEKACVHVKIDSGMTRIGFQPNEESVQEIIELNKLEYIDLEGMFTHFATADEVSKEYTYKQANNYKFMSDKLDEAGVKIAIKHVSNSAAIMDCPDLRLNMVRAGIILYGHYPSDDVFKDRLELRPAMKLKSKIGHIKQVEPGVGISYGLKYTTTGKETIATVPIGYADGFTRIQKNPKVLIKGEVFDVVGRICMDQIMVRIDKDIDIKVGDEVILFGEGEVTAERIAKDLGTINYEVLCMISRRVDRVYMENNELVQINSYLLK

SEQ ID NO: 53536 - protein, 356 aa, Clostridium difficile
MSTEITNVNAFDLSDISESDKNEKIEGEGLKKAAVLLMTLGPDVSSDIIKSLPDKQVQKIGLEIANISSIASKERREILKEFVEINRAKDYVIEGGLEYARELLSNALGNAKANKLLEGISINTSTKPFKHIIKLDVKKILEILRNESAQTIAVLLAHMEPENGAEVLSYLDFDLQNEVAIRISSMGSISPEVIKVIESSLEDKLHSISGDDFKDYGGVSTLVQILINSDRKTEKNILGTIEEQNPDLAAQIKSHIFVFEDIVKLDDISIQKVLKEVTMKDLVYALKGVDDAISDAIYRNQSSRAAEALREEMEMVGVIKVTQVEAAQQKIVNSVRKLEREGAITIVRNFGDDFVE

SEQ ID NO: 53537 - protein, 343 aa, Clostridium difficile
MVLNMEKVCVLGTGSWGSALALGLAKKGNDVSMWTRKEEQAKKINRTKENTDYLPGVLFPNNITISTDIEKTIKDCKVIVLAVPSQAVRSTCQKIKPFIKEGQVIVNVAKGLEKGTGLRLSQVCEEELPQNPYVILSGPSHAEEVARDIPTTVVVASKDLKIAQMIQDLFMSPKLRVYTNPDIVGVELGGALKNIIAFGAGICDGLGYGDNAKAALMTRGISEMSRLGIAMGANMSTFAGLSGIGDLIVTCTSMHSRNRRAGILIGKGMSLEDTLKEVKMVVEGITATEVAHDVAEKLDIDMPITNAIYSVIKKGSNPKEVGIELMMRSKKHEMEEVVLGDDI

SEQ ID NO: 53538 - protein, 685 aa, Clostridium difficile
METKKTKFITKDIFKTSIIEAFKKLNPKYMMKNPVMFVVEIGFIVTLILTIVPSLFGDEGNNLRAYNGIVTIILFITVLFANFAEAVAEGRGKAQADTLKKTRKDTVARVIDTLGNEKMISASELKLGDIVLVNAGEVIPNDGEVIEGIASVDESAITGESAPVMRESGGDFASVTGGTTVVSDWLKIRITTKPGESFLDKMIALVEGASRQKTPNEIALNTLLVGLTLIFMVVLISLYPMANYAGVKIPISTMIALLVCLIPTTIGGLLSAIGIAGMDRVTRFNVIAMSGKAVEACGDVDTMILDKTGTITYGNRLASEFIAVGNADSKDLINYSVMCSLKDDTPEGKSIVDLGMKLGSTGKTKEAEEAEFVEFSAQTRMSGINLADGRAIRKGAYDSIIKRVKESGGTVPEDLEENVNRVAKLGGTPLVVCVDNEIYGIIYLKDTVKSGLVERFARLREIGIKTIMCTGDNPLTAATIAREAGVDGFIAECKPEDKIDAIKKEQLEGKIVAMTGDGTNDAPALAQADVGLAMNSGTTSAKEAANMVDLDSDPTKILEVVEIGKQLLITRGALTTFSIANDVAKYFAIIPAIFTLAIPQMEILNVMKLSTSFSAILSALIFNAIIIPCLIPLAMKGVKYRPMKSQAMLMRNMLIFGLGGVIVPFLGIKLIDLLITPLVMVLNLG

SEQ ID NO: 53539 - protein, 204 aa, Clostridium difficile
MYCGQHIKLPKLGMVKIRDKQVPQGRILNATISKEPSGRYYVSLCCTDVDIEAFENTNNHIGLDLGIKEFCISSCGEFIENPKYLKKSLNKLAKLQRELSRKTIGSLNRNKARLKVARLQEHIANQRKDFLQKLSTKLIKENDIICIEDLQVKNMIKNHKLSRSISDVSWSEFIRQLEYKANWHGRQIVKVGKFFASSQICNKC

SEQ ID NO: 53540 - protein, 249 aa, Clostridium difficile
MLKVIATGYDGKMGKILADTIREDNELELVCVAARGLDSYEGDLKIYEDMSTIVEEADVVIDFSHHSNLDNILSYVLKTKTPLVIATTGYNDDEMNKIREAAKVIPVFQSYNMSLGVNVLVKLVKDAAKLLEGFDIEIIEKHHNRKVDAPSGTAVMIANAIKEVLPNVENNYGRYGRSAKRQPNEVGIHAIRGGNIVGEHDALFAGDNEVLTISHQAQSRGIFASGSIAAAKYLVKQKPGFYNMDSMLG

SEQ ID NO: 53541 - protein, 424 aa, Clostridium difficile
MDKLLAVVQYILNMGPTVILPITIVVLGMIFRIKFTKALKSGLTIGIGFVGINLVVNLLTSTLGPAAQGMVERFGLNLTVIDVGWPTTASATWASPVAPILIPVCLLVNLLLLYFNKTKILNVDIWNYWHFIVAGAVGYIVTGSYVWAIFCAILMELLVLFIAEKTAKNVQEFYDLEGIALPTGSTASFAPLGYLVGKFVEKIPGINKIQADPDSIQKRFGIFGEPMMMGIILGIILGALAGYDVAGIFNVGISMGAVMLLMPRMVRILMEGLIPISESIRDFLQAKYGDRELYIGLDAAVATGHPAVISTALILVPITLFLAVILPGNKVLPFGDLATIPFYMAFIVCFRKGNIVQSVITGTIVIAISLYMATNFADVHTQLLQQANMMPKGTTMVTSIDTGGNLLKWGILKLSQLVSSFGIF

SEQ ID NO: 53542 - protein, 99 aa, Clostridium difficile
MYKNINKKQLKEMMKNEKDVLLLDVRTKDEFKEYKIENAINISLQELINNIDEIYDYKDKKVVVYCRSGHRSVTACNLLAEEGFEHLYNLNSGIIDYMS

SEQ ID NO: 53543 - protein, 486 aa, Clostridium difficile
MFNELKTKENVYKNLINGKWVESNSRKPIEIYSPIDNSLVGKVQSMTKHEVDEVIKNTKESIKVWAEMPVYKRANIFHKAADLLLENIDEIANILVLEIAKDIKSARAEVERTADFLRYTADVGKNMEGEAISGDNFPGGTRNKMSYVSRVPLGTVLAISPFNYPVNLSMSKIAPALIGGNAVVLKPATQGAISALHVVEIMRKAGIPDGVLNTITGRGSEIGDYVVTHKGINFINFTGSTEVGQHISKISGMVPLLLELGGKDAAIVLEDADLDFAAKNIVSGAYSYSGQRCTAVKRILVQESVADKLVGKIKPLVEKLTIGNPMDEVVITPLIDNKATDFVQGLVDDALHKGAKLITGNVRKNNLFYPTLLDNVNVDMKIAWEEPFGPVLPIIRVKDINQAIEIANQSEYGLQSSVFTSDIDKAFYIADKLEVGTVQINNKTERGPDHFPFLGVKASGMGTQGVKYSIEAMTRPKAVVVNVREL

SEQ ID NO: 53544 - protein, 417 aa, Clostridium difficile
MLESPNNLIQIIFLIVLLIGSAFFSASETALMSLSKIRIRYMQDEGVKGAKLVSSLIENPNKLLSSILVGNNVVNIAATSISTSLFIGLMGEKGVALATAVMTVLVLIFGEITPKTIAANNSEKVSLLVSKPIKAIIFILRPIVWIFNIITNIIFKLFGITNKGAKSFITEEELKTMVNVSHEEGVLEMEEREIINNVFEFGDMQAKNAMVQRIDMVAIDMEDSYDEIIQVFKTEKLSRMPVYEETIDDIVGILNIKDIIFLSDEEIESFDIKNYMREPFFTYEFKKITQLLEEMKLEKSQMAIVVDEYGGTSGLLTIEDLVEVIVGDIEDEYDEEEDEIQVIKEDEYIVDGSTKIGDVNELIGVNLESEEFDSIGGFIIGHLSRLPEENEVIEVDNIRFCIESIEKNRIKKIRIYT

SEQ ID NO: 53545 - protein, 454 aa, Clostridium difficile
MLLLIVTCAIYIWIGFYFSKKVKTASDFLIAGRNLPLPILAATIAATSFGGGCLVGGVQWGAERGLWVGMYSTIGAALACFINAFFAGKLRSLSCDITPADYIETRYGHSVFLRAYQSLVTPISILAIMGSQLISFGSVSTAFGIPYDIAVIIGVIVIIIYTYTSGMWGVAVSAFIQLAICIVFLPIVAYISLKLVGDNPLLMLQSMVKEPFFPGNKSISDFMYTVLPLVLGSIFSYESFLRYQCADNAKNAVKSSVIAGFILLFLAFPIGIIGAIGGSLFPNISSVQVLPQMISTTLPPLISVLFLAAILAAIMSTADSLMTSMSAIISRDIYNKLLHPNIEFNDLKNTLKYSQIASALTAIIGAIIALKFDSLLELLFWPAPLCTGVIFAPFVIGLCWKGATKKGAIYAVIVSVILALLNMIGILTVFDRILVPIIGGSITIFIVSKFSKKD

SEQ ID NO: 53546 - protein, 116 aa, Clostridium difficile
MNEMLRAIEQEQLKNEVPNFGPGDTVKVHVRIIEGKRERIQVFEGVVLKRQGGGARETFTVRKMSFNVGVERTFPVHSPKIEKIEVTRKGKVRRAKLNYLRGRVGKAAKIKEARNK

SEQ ID NO: 53547 - protein, 178 aa, Clostridium difficile
MGEAVKKEVVEWIKVIVIALVLAFAITRFIVPTIVKGESMYPTLVERDYLIVNRIAYKVGEPKYKDIIVFKTDLTEENGKKKDLVKRVIGVPGDHVKIQDSKVYVNDKLLDETSYIHNNRTDGDIDIVVPEGKLFAMGDNREKSLDSRYDEVGLVDEHTILGKVLVRLYPFSKIGTID

SEQ ID NO: 53548 - protein, 866 aa, Clostridium difficile
MKKIELLAPVGSFDSLKAAVQNGANAVYLGGKDFSARASANNFDRNELIEAVKYSHIRGVQVFVTVNTLIKQYEIEDFVEYVKFLYDIDIDALIVQDIGMARLIKKLLPDFELHASTQMVAHSLEDVKYLQSVGFDRVVLARELNVDEIKWICENTTVDIEVFVHGALCVCYSGQCLMSSMIGNRSGNRGRCAQPCRQKYELIDINTGEVVKSNGDYLLSPRDLSTIEDLDKIIEAGVLSLKIEGRMKKPEYVATVVSGYREAINEFVDKKKISISEEIINNLYTIFNRKFTKGYILGEVGKDIMNSNRPNNQGLYIGKVLDYNRKNKRLRVMLENTLKKGDGINLGGGTIGRIIKDGEITTIAHKGDLIELDFVGEAKRNQLIYKTSDSELMDRVQATFQQDKEFIKTNIRAKVSIKLGKKPELFISDFCGNKSVVEGDKIVEKAIKVALSKEKIETQIQKLGNTPYKLKEIEIDLDEGVSMPISVLNQMRRDCIELLDEERIKIKDRKFKKNRLKYQPNRVNKQKKLDTVPKIRVKVKNLEQLEAVLNYNVDLIYYEDINTLSKALQMVSSISIDSNISIDSSISMDLDTSSSLGTPKELMGSNTNNIDTLSNTSKIDTLNKNHYNTAVTDKKLIYSAPRIVRNKEYKQFEILDNIKGINKVQIGNWGSMEYFKKKDLNIDCYLNAFNSESINHFKEEGASTVCLSQELNLNEIKQTLKYTDVEIEAVIYGYAPMMVTEYCPMGVVVRDCKKDKRVAKCKESSYALRDFTDASYRITQDIFCRSTIYNSKVTCMLDNLYELEEIGIDVFRIDFTVEDSEMVKKVIEAHIEVLSNNYKLGKKATDLYKKLDEIGTVAGHYYKGVE

SEQ ID NO: 53549 - protein, 122 aa, Clostridium difficile
MLKKADKNANRLQRHKRVRRKISGTSQRPRLCVFRSANNIYAQIIDDTKRVTLVAASSLEAEVKSAVNHTGNKEAAKKVGELVAKKAVEKGITEVVFDRGGYLYHGRIQELAEGAREAGLKF

SEQ ID NO: 53550 - protein, 504 aa, Clostridium difficile
MGKKIMLQGTASNVGKSVLVAGLCRIFKQDGYTVAPFKSQNMALNSFITKEGLEMGRAQVFQAEAAKIEPIADMNPVLLKPSGNNKSQVIVRGKVVGEMPSSKYHDYKLELVDVLKETFNSLNSRYDIVVMEGAGSNAEINLKDRDISNMGMAEIADAPVIIVGDIDRGGVFASLAGTMLLLNEDEKRRVKGVIINKFRGKKELLQDGVKMLEDIIKVPVIGVVPYTDIKIEDEDSVTTRFKKKMNKSDIHIEIIRTPHMSNFTDFNIFETQEDVSIRYVDYGESLGNPDILIIPGTKSTIDDLTYIRKSGLESQIKNLHSQGKLIFGICGGYQMLGKKLKDPYHVESEIEEVDGIGLLDTETTFEKEKTTTQVEATIVECISEYMNNLKGKKVKGYEIHMGITKRGNDVRSLDLITKKLDKEVNYTEGSVNKEGNVIGTYLHGIFDEISFTRAILNNIRKKKGLGELESKVNSFNEFKDKEYDKLADFLREHLDIEKIYEIMK

SEQ ID NO: 53551 - protein, 171 aa, Clostridium difficile
MERRIIMEKALVGITWEFVFQIVNTFIIFLLLRKLLFKPVLNIIESRENDIKSDLAEGEKAKNEGLALKKEYESKINFAKDEGQEIIKQATIRAEQKSDDIVNTAKKDALDIKEKANKDIEQERQKVINEIKNDISNIALLAASKVIEKDLDKSKHEELIENFIKEVGEAK

SEQ ID NO: 53552 - protein, 372 aa, Clostridium difficile
MIVVEKAYKFRMYPNKKQQELINKTFGCCRFVYNKYLAKRIEVYKNDKETFTYKQCSSDLTNLKKELKWLKEPDKFSLQNALKDLDNAYKKFFKEKAGFPKFKSKKINRFSYKTNFTNGNIMYCGQHIKLPKLGMVKIRDKQVPKGRILNATISKEPSGRYYVSLCCTDVDIEAFENTNNQIGLDLGIKEFCISSCGEFIENPKYLKKSLSKLAKLQRELSRKTIGSLNRNKARLKVARLQEHIANQRNDFLQKLSTKLIKENDIICIEDLQVKNMIRNRKLSRLISDVSWSEFIRQLKYKANWHGRQIVKVGKFFASSQICNKCGYKNEEVKDLNIREWICPSCNETHDRDINASINILKEGLRLITIQNK

SEQ ID NO: 53553 - protein, 331 aa, Clostridium difficile
MKMARMYYEKDVDLEVLKNKKVAVLGYGSQGHAHAQNLRDNGVHVMIGLYDGSKSAQKAKEDGFEVKSVAEATKESDLTMMLMPDEKQKKVYEESVKDNLKEGQTLAFAHGFNIHYNQVQPPEFVDVVMVAPKGPGHLVRNVFTKGSGVPALFAVYQDHTKKATETVLAYAKGIGATRAGVLETTFKEETETDLFGEQSVLCGGISELIKLGYKTLVDAGYQKEVAYFECLHEMKLIVDLIYEGGFERMRYSISDTAEYGDYVSGKRVITDAAKQGMQNVLEDIQNGKFAKAWIKENEEGRENFLKTREEEYNTEIAEVGRNLRSMMSFLK

SEQ ID NO: 53554 - protein, 449 aa, Clostridium difficile
MTRSYDRSNEQIRPVKITRDYTKYAEGSVLIEMGETKVICTASVEEKVPPFLRNSGTGWINAEYSMLPRATQQRKIRDASRGKIDGRTQEIQRLIGRAIRSVVDLNKLGERTIWVDCDVIQADGGTRTASITGAFVAVAEAIYKLYKAKTIKEMPITNFVSAISVGIVNGIHMLDLCYEEDSKAQVDMNIIMTDKCEFVEVQGTGEEKPFSRADLNLLLELGEKGNKELIRLQREALGEISDEILGMDYGNEVVIATNNAHKLEEIGEILKDFEYKVYSLKDVDLAGIEIVEDGKTFEHNALIKARTIAKKTKLIAISDDSGLEVDALGKKPGVYSARYAGEHATDEENRKKLLKAMQNIPMSKRNARFVSAIAVVFPDGKEFVVRGICEGMIGFEEKGKNGFGYDSLFIVKGYDKTFGEIPSVIKNSISHRANALKLMKQEFIKRVVK

SEQ ID NO: 53555 - protein, 283 aa, Clostridium difficile
MEINKKHFIQVFLTCLILVVICEFIGQRTIAIGKASIVLFPMLYAVIIGLIITPDLLGKKIKALKKVVGEKEINIAGEVVGIALVMLGIKYGTTVGPNIDKIIQAGPAFIAQEFGHILAPIVALPLALMFGMKREAVGATASISREPSLGVISEKYGINSPEGSGVLGTYLMGTVLGTIYFSVLGSISIYSGLHPYALGMACGVGSGSMMTAAAGSLSTMVPPEMADTILAYAATSNMMSSITGIIFLVFVSLPFTNFMYKILEPKFSRNKKTKEIKSTEGEC

SEQ ID NO: 53556 - protein, 664 aa, Clostridium difficile
MSARKFSYTFLLSYIEQIGRDNMIKVSFTPNNKEVYCNEGDILLEVARNADIFIDAPCNGNVSCGKCKVKLLNGKVDTEKTRHITDDEWEQGYILACCTKVISDIEIEVPSKVSSSMHGMKIEGSNKKEDREIFERAKKIIEEHNLQFKTNIKKKYIEMEEPNLDDNISDVDRLERYVRNNLGYNEIDFRLDILRKMPTVFRKSDFKVTITYVQKQKKLTIINIEQGNKENSLYGVAIDIGTTSVVVCLVDLYSKEVVDKASSGNAQIKYGADVINRIIYSTKKNGLETLHKAIVEETINPLLKTIYERNGIDKEDVVTLVAAGNTTMTSLFLGVYTDFLRQEPYIPPFLKSPKLMGENVGLFVNDSAYVYLAPSVASYVGGDITAGVLSAGIWSSEENVLFIDLGTNGEIVFGNKDYMMSCACSAGPAFEGGGISCGMRASAGAIEKVIIDKDTLEPTLKIIDECAPVGICGSGIIDLICQMITKGVIDRRGKIYRDLDNKRVRFNEHEIGEYVLAFKEEFDLENDIVVNEVDIDNFIRAKGAIYSGAYTLVDSLGMDFSILDRVYIAGGIGNNLDIENSIIIGLLPDIDREKFTYIGNSSLVGSYLALISKDAKNKLEEIGNQITYVELSVYPSYMDEFISACFLPHTNIEQFPTAKKLLEE

SEQ ID NO: 53557 - protein, 255 aa, Clostridium difficile
MEELKDFLERQLNKKINIYPYENQKLDASSHLVTFNNAIYVIDFLDKNNLDNLKGNFYLIYQSHIDFEYLKNIFYNLFEDINIIQHNGFFIVNSKYNLDINVTTQNIIETETYQSTYLCYLGELDAKADFNFRLQLCSDLLPHIIKDNAENKFLNLFDLIRYKTLDLINEDNILNKLIDFNKIKSIDEELLYTGIKFINNDLNISKTSTSMFLHRNTLVYRLEKINEILGFDLKNFENAMIFYLSVKSYFLYKKI

SEQ ID NO: 53558 - protein, 239 aa, Clostridium difficile
MKPEKTRQGIIKAFNAAIEGILYTFKFERNMKIHYLGSVAVLIISLFFNFSKLEMIMLLMSICLVVVAEMFNTAIEKAVDLVTDEYHVLAKIAKDVAAGGVLVAALNSVVVGYILFYDKLTDISGILIYKIRESELHITLICILLVLIAVVVVKALTSTGTPLKGGMPSGHAALAFAIATAITLMTERVVASTLAYIMAVLVAQSRIEGKIHTFWETIAGALLGVLIAILVFQLGMFYN

SEQ ID NO: 53559 - protein, 432 aa, Clostridium difficile
MTKFKRGNYKNMKTTVEIENDIILGKDYSNLKRGIAFFSIALIYFFYCYNFMVGTFIKPTMIYALADGGFGFSLKQTEEIFAVMSFGTIPGTFIFGVISTKIGKKRTLISVALLIGLTTFIPMLSPTNIMLWKIARLCTGVVLGGVFGTAMPLVADMFPSKYRGKLAAILTALFSLAMIFGGKVYGVLGDANWQILMYTAIIPPIVGAILAIFFVPDDLEYTKELVKKGKETGEKISYISMYKGKYLWIGLGTILLSGANFTAYSAFSNNATTYLVTGIGMSAAVAGSIYSLQGIGQLVGYLFWGSIADKFGRKIPFIGMALAAVFVFIYTKLGGDNTTTFYMISVLLGVAVGYSGAWGAYYTELFPSKYRSLSSGMSFNGGRIISTFAIPAIAGTASGTLGMMTIFYISIAVFVAGAIVWLFLPETLNNKK

SEQ ID NO: 53560 - protein, 504 aa, Clostridium difficile
MKIIEGIKKYSNTDRTALMCNGDKLSYKDLNEYSDAISVFLKDVYKEEDTPIVIYGNKENMIMACMIGALKSGRAYVPLDISFPIDRVFEVTKEIKPKVLFNFSDERNFGDINVIDMDKLNYIINEYQGKSLDKENWVKDDENAYILFTSGSTGKPKGVQISSNNLDSFSDWISPYLNIDGSEKVIMNQPAYSFDLSVTTIYPGLIHGATLFSISKDVLADYKELFRQFSISDIAVWVSTPSFAGVCITEKEFNSKMLPNLESMIFIGEALSKNLTKELMSRFPNTRIINGYGPTEATVGVSVNDMTQKAIDDEKSLPVGYPMSNCKIKILDEDGNELKENEKGEIIIIGPSVSKGYFNNKEKTDEVFFYDEIDGVKWRAYKTGDMGYLLDGNIYYCGRKDFQIKLNGFRIEIEDIENNLRKVHNVKNAVVLPVYKDEKIAYLKGIVELNEKNDLSNIKNGMIIKKELGKYIPSYMIPRNISIISEFPTNINGKIDRKKLMEEI

SEQ ID NO: 53561 - protein, 422 aa, Clostridium difficile
MLSKLKQAWKIKAVRKKVMYTLMMIVIFRIGTTIPVPGIDTSIIQKMVGGNSLLSLYNMFTGGAFSNFSLFALGISPYITASIIIQLLTVGFESLAELQKSGEEGKKKINKYTKYTALALAVVQALGITLGIVRSALISNSVFFITTVVITLVSASMLVMWIGDKITEKGIGNGSSVIIFAGIISRIPTDVIKISQQVKSGEVAPWVIVILAVVILLTVTGVTFIQEATRKIPVQYAKRVVGRKMYGGQSSHIPMKVNQSGVMPIIFASSLLAFPQTIAMFMGPNAQAFVQKYLSMATEQGFWTYRSIEILLIIFFSYFYTTVSFNTEDISKNMKNNGGFIPGIRPGEPTMDYLNRILTRLTLAGATFLAIIAMVPALTTHYMKVNMSLAGTSLLIVVGVALELKRQLESNLVMRSYQGFLK

SEQ ID NO: 53562 - protein, 679 aa, Clostridium difficile
MLSKEINMRRNTKLLTTGILSMAIVTPTMAFATESNAMENNADLNINLEKKSIVLGSTSKVSVKFKEKPDADSITLKYKCYDMPLDTTLNYNQSTESYEGTINYNKDPEYLNVWELQGITINSKNNPKTLNKQELEKMGLNLKDYNVTQECIIEDITSRKDVNKYLRKTSAPITELTGSDRYETAVKISKEGWKNGSDKVVIINGDVSIDGIISTPLATTYNAPILLVEKNNVPNSVKSELKRLNPRDVIIIGDENAISKTTANQIKSTVNASQTRLKGSNRYETSLLIAKEIDKNHDVEKVYITNANGGEVDALTIAAKAGQDKQPIILTDKNSITDNTYKWLKSEDLQNAYFIGGPQMISTNVINKVNDITKDNVTNNRVYGADRHETNANVIKKFYTDDELEAVLVAKSDVLVDALAAGPLAANLKSPILITPKTYVSAYHKENLEAKSANKVYKIGGGLTSKVMSSIASSLSKHNTTPTEPGNSGGKTVMIDPGHGGSDTGTTGKPLGGIREKDYTLNTSLATTEYLRSKGFNVIMTRDTDKTLSLGNRTALSNSLRPDLFTSIHYNASDTTGNGVEVFYKLKDKDGGTTKTVATNILNRILEKFNLKNRGAKTRTLSTDPTKDYLYVLRNNDMPAVLVECAFLDNEKDMSLLNTSNKVKEMGTQIGKGIEDSLK

SEQ ID NO: 53563 - protein, 614 aa, Clostridium difficile
MQKRILRNFIFTGKNILSKLVFIIKYNFSTLILFELFHKGLALFFIWPSIRYIFDILIKSLHIVYLNMDNFIKVLTNPMSIVLIILSVIILAFYAFFEFTSVIICLNKSIKYEKIGLFELFKISFENSIKLLYPKNILLFIFVILIIPLVNTVLISGFIGKIQIPEYILDYIKSDIILNIIYMIFLLIIYISVIRWIFSIHEITLNTENFKRARKESVNLIKGKIIRTIIYSLILSLVVAIIGYAIYHSGIIFIGIWTKYCTDMEFLKNVFINRCIAFEEYFRLILSIFIFILDIGFISATYYQYKGVNISKNNIKKEKKSISKIVFNLVLILLISYIESVAFSSHINGMFNTSFSFYTTAIAHRAGAEMAPENTLAAIEEASNAKADYAEIDVQETKDGELIVLHDSNFKRTTGVDKNVWDVNYNEVKTYDAGSFYYYGKGYYDEKFVGEKIPTLKEMIKYSKGKVKLLIEIKLNGHEKGDVVKKVVQLIKENNFENQCIVASMDKTILQKVKKLDENLLTCYFMAIAYGDFSKLNYVDIYGIESTFVNKTVVEKIHKMNKKIFVWTVNSDSLIEKMLDLNVDSIITDNPYLIESAIYWKKNGFISQVSDYLF

SEQ ID NO: 53564 - protein, 277 aa, Clostridium difficile
MEVDMYKLIALDIDGTILNTQKRITPEVFESIQEAKRAGAKVVITTGRPLPGVKELLNQLNLTDEGDYVICFNGAIIQEVKSEKIIHDVEMSLDDFDFIYNNVCKKYKTKIHINTMTNLITPNETPGKYTLHEAKLNNIEVKYIQKDKIDESIKICKIMIVDEPERLEEIIQQLPKNLFNKYTIVRSAPFYLEFLGKTTNKGTALKTLCTNLNIPIENAIAVGDEENDQHMIKYAGLGVAMGNARNSIKEIADYVTDTNNENGVAKVINKYILNKAI

SEQ ID NO: 53565 - protein, 393 aa, Clostridium difficile
MINRLKNNTKIKIISFLSAIALWMYVMAVVDPEETKGFEDIPVSISNMSDLKDKNLVIYPDEKLTADVYIKGSLSKVQSVKKEDIHVYGTIEDPIQGQKEVYLKANIPQGVTLEFKHDVLVVNLEKNIKEKRDIKVEVSGNSKRNINKIELSKEFVDVSGPRTLVKEVKSVRANLDVGNETDDFSKKLQLIPLNSDGTKVEGVTLSSSFVTAKIELLKEKIVPIRVSLNDNKDNDVLKNYKLSKEQVTIKGKKEDIDKISYIKTKPIDLADLANGEEKEVSLEIPEGITLEDSSITIKLNDTKQLSAEFLYNAGDIELRNIPTNMDNPNVISDVDIKVVVESTEDLSKLNKKDISLYIDLSQGPEEDSKYKIKYETTYQFKKINIEPNIVEVE

SEQ ID NO: 53566 - protein, 323 aa, Clostridium difficile
MKKEESLLKVEGLKKYFEVKSGLFDKEIKCVKAVDGISFDLKKGETLAIVGESGCGKSTAGRTILRLIEKTEGKVEFNGVDIYKLEKEELRKLRPKMQMIFQDPYSSLNPRLNVEQIISEAVIEHNLVPKNEIKDNILNVVESCGLSKYHLNRKPGEFSGGQRQRIGIARALALNPEFIVCDEPVSALDVSIQSQIINLLMDLQDKYKLSYLFISHDLSVVNHIAHRVCVMYLGSIIEIATKGELYLHSQHPYTKALMSAVPIQDPTIKKNRIILKGDIPSPTNPPSGCKFHTRCPYCKEICKKEIPVLKEISRNHFVACHLV

SEQ ID NO: 53567 - protein, 53 aa, Clostridium difficile
MRCACGNTFVAGSTKDEIKVEICSECHPFYTGKQKNIEKGGRIDKFKKRFKMD

SEQ ID NO: 53568 - protein, 289 aa, Clostridium difficile
MDNNLITIEKTLDYIEKHLLDEMLDLNVISKEIGYSKYHLHRMFTSVVGFSVHNYIQRRRLTEAARMLIFTEKPIIEIALISGYDTQRSFSRGFKKMFKRSPNFFRRHQDFLPLQLKFDIHNRKKLRGDMVLDVKKVNCADINIVGYSGKVRKGFHIIGKCWRDLHKNKEMIENKVDLGFLIGVSDYSNFKEIENTPTFTYIAGAQVATFGKLPNGMEKFVLPKSNYIVFTFIGKNEDSMQNVVEYIYQEWFPNSSCQFNENNLYDFVKYGEKTDENGLSEIQFWVPII

SEQ ID NO: 53569 - protein, 688 aa, Clostridium difficile
MKNYLLFEIGVEEMPSRFVGSTLEQLKNNLSKLFDENRIAFDKINAYGTPRRLTLVVEGLSDRQNDLEEEIKGPAKKIAVDAENNLTKPALGFIKSKGLSESDIYFKQVGKEEYIFATIKQDGKETSEVLKDILPETIKSVVFPKAMRWGGKNLKFARPIRWIVALLNDKVLEFDLEGIISSNVTKGHRFLGESTIEVDSIEDYFEKLEKNYIVLDQNKRKEMIRKQCIEVANSLGGEVEFDEDLLEEVTYLVEYPTAFYGEFDVDYIKLPKEVVITPMKQHQRYFPVLKEGKLLPNFIAVRNGDSYRIDNVKAGNEKVLEARLADALFFYREDTKRNLESYIEKLKTVVFQVKLGTIYDKTLRLEKLSADILDSLGLVDEKTDTIRAAKLSKADLVTGMVGEFDELQGFMGKEYAKVGGENDVVSEAIFEHYLPRFAGDILPKTNAGVALSIADKLDSIAGFFAIGIQPTGSQDPYALRRQALGILSILMDRKVAVDIKVLIEHALDNYSELDFDKEEVVEQIMNFFNERVKNLFKDLGIRYDVVDAVLSSDINDVSDMHMRALELNNWLEKDELVEMLTAFNRVSTLAQKAESDKIDESLLKEDAEIKLYNEFKQVKIKVNELLKDKKYGIALDEFASLRPVVDNLFDTVMVMDNDEAIKNNRLALLKQVYDTMLEICDLSKIVYK

SEQ ID NO: 53570 - protein, 237 aa, Clostridium difficile
MIIMGSIKDNLSEIRNKIDKAAKKVDRDSKEITLLAVTKTVDVDLVNEAMREGITSVGENKPQELARKYDIIGDKLNWHLIGTLQTNKVKYIIDKVCMIHSLDRIALCEEIQKRAEQINREIDCLVQVNISKEESKHGLDREEVVDFVKEVSEKYKNIKIKGLMTMAPFIEDEDEIRGVFKGLKDLSKQIKELNIPNVGMDVLSMGMSHDYEIAIEEGATIVRVGTSIFGERNYNKK

SEQ ID NO: 53571 - protein, 40 aa, Clostridium difficile
MLNIDEIKKLIPHRYPFLLVDKITELEVGKRAVGIKNVTV

SEQ ID NO: 53572 - protein, 141 aa, Clostridium difficile
MAKKVIGQIKLQIPAGKATPAPPVGPALGQHGVNIMGFTKEFNAKTADQAGMIIPVVITVYQDRSFSFITKTPPAAVLIKKALNLKSGSGEPNKKKVAKMTSAQVREIAELKMPDLNAASVEAAMSMIAGTARSMGVVIED

SEQ ID NO: 53573 - protein, 338 aa, Clostridium difficile
MGYYNDNDNNKIRRKKISNNKDSNKKSKHSYTSANKKNKSPNTSSSKRMSEKVDSQNLIKRDRDSFTRDNVRPLNTDYNQRERRRVEYKQREKKLKSKKRKKQKRIRIVRALLSIMLVALIIFSVAGAIFTVSAIKGSPEVTKKLIRSKYISSEVVSIKQMPNDLKHAIVSIEDERFYKHKGVDVISLVRSVLNNVFTDTTQGASTIDMQVSKNLLTSNDKTMKRKIRDMYNAKQMNKIMTKDEILEAYLNNMYLGKNAYGAAKGAEVYFGKKVSELNLAECAMLAGMTNNPARYIDHGEAKKRQVIVLYKMHQLGYITDKEYRIAKADDTPFKSEID

SEQ ID NO: 53574 - protein, 254 aa, Clostridium difficile
MELIDKIKMSVKDLDLFYGDKQALKKINMDIKENKVTALIGPSGCGKSTFIRTLNRMNDLIEDVTIKGNISVDGEDIYTSDDVINLRTKVGMVFQKPNPFPMSIYDNVAYGPRTHGLRDKKQLDKIVEESLKGAAIWDEVKDRLKSSALGLSGGQQQRICIARAIAMRPEVILMDEPTSALDPISTLKVEELIEDLKKDYTIVIVTHNMQQAARISDETAFFLNGEVIEFSDTKTMFTTPVDKRTEDYITGRFG

SEQ ID NO: 53575 - protein, 288 aa, Clostridium difficile
MEVDMALNIRNYSLLCNQGTAKFNEDVVGINPFGAWVLDGATGLNGKNLVSTESDARWYVQWWNRYLYKNINKEESLKSIINTGIIEVKKEYELRLNGFKVEKLDLPSSSIVVVKFHENKVEYFLLGDCALFIKNGDSKVIKDRSICKFDNTVFDEMSKLSNLEEMAFDEIRTSVMDTIVSNRLKKNTKEGYWILDFDEEAVENSIYGYIEIKKDFQLMLTSDGFTSACDRYNLIKEEELIRIAEKFGIGYIHNKVRDFEDNDYKAVKVPRFKVKDDSSCLYLDIYND

SEQ ID NO: 53576 - protein, 64 aa, Clostridium difficile
MPKMKTHRGAAKRLKKTGTGKLKRAKAFKKHILTKKSAKTKMNLRKSTLVSDGDAKRIAQLLPY

SEQ ID NO: 53577 - protein, 305 aa, Clostridium difficile
MIVKSRLVGLEKNDNNGNKTKYVIEKVAKNIFLLSALVAVASLLLIIGFVFYKGLRPFIFEGYSFIDFLTGADWVPSANKFGISSMIVASIFATLGALVIGVPVGILTSVFIAEVAPKRLAKIMSPAVELLAGIPSVLYGVFGLAVIVPTIQSIFNLPKGQSLLAIVIVLAVMMLPTIISVSETAIRAVPKAYKEGSLALGASKIETIFKVVLPAAKSGVLAAVVLGVGRALGETMAVILVAGNSPVMPTAITDSVRPLTTNIALEMGYAFGTHQEMLFATGVVLFTFILILNLVLNKLSNKAVN

SEQ ID NO: 53578 - protein, 140 aa, Clostridium difficile
MSKVLNENNIFLGLDSVSKEEAITLAGRKLVENGYVKEEYIPAMLEREKVMTTYMGMGVAIPHGVNEAKKEILSSGIVILQFPNGIDFDGEKAYLLIGIAGVGDEHLEILSNIAVVLDDDLTERLKNSNDKQAFMEAFAN

SEQ ID NO: 53579 - protein, 231 aa, Clostridium difficile
MRFHIMTLFPEIFNSYMDESIMKRAVEKGIIEVHIYNIRDFSNNKHKKVDDYPFGGGAGMVMTPQPIYDTYKHIITTHNINNPSVIYLTPKGKVYNQSMAKQMSLKEDIILLCGHYEGIDERIIDLIVTDEISIGDYVLTGGELPALIMIDSISRLIPGVLNQEESFEEESFKDNLLEYPHYTRPRDFEGLKVPEVLLSGNHKKIDEWRREESIRITKERRFDLYKKSNEK

SEQ ID NO: 53580 - protein, 459 aa, Clostridium difficile
MNFKAIILAAGKGTRMKSKYPKVIHKVCGKEMVNHIIDVSKKSGVKDTVVILGHEADVVKEKLAEEIIIAMQTEQLGTGHAVKMAKEYINDEDTIVVLCGDTPLIKEETLKRLFEYHIENKYHATVLTTRVGNPTGYGRIIRDKKGDLLKIVEQKDANSEEKMISEINSGIYCFNGKSLREALDLLNNNNSQGEYYLTDTAKIMRDKGLKVGAFAGSTIEELMGVNSRVELSKAEEIMRRRINESHMVNGVTIIDTNSTYIESDVMIGNDTIIYPGVMLQGKTRIGSDCIIGMNSSITNSEIGDGTEIKNSTIIDSKVGENSTVGPYAYLRPKSDLGNNVKIGDFVEVKNAIIEDGSKASHLSYIGDAHVGKNVNIGCGVVFVNYDGKNKFKSIVKDNAFIGSNSNLVAPVVVEEKGYIATGSTITHDVPDGALAIARERQVIKEGWVEKKNQKDDQSK

SEQ ID NO: 53581 - protein, 463 aa, Clostridium difficile
MEKAVENFEDLSKEYINGYIERARKAQREFECYTQEQVDKIVKIVGKVVYYNAEYLAKLAVEETGMGVYEDKVAKNKSKAKVIYNNLKDKKSVGIIDIDRETGITKVAKPVGVVAAITPCTNPIVTPMSNAMFALKGRNAIIITPHHKAIGCSTKTVEMINEELEKIGAPENLIQILDQQSRENTRNLISSADVVIATGGMGMVKAAYSSGKPALGVGAGNVQCIIDRDVDIKEAVPKIIAGRIFDNGIICSGEQSVIVAEEMFDKIMDEFKNNKGFIVRDKVQKEAFRNAMFVNKSMNKDAVGQSVHTIAKIAGVEIPEDTKIIVIEADGPGEEDIIAKEKMCPVISAYKYKSFEEGVAIAKANLNVEGKGHSVSIHSNTVKNIEYAGENIEVSRFVINQCCATSAGGSFFNGLAPTNTLGCGSWGNNSISENLDYKHLINISRIAYYMPENEVPTDEELWG

SEQ ID NO: 53582 - protein, 467 aa, Clostridium difficile
MEKKKIGLWSLVFMNVSALYGIRWIAKSTASSFGLGLGAIPMWLLFSFIYFVPGALICAELASTYQKGDGGLYDWVKEAFGEKYGFLVSWLNWTAKIFWYSSFLTFLAVNVSYTIGNPALADNKMFVLILSLIIFWALSLIATKGISFTKIFTNTGALGSTIPSAILIIFSFVAVFVLKKHDIASTYTIASMTPKLNMDAFVAISAIMFGLAGAETAANFITEIDKPEKNFPKAILISAGIVASLYVLGSIAITMIIPPDQITASKGVLDALSAVCASLGIGSWLVQLIAFGIAFSVLGAIVLYIASPIKMLFGSVKKGIFPDSLVEVNEHKIPSKAVILQAIIVTIILLVTTLMPSVDAIYNVLVTMTALTALFPYVLLYASYIKLRKERPDEIRPYTMAKSTSTCLGLAKMVLVVTVVGILLSAAPVMPTFAENVIYEIEMIGGGLLVILSGLWLWNRYEKKTAK

SEQ ID NO: 53583 - protein, 590 aa, Clostridium difficile
MKWIYDDYEFENRANNLSWTIAGDYNESIDISEKDYSSKEIGLYFAIIAGARRKYVDWDIVKKYLTNRIRKGYNKDVILGLIQVILNTIVEEKVIKDRPGIEDIRRNAYKDIVSRFTKIHNDNIMDKIKYTFVLYSMDKHPALDSMTRRIVNDIRNIDTNQDIMEILKALDVIYLTYFEYILNGEENSLIDENNVESVEVNFDTFADFMYEELYSDEEENIIESDIDSISSSMLVEGVGDFDDSKCSNSADRVIYVDEDTANKIYSKIEHYYGKTYLSKGEIKKIETQNCRNVHEGCRIHFTDGVLRSECNNVFQLKYVTRQKENNLGKFREHARMYRQQIKRLKESLSRILIEENAKSRVYSDCGTILANRAWRVGRSNNNKIFYKDIENEKGKYVIDILLDASGSQSRNQGNVAIQAYIIANALTEVGIPNRVMGFSSFLDYTILKRFKDYDDSIKNSENIFEYFCAGNNRDGLAIKSICSGLINRDEENKILIVLSDGRPNDVKIGKSSERTLRGEKAYRGIVGLRDTANEVRKARKQNILVLGVFTGKESELEAERLIYGNDFIYSRDITRFSDVVSMYLKKIIRN

SEQ ID NO: 53584 - protein, 621 aa, Clostridium difficile
MQSVIEYNSWDKNFKAPFGALKFDEELTICVKVNEGYNIKSISLEINREEEMRTITLNEELDNDKLGKCFCGKIEKFDGTGVYFYYFKVDVEMDGQIKTLFYGKNRDNGYSCEYNYSDINKYQITVYKDFKVPTWYKEGILYHIFVDRFNNGNRSGKVDNPKKNSFIYGNWEDTPMYIKDSQGDVIRWDFHGGNLRGIINKLGYLKKLGVSILYLSPIFEASSNHKYDTGDYKKIDPMFGDEDTFKELIDKAKEKGISIVLDGVFSHTGADSKYFNMYGNYNSLGAYQSKESPYYSWYMFEEFPQKYKSWWDVKTLPNINELEHSYMDYIIYDNDSVINKWVNMGIKGWRLDVADELPTKFIRELKKELKKADDDSILIGEVWEDASNKISYGQRRSYLLGEELDSVMGYPFRNNMFSFLKGEINSYELCNRYMQIKENYPKESFRSNLNLIGTHDVTRAKTELNDDVDLVKLAVAIQMTFEGVPYIYYGDEAGLCGGVDPDNRRTYPWKNEDEDMLNFYRDVIKIRNKNKLLSSGNTEFIYTNNDSVFSFIRVNENNDRMLILVNRSENVESISLCIESSFIEEIPIKYSLKNANSTIQIENNELKVDLDSKSFRIFRVN

SEQ ID NO: 53585 - protein, 396 aa, Clostridium difficile
MRMVFMDKVKFLINMLLAFFIYPFNKHKFNGRDIWLIGGHSGDIYNDNSKFFYEYMLKEHNDVETYWVVNKDSKVFDKIPGKKLIRGSVENYLYYYNSKAIVFSHAPSADIAPYNFAVPVLNYFHKKTIKVFLNHGTISFKKRKPMNKKFKNIIDNLYKSYNIVTASSEFERNVMVNDWGMLDDSVYIIGNARYDNLPTNEVAQTRDILYTPTWRDWIKFSSGKFTDTDYFKNIMNFLNDDKLNKILDEKDINVKIYMHHLMHEFIDDIKENITGKRIVFLDKGVTLANEIRKSAANITDYSSVAIDFLYMNRPILFYQFDLDEYMEKVDSYIDLKSEMFGSLAYNNDEAVNKLIDIIENNFEVMDNQKNERNKFFRYNDNKNCKRIYDCVLSKIK

SEQ ID NO: 53586 - protein, 488 aa, Clostridium difficile
MFINYTGGDISMKSNQEFLWGGAVAAHQVEGGYNKGGKGISIADVMTAGTHTISRKITDGVIEGLNYPNHEAINFYENYKEDIRLFAEMGYKCFRTSIAWTRIFPKGDESTPNEDGLKFYDDLFDELLKYNIEPVITLSHFEMPYHLVKNYGGWRNRKLIDFFVNFCEVVMNRYKDKVKYWMTFNEINNQSITTNPIYAFTNSGIIYEEQEDKEEVMYQAVHYEFVASAKVVKIGHEINPEFKIGCMVAAMPSYPYSCNPEDMIKFVESNREQLMFTDVHVRGHYPRHTLKLWERKNYNLDITEEDKKILKEGIVDFIGCSYYLTTVVTADKTMKTTGNDSAGKADVVENPYLKISDWGWNIDPVGLRFYLNQLYDKYELPIFIVENGFGAEDVLKSDNTVDDDYRIEYLASHIREMKNAIEIDGVDVIGYTVWGCIDPVSFTTGEMKKRYGFIYVDKNNDGSGTLKRYKKKSFDWYKNVIKFNGEIL

SEQ ID NO: 53587 - protein, 63 aa, Clostridium difficile
MPLPTEKQVVTILRAVHKYKYSREQFEIRTHKRLIDIANPTPKTVDSLMRLDLPAGVDIEIKL

SEQ ID NO: 53588 - protein, 302 aa, Clostridium difficile
MLYNNALELIGNTPVVRLNNLGCTNGCSNIYVKLEKVNPAGSIKDRAVYEMLEGLEQRGELKKGDVLVEATSGNTGIALSMIGKLKGYEVVIVMPETMSVERRDLMKAYGANLVLTDGKAGMAGSIEKANELLKENPNYKSLKQFENKDNPNAHYKTTAVEIMNDVKDLDIFVCGVGTGGTLIGTARYLKEQNPNIRVIALEPKKSPAISENKTGPHKIQGIGANFVPENYDSSVVDEVILVDDEDAFDTVKLLAAKEGILVGISSGANIFGAIEMAKKYPDKKIVTVAPDGVDKYMSMGIF

SEQ ID NO: 53589 - protein, 392 aa, Clostridium difficile
MKDVVIVSAVRTPIGSFGGVFKNTSAVQLGTIAVKEAISRVGLNLSEIDEVIIGNVLQTGLGQNVARQIAINAGIPNSVPSYTVNKLCGSGLKSVQLAAQSITSGENDVVIAGGTENMSQAPYIVPTARFGSKMGNITMVDSMLTDGLIDAFNQYHMGITAENIATKFEFTREMQDKLALESQNKAENAIKNNRFKEEIVPVDVLIRRGKIETIDKDEYPKLGMTFEGLSKLKPAFKKDGTVTAGNASGINDGAAMLILMSQQKADELGIRPLAKIKSYASAGVEPEVMGTGPIPATRKALKKAGLSINDIDLIEANEAFAAQALAVKNELQIDSSKLNVNGGAIALGHPIGASGARILVTLIYEMQKRKVETGLATLCIGGGQGISMVVSR

SEQ ID NO: 53590 - protein, 330 aa, Clostridium difficile
MEVVMIFDGHSDTWADVTIRRLNGEKDVFRRIHLDNFKRANIEGAIFVIWIDPPYDKEPEKRVKQIISSIKDEIEDMKDVVNIVKKYSDIDKGISENKINILIGLEGLSHIGRNIDLLDYFYKEVGARHASLTWNEQNELATGCLGDENRGLTEIGKKAVNKMEKLGMIVDVSHLNEKSFWDLMSVASKPVIASHSNARSLCDAKRNLTDNQLKEISNTGGLVGINSFRGFTNSNPKKQDLIHLVDHIDYMVNLIGIEHVSFGFDFSDYLGKETIGSFTGNASVPSVDGLESTHTAQNIVVELENRGYKKKDIELISSGNFYRLFKDILK

SEQ ID NO: 53591 - protein, 93 aa, Clostridium difficile
MTVMAVKIRLKRMGANKKPFYRIVVADSRAPRDGKFIEEIGYYNPISEPKQVRINDEKAIKWLATGAQPTEVVKKLLVKNGVIEKFEASKQAK

SEQ ID NO: 53592 - protein, 759 aa, Clostridium difficile
MNFENTKNKKIIATLLLTLLLIVSLTCVTFIMNLNKVTHNETERYLVEVSQGISTTINVKCKSIFRTLYSMGDTYFEINDSEKEVNRYLSKKLKLFEFDWLGIIDSNGNFVSALKDTGNVKGQDFYRKALQGKETITPVKSQSGTYGILYSVPLYNGDKIVGAVAAWNTIDTMRNLLSVESFHGEGFSQIIDQDGNFIVSSANKNAPKNVVNFFDMIKHQGKQVDKNKLEEMKINLKKNKTGSMYYTLNDGISKAMHYLPLQEENLYLLSIVPTKTASAQFDLLLKKAIFINILIVILFLLLIILIMFINQKNRAQLIKIAYVDSVTKGYSKARFDIEAKKIIQSSSSESYSLVSINIQKFKLINDSFGSEAGDKTLKYIHDVISNYLEPGELLCRVSNDQFNVLIKTIPQKEILKYIENITNDINSFNKNEECKYFIALSIGVYKIDDPNLPLVSIQDRANVARKNNKGNIGNHPLYTCVFYSDLERLKMIKEKEMENRMEEALNNNEFIVYLQPKISLKDNTIVGAEALVRWQDPNKGLIPPDEFIPFFEKNGFITKLDHYVFEKVCSMIRKWIDNGETPIPVSVNFSRANLNNIDFLEKYRMLRNKYNIPAKLLEIELTETLVFENLQKLINIIDQIHEEGFQCSLDDFGSGYSSLNMLKEIKVDTLKLDRAFFSSPNADNIAENHVIESIVNLAKKLNMNSISEGVETILQMDYLKKINCDMIQGYVFSKPLPQEIFEKMTFGKKLEETSMDSSV

SEQ ID NO: 53593 - protein, 365 aa, Clostridium difficile
MKLGIVGLPNVGKSTLFNAITQAGAESANYPFCTIDPNVGVVSVPDERLNKLQELYNSEKIVPTAIEFCDIAGLVRGASKGEGLGNKFLSHIREVDAIVHVVRCFEDENVVHVDGSVDPLRDIETINLELIFSDIEILERRINKTQKAAKADKTLGSELDLLKSIMSTLEESKCVRTMEFTEDEQTFVNSLDLLTSKPVIYASNVSEDDLADNGENNKYVQQVKAFAETEDAEVVVVCAQIEAEISELDSAEEKKEFLETLGLEQSGLDKLIKSSYALLGLISFLTAGPKEVRAWTIKVGSKAPQAGGKIHSDIERGFIRAETIAFNDLVEHGTMAAAKEKGLVKLEGKEYIVKDGDVILFRFNV

SEQ ID NO: 53594 - protein, 97 aa, Clostridium difficile
MIRNRKLSRSISDVSWSEFIRQLEYKANWHGRQIVKVGKFFASSQICNKCGYKNEEVKDLNIREWIYPSCNETHDRDINASINILKEGLRLITIQNK

SEQ ID NO: 53595 - protein, 297 aa, Clostridium difficile
MFKSGFVSIVGRPNVGKSTLMNNVVGEKIAIMSDKPQTTRNTIQAVYTDEEMQIVFLDTPGIHKPKNKLGEFMVKAATEAFKNVDLILFVVDDSKKIGPGDRKIIEDLRSVKTPIILVVNKIDQLDQKDELFDIIKMYDREGIFKEIVPISALKGKNTDTLIKVIQNYLEEGPKYFPDYMITDQPERVLIAELIREKVLHYLNDEIPHGVAVEIEKMKARNDKEIVDVSAVIYCERDSHKGIIIGKNGRKLKGIGKSARQDIELLLGSQINLQLWVKVKENWRNLQNYINNFGYNDK

SEQ ID NO: 53596 - protein, 138 aa, Clostridium difficile
MNTITLVGRLVADAELKYLPNSGTPKILFRVAVDRKYKDREGKKKVDFIPCEQLGKHVENLVQYLTKGKQIYAFGELNIDNYKDENGCWKSITKVNVNALELLSSKEDSNNHEKQQEYIPPGLDPQGFQAIDDDDIPF

SEQ ID NO: 53597 - protein, 659 aa, Clostridium difficile
MRKVKRISKKRLVLVLILACALFFCLVIRTGYLQLMKGNWLSTKALEQQTRDIPIEPKRGTIYDRNMKELAVSVTKYTVWCKPVEVEDKKEAAEKVAEILDEDYKDIYALISKKNMALVKVKRWIDDDKASQIRDAKLSGIWVAEDNQRYYPYGNFAPYVLGHTSSDATGISGVEMQYDKKLKGKPGKLIVSTDASGREIPQGMEKYYEPVQGNGLVLSIDEVIQHYTEKAVQKAYELNNAKKVTAIAMNPKTGDILALASKPDYDPNDSRTPIYPYYQEELEKYNDKDKIKGYYQMWRNPAVSDTYEPGSTFKLITSSSALEEGVIKDGEKFTCTGSVTVGGRKIKCWRHYRPHGTQEFKQAVQNSCNPVFVELGSRLGVGKMYDYIESFGLMDKTGIDLPGEAKGILYNEKNVGPVELATISFGQSISVTPIQLITAISSIANGGDLMQPRVVKSYTDNKGNITETVKPKKVRSVISKETSKKMLEIAESVVTEGGGKIAYIPGYRLGGKTGTAQKVIDGKYAPGKYICSFVGIAPCDDPQIVVLAIVDEPTGVSAFGSTTAGPIVKEIMNDSLKYLGVKPVYKEEEKAEYEKKQVKVPDVRNLKIGDAVKALEDAKLKPDLDADIELPEDTKVKDIFPKPGVKVNEDSSITLYFEN

SEQ ID NO: 53598 - protein, 456 aa, Clostridium difficile
MKQKWIVLIIICIGVFMSTLDGSILNIANPTIAADFKINMSQIQWVVTAYMLVVTATMLFFGKLGDKVGSNRLYTLGFFIFTIGSFLCSMSNNLSTLISSRIFQAVGASILMATGLGIVSNAFPANEKGKAIGITGAVVGIGNMSGPVIGGIILEHFGWPSIFIINIPIGIIAVFLGIKFLPKPVLDEQNKSFDIPGLLLFASCTTLILLAMNEKGNTRLYLGITALIIFLLLALREVKFEQSFIDLPLFKNRNFTVGNIIGVACYFPQMAVSFLLPFYLEQLKNLSPMMAGYVMTVHPLIMVLIAPIAGSLSDKHGAKNILTASFSFMTISLVGMALLKADSPLYLLIVCLVIFGLGLGAFSSPNNSSILADVPPQKQGYGGSFLATIRNLSFALGTAFFSSFFAQSLTYNQKFKSHTSAYVIASNQSYWIAASVCFIGLILTVFFMRKTDKSIS

SEQ ID NO: 53599 - protein, 386 aa, Clostridium difficile
MKLNKTLLAIGMSVSLLIASCPTSNALSSINSIKGTNKYETAGLIADKQNYDIAILINSENGLSDGLSASGLSGAKNAPILLTKKDTIPSETLKRLEKVKEVYLIGGKNSIGASVQKILSDKKISINRISGTDRIDTSHKVAKEIGRVSTVKKVILTNAFKGEPDAMSVASIAVRDKSPIVLTDGNTTSFATDGLETYAIGGKVSISDKLINETKATRIGGVDRYDTNKQIINKFYNGSKEFYIASGTDLVYSLVGSTIAQKTPIVLVGNGSNKSILKNASKITAIGNIDDVVIKQCLNITNNVGDSNTGIVKDTNSNNTNKPSNEPSSNNPGLTDKSTVYVTPNGKSYHLTKNCSTLKRSKTINKVTLKQAKSQGKIDPCNVCVK

SEQ ID NO: 53600 - protein, 180 aa, Clostridium difficile
MSELQEASWYVVHTYSGHENKVKATIEKAVKTRGMEDCIRQVVVPTEEVVETTKTGKEKTRQRKVYPSYVLVKMIITDESWYVVRNTKGVTGFVGPGSKPVPLSEDEVKAMGIDTTDPKVVNSDIDFEIGDTVKVSQGPFSGQIGNIEEIDLENREVKVCINAFGKRTLFVIELEGIEKI

SEQ ID NO: 53601 - protein, 164 aa, Clostridium difficile
MIRKANMNDLESIMKIIKSTVEEMKTYNNTQWDENYPLEKDFVSDIKKQDLYIYEVDGEVAGFICLNYEEPEEYLGLNWSSNKKAMVIHRMAVNPNFRKTGIASKLVDFAEKLAVENNVSYLKSDTYSINSKMNLLLTKCGFIKIGEMSFLGKEKSFYCYDKIL

SEQ ID NO: 53602 - protein, 72 aa, Clostridium difficile
MAKKDVIELEGTVSEALPNAMFKVKLENGHEILCHISGKLRMNFIRILEGDKVNVELSPYDLTRGRITWRKK

SEQ ID NO: 53603 - protein, 54 aa, Clostridium difficile
MEVYQMRVKVTLACTECKQRNYNTTKNKKNNPDRIELQKYCRFCKKHTTHKETK

SEQ ID NO: 53604 - protein, 273 aa, Clostridium difficile
MSNMEYEKWNEILAPYEHAVEELKIKFKNIRKEYLAKGEYSPIEFVTGRTKKISSIISKLKRINAKDIETEIDDIAGIRIMCQFVEDIYAIVDLIKVRNDMTIIGEKDYITNYKDSGYRSYHVIIKYPINSIAGSKEIICEIQIRTLAMNFWATIEHSLKYKYDHYIPETLAERLRRASDAAFLLDQEMSEIREDIMKAQAMYQMKSIAIRDTLNRIQELYDLGDTHKAMQYQRKLDRTETDKNITEILELKQEIDILLEQYKDTKVDDKVVQ

SEQ ID NO: 53605 - protein, 256 aa, Clostridium difficile
MRAIIVEDEFPARKELRYFIENKSGIEVVSEFTNGIEVLDFIQENKIDVIFLDINIPHLDGMLLAKTLNQFKSRPKIVFITAYESYAVDAFSLDVFDYILKPYSEERIISMLNKLEKSEMSDIELSNVNSNLYKYKKEAVNQEIEEITHKISLWKGDKLVVIDIDDIYYCEANERQTFIYTEKEKFILKEGISEVENLINDKTFFRTHRSYIVNLTKVKEIIPWFNNTYILKLKNSDYEVTVSRSKVKEFRLLMHI

SEQ ID NO: 53606 - protein, 568 aa, Clostridium difficile
MDYKNNYEMWLNSPYFDEQTKNELLSIKDDEKEIQDRFYKNLEFGTGGLRGIIGAGTNRINIYTVRRATLGVLNYIMKTQGEEGKQKGIVIAHDSRYMSREFCIEVAKTLSAYGVKAYIFEELKPTPELSFAVRYLKCAMGIVITASHNPKEYNGYKVYDSDGGQICIDMANDIIAEVNKIDDYSTIKSIDFEEALSKNLITILDNEVDDEFIKAVKKQVLRQNIIDEYGKKLKIIYTPIHGTGNKPVRKVLNECGFENVMVVKEQELPDSNFSTVKYPNPEEKSVFNIAIEMAKNNGTDLIIGTDPDCDRVGIVVKDSSGEYVVLNGNQVGSLLVRYILESLVEENKLPKNNPTIIKTIVTSELGAKIAKAYNVDCLNTLTGFKFIGEKIKAFEESNDRSFIMGYEESYGYLIGTHARDKDGVVSSLMICEMAAYYSSKGMNLYEALIDTYNKFGYYKEDLKSVTLKGIDGIKKIKEMMLYFRSVKIDNVADVKVDKILDYKDGVDDLPKSDVLKFLLEDGSWIAIRPSGTEPKIKFYFGANSDNQEDVEFKLNNLISYILNVVDSI

SEQ ID NO: 53607 - protein, 367 aa, Clostridium difficile
MGGIMSINEIIIYVMVVFMVLGAIDKCIGNKFGLGEQFEEGIMAMGSLAVAMVGVICLAPVLADVLRPIVVPVFNILGADPAMFAGSLLANDMGGAPLALELAKDPNAGLFGGLIVGAMMGPTIVFIIPVALGIIEKEDQKFLATGILAGIITIPIGAFVGGLVAGFEVMMVLRNLVPIIIFAVVIALGLLKFENAMIKGFTYFGKGVVIVITLGLAAAIVEALTGIVVIPGMKPISEGIEIVGDIAIVLAGAFPLVFVITKVFNKPLMALGKVLGMNDVSAAGLVASLANCIPMFGMMKDMDNRGKIINVAFSVSAAFVFGDHLGFTAGFNSNMITPMIVAKLVGGITAVLLAMVIANKTLKKENV

SEQ ID NO: 53608 - protein, 196 aa, Clostridium difficile
MKIVCLGDSLTYGFGVSRSNSWTNIVNKETRLEIVNKGINGDTTSGMLARFNEDVVKNSPDIVFIMGGTNDFIAGAGNEIINSNIMAMVHQSYSKNIIPIIGIPLKPDIPNVREDWSCFTDFNIVSQNLESYSYWIKKFCMTFNTNFVDFYSEYNKNMELEGYKKLYFDGLHPTKEGHRIMADIFINSINKYIEEL

SEQ ID NO: 53609 - protein, 45 aa, Clostridium difficile
MSKRTYQPKKRQRSKEHGFRKRMKTSNGRNVLKRRRAKGRNRLTH

SEQ ID NO: 53610 - protein, 228 aa, Clostridium difficile
MKYSYKKCIIDSILLMFIVQILRMILNYVLLSQFEFTLENFNIINLISFTLVGLSLILFLKDNSLYNKVRNRKITEAFEENKNNILIEKCKLILFVVVLSLAIIVTYCTKGYVLFNVTMMTLSVLIVPIFEELFFREYIWNYLSNFIKSKSKIICITSILSGIYNIGYIDVIRNYVILYNNSSYTFEVIISKIMIGTVFGIVLGLVKYRFRDVGFCILLRSLFAIFIR

SEQ ID NO: 53611 - protein, 447 aa, Clostridium difficile
MRRKKMGSNELKKTLGVSAALSTVVGSVIGAGVFFKPQAVYTLTGGAPGLGILAWLIAGIITITAGLTAAEVSVAIPKTGGMMVYIKEIYGEKLGFLTGWMQIVLFYPGMMAALGVIFGEQASALIGSPSLLLPIAIGIIIIVAGLNMLGSKTGGVIQTVSTICKLIPLILIMVVGFIKGGGNNPILTPMVGEGLSLGSVLGQVLIAILFAFDGWMNVGTLAGEMKNPGKDLPKAIIGGLSVVMAVYFIINLAYLWVLPANELANYASPASAVAEVIFGSMGGKIISVGILISVFGALNGFLLTGSRVAYTLATDKTLPKYGIFSKLNSAQVPANAIALVSVIASIYALSGQFNLLTDLAVFATWIFYVLTFIGVMKLRKTHPNIPREYKVPLYPIVPIIAIASGIFVVVNQLCFAGMKTTMISIGGLVITAIGLPVYAYMTRGVKR

SEQ ID NO: 53612 - protein, 383 aa, Clostridium difficile
MKKAIQFGAGNIGRGFIGGLLVKSGYHVVFADVNEYILNSINKDKKYTIHIRDVECIDEVIDNISAVSSIKEEIIDEIVQAEIITTAVGPLVLTKIASTIAKGIKARKEKGLTSNLNIIACENAIYASSSLKEEVLKYLNKEEVEYLEMYVGFPNCSVDRIVPPGKNENPLDVTVENFYEWNVEKQGFKGEIPTIVGMNLADNLMAYIERKLFTLNTGHAITAYIGYLKGYKTIEESIKDKFICDIVKSAMVESGEGLIKKYNFDSEVHYKYIDKILNRFKNPYLNDDVLRVGREPLRKLSDKDRLIKPLMTAKSYGLSVDNLILGIGAALHYNNSEDTQSVELQELIKSIGVKKAVAKIANISNDEELLNNIEKSYIFMKNL

SEQ ID NO: 53613 - protein, 1032 aa, Clostridium difficile
MDVINLIDELDEIVYVSSLDTYELLYINEIGKKAMGLNDISHLKCYKALQGKDSPCEFCTNSILKEDEYYIWENTNTRTNRHFILKDKLIKWEGKHARLEIALDITEKEDISKSIAEKLEIKELLVGCIKHLITESNFSDAVNLVLTNIGKFHKADRAYVFEVSEDRKKVTNTYEWCNEGVDEQKQALTNLDINELKNWFLLFEQKGFVIIDDIENIKEEQPIEYEILKPQKIESLMTSSLKQDDKVVGFIGVDNPHKAVGDTSLLTSLSYFLLTEMKKRKVENKLNYMSYYDFLTGAYNRNKYIKYIDNFQKGKVKSIGVVFVDINGLKDINDNFGHANGDSAIVSACVIIKKYFHSYNVYRIGGDEFVVLCEDISKQLFEELVSWLSEEFKDEMIYSVAVGSIWSDDNIDIHKLIKVADERMYQDKKRYYNKNKLRNNEMKVISDLADSTNNILFKHKELVDKVYFDDLMIKGYSKAYEKLAYNTYDIILSICIDTNLITPIYQSESNIFSFPIKENLEKTFSYIKKHLIHPDDIILFNDNHLLKSLDSLNNSKQDDLELNFEYRRLGIDKKYYWALIYMLKISSKNKLGEKQTHILVAIKNIDYLMQLHKNQKDTLTGLYNYESFCEQISLMLKRYPDKRYAIIMMDIDKFKVINDIYGVRGGDKALIYVAELIQKNIGSNGICCRMYADVFCIFYESYSDRDIHKVIYKIKNSLNRKKFEYMLVPCFGVYRILDNHIPITNACEMAGYAHKKVKKQSINNYIFYDDTIRNDALEEKQMEREMEYALENGQFHVYLQPKYNLNANKIVGAEALVRWVHPEKGIIPPIKFISLFEKNGFIIRLDMYVWEQVCSLIRKWIDLGEEPVPISVNVSRLHLHNPHFKEIVLSLINKYSIPKSFLELELTESLFIKNIKLFTKIIADLRMDGIVLNMDDFGSAYSSLNMLKNINIDTLKIDCGFFNEEGITDREKIVLKHTIAMAKDLDMDVVAEGVETKEQAEFLVTLDCVVIQGYYYCKPIPSADFEKLLYQK

SEQ ID NO: 53614 - protein, 417 aa, Clostridium difficile
MESKNNVKRFLIIFILAFGTTAMYSLPYMKSSFYDPMQQALALSHTQIGNLLSLYGLVGMVSYFIGGWFADRFSVRKLITFSLIASGILGFYFSTFPSYSMILLIFVLWGFTTILTFFSASVKVVRMQGSESEQGRIFGFYEGLSGVSGTLISFIGLYFFGKFAEITVGFKYVVWLYSAASIICGILLFFLVEEKKDSGASDEGLSIKSLLKVVTMPKAWLIGLIIFSTYLVFSSLTYLSPYLSEVYVMPMTLVSALSIIRTYVIKMGASPVAGVITDKVGSSIRVMFVGFILMTVSTAAYLVIPKSTGFIWIAVINMIILSVILFGFRGIYFASVSESNISLETTGAVVGFASFIGFSPDAFYYTIAGNWLDKYGQTGYTYIFILSVVCAVIGIFATYALNKINKRENKGLNNKIA

SEQ ID NO: 53615 - protein, 257 aa, Clostridium difficile
MKKGKMMMNKVHFVGAGPGDKELITLKGYKLLSNADVVIYAGSLVNPELLEYCKEDCQIHNSAHMDLQEIIDVMREGIENNKSVVRLQTGDFSIYGSIREQVEDLNKLNIDYDCTPGVSSFLGAASSLGVEYTVPEISQSVIITRMEGRTPVPEKESIQSYAKHQTSMVIFLSVQEIEKVVSKLLEGGYPKDTPIAVIYKATWADEKIVKGTLSDIAVKVKENNINKTALIMVGRFLGEEYNNSKLYDKDFKHEYRG

SEQ ID NO: 53616 - protein, 246 aa, Clostridium difficile
MKKRRKLNTNNVMIILVFILMLSFCICIIVKSDLFDVKKIDVIGNKRVTKSNIMKELNVNLNENIFAYNFKDMKNKLIKNPYIENVEIKRKLPNKIIISLKEKEIFAVLKDEDNYCYIDKKGNLLEELRGSNESKKDLIVDVDYSIDDNKSIKFKNYKTKENVFKTLNYLKEEGIYRKINYVNLKKESNIEMLTRSNIKILLSNDDNLDYNISRVSKILIDLQNKNTNGGTINLNYGKLAVYSPEG

SEQ ID NO: 53617 - protein, 144 aa, Clostridium difficile
MDPVIFIIASLITVYLLNIFLGYLQLKDFNKNYIELKRKGRVAIGRKKGRISSGTIVLILINDDGVIVETRKMQGVTVLARVKSFEGLVGKSLEYIEKSDLTVYNKLLKKAILDAVKQYITFEKNKCEDTNNLSTDEECRMEVV

SEQ ID NO: 53618 - protein, 78 aa, Clostridium difficile
MKYMKELVVDIAKALVDNPDSVVVEEFEDNDGIVLKLTVAQEDMGKVIGKQGRIAKAIRTVVRSVANRENIKVSLEIV

SEQ ID NO: 53619 - protein, 286 aa, Clostridium difficile
MDKRREAAMSYKVINVITAIDYIEEHLSEKLDLDIVANAVHYSKYHLHRTFTTSVGLTMHDYIKRRKLTEAAKLLVFSKKPIIEIALIAGYESQQAFTSIFKAMYKKSPNKYRKEQEFYPLQLRFVLKKDNLFLKNVLELEKEIKLASMSDIPLWMNLVRLVIDGFPNLQEEEYIYQLEQYILEERALILKLNNVAIANMVFNRETRSIDFFGIHPQYRNSDIAQVFLKKVIEDFLIDTDISITTFREGDKADTGHRDMIKKLGFAEAELLVEFGYPTQKFILPLS

SEQ ID NO: 53620 - protein, 338 aa, Clostridium difficile
MKIKVGMNGFGRIGRAVLRIAQEELGDNIEIVPINARATTESLAHLFTYDSCYGTFRGEVEAKDEDTLVVNSKEIKILRYNDPEELPWKELGVDIVIESTGLFTQREKAEKHIKAGAKKVIITAPGKNEDITIVIGVNEKEYDNEKHNIISNASCTTNCLAPFAKVLDEKFGIVKGLMTTVHSYTNDQRILDKSHKDLRRARAAAESIIPTTTGAAKAVSRVLPQLEGKLNGFSLRVPTPTVSLVDLVCELKENVTSEQVNSVLKDAAEGELKGVLGYCDKPLVSIDYKGDSRSSIIDALSTMVIEDNMVKVVSWYDNEWGYSSRTVDLVKYVAEKLK

SEQ ID NO: 53621 - protein, 222 aa, Clostridium difficile
MEERLMKVDPLTTQVYDYISKKIQNGEYEANQRITESEICKSIGVSRTPAREALTRLAGENLLEKIPNKGFVVKEFQEKEKLDTYSVIGVLDALAGSSALQNLTESDLVKMEELTEMMAVSIKYKNYNSYLKLSNEFHDIYITKSDNQVLVNLLNSLRYNFMSKSYTSDNEDELYKMLTYSNNQHIEVVKSMRENDLENVERVLREHWKTIPIAEMKKEKLL

SEQ ID NO: 53622 - protein, 287 aa, Clostridium difficile
YISNYLSKSISIVDYSTLELEKEIVLEDNIYPHHFCIEKEKNLIYIPSSSNGILYVLDLSNDKIIDTVSIGGSLSQVVLSDNELFVANEDSNSIYVLDKNTLNPIGIIGVDNMPHGFDFDRESKKLYVPCINSIVCIDTINKNIQKKINMDFRAWHIELDKQKKEMYISTLDGKLIIIDEVSMDIKKVLYEFLLPVEIRFNYSGKKVYVADLGYNNVRILDYTTSRYIGNIEINGIPQGLEISKDEKLLFVSDTQENSVKVYETANNKLIKEIKVGKEPYNYNLFVG

SEQ ID NO: 53623 - protein, 739 aa, Clostridium difficile
MTGRNKSFTLITILFLTSLFLTMGYIYIEDTKHLLMSEAKIHIKEVAVQGSQLAQRQIEKDLDVLNIFSNYYASNPDIPNEEKMKNLLDEMENQKFYTMAIVDINGNAENTKGDKFSVKDREFFKNSIKGKKYVSSPYVDEVNKSIKKIAISVPLLNNDKVVGVLYCTYNINTLMKLINISFYENNSISYVVKNNGTIILHPQGDSLSKNIYKLLKQDNDIQEVNRLKKELQENKTGATVLNMLEERRYLGYATMDNGNSENNYIKDWNLIFSIPETVVFSNSKQIINRAVYAVLSIVLIFIAIIFYIIYIKKSNEKEILSLAYEDKVTYIGNQNKFYRECSKYLLDKPSLNYIIVYFDINNFKMINDTFGYEFGDNLLITIAKALKEELTEGEVYARLSSDYFAIFCDYKNGRNKIIRKLDNIRSNIESNLSIVFEISLCVGIYFVEEGEVDIQKAVNKANMARSVAKGKNINYAIYNEDVRNKLSEESMILDDIKIALVKNQFEVYYQPKFSLVTGEMIGSEALIRWNHPEHGFISPAVFIPIAEKSKLILKIGRFVFERVCNDLYEWKKQGKKIVPVSVNLSRVELYQPDIVKFINKTIKMYNLSSDFIEIEITETVAINELNILKNVLNELRTYGFSISMDDFGTGYSSISCLRDMPIDILKLDKSFLGGIEHDERSRNIAKSIVSLAKSLDLVVIIEGVESKEQAELMKQFGCDLVQGFYFARPMPAKNFLDLL

SEQ ID NO: 53624 - protein, 450 aa, Clostridium difficile
MNIHFIGIGGISMSALAEICINKGYQVSGSDSNESYLLDKLRDQGATIYIGQKKDNISDDVNMVVYTAAVHPDNEELVAAKEKNKLVMNRATFLGQIMREYKNSIAVSGTHGKTSTTSMLSTIFEYADLDPTILVGGNLSMIGGNVKIGNSNHFITEACEYVDSFLNFNPKISIVLNVEEDHLDYFSGIDEIKASFNKFGKLLPPEGYFIINGDDENIDDILYDVKATIIKYGRDSDNDAVIKDIHFDNSGHGIFRIEYEGRDLGEFELSVYGLHNIYNASSAIMAALVSGIDLETIRKNIKIYKGVGRRFETKGYYKNALVVDDYAHHPTELKATLAAAKKLKKSTLWCIFQPHTYTRTKSLLGEFSEAFYAADKVIITDIYAAREKDPGDIHSKDLVEKLYQNNVDAIYIKEFEDIVKYLRENVKDNDLVITAGAGPIYKVADLLVEK

SEQ ID NO: 53625 - protein, 853 aa, Clostridium difficile
MVEFILNGEKVVAKEGKKLLDFLREDMNITSVKNGCSEGACGTCMVIIDGKATKACVFKTDKLAGKNITTIEGLSERERDVFAYSFASQGAVQCGFCIPGMVISSKALIDVNNNPTEDDIKKALKGNICRCTGYVKIIKAVDLAAKIFRENIDVPKVNCKGLVGENLPRVDAVGKALGYSEYVDDMRIEGMIYGSAVRAKYPRALVKKIDIEEAKAYPGVVAVLTAKDIPGTIKVGHLKKDWDTLIPEGEITRYLGDGIVLVAAETREALEEAKKLVKIDYEELTPLSTTADALREDAPKIHETGNILVKEHLVRGNAKEKIENSKYVVTKRYTTPATEHAFLEPECAVAGPYEDDGVIIYSTDQGVFATQHECADMLGLPYEKVRVINKMVGGGFGGKEDMSVQHHAALLAYHTKRFVKVQLTRKESIIVHPKRHATEMEFTTACDENGYLTGMKATIISDTGAYASLGGPVLQRLCTHAAGPYNYQDIDITGTAVYTNNPPGGAFRGFGVTQSCFATECNLNLLAEMVGISPWEIRYKNAIRPGQVLPNGQFADEGTAMAETLEAVKEEYEKHPRAGIACAMKNSGVGVGIPDVGRCRLVIKDGKVHIRTSASCIGQGLGTVMTQVVCETASLLPENIVHEVPDTHLTPDSGNTTASRQTVFTGEATKVASNKLKEALDSGKTLLDLEGEEFYGEYESITDKMGCDKENPVSHVAYGYATQVVILDENGKLEKVVAAHDVGRAINPISLEGQIEGGVVMGLGYALTEDYPVVNSVPTAKFGTLGLFKSTDIPEIQALIVEKNKDLLAYGAKGVGEICTVPTAPAVQNAYYVFDKEFRTELPLQNTPYSKKK

SEQ ID NO: 53626 - protein, 619 aa, Clostridium difficile
MKRFLRRIILVLFILLIFISFISIKLIHNVGDYGKLINYVGIVRGASQRLTKLEMNHQPNDELIEYIDEILQELITGHGDYGLVITDCNEYNEDLLLLEKKWEDLNIEIKKVRMKEQNNQLLSISEEFFSLANDTVFKIENFSKEKSNYLMTLIIIISIIGILACIILILQYSKKMVRLEKLNVDLKNIAYKDELTGVNTIEKFKLDANQNICIHKDKKFAVFYIDFENFKYINDIFGYDYGDMILKRYANLMMNDIGKYEIFAREIADRFVALRCYVDKEDLVVRQRDVDNELINITNEIKNKHSITVVSGICCIEDVNEKLSIDGLINRANFAQKTVKNKPGTNYAFYNDSIRKKMIEENTIKSRIHEAIEKREFIVYLQPKVNLHSQKINCAEALVRWLTPDKGIISPAIFIPVLEKNFFIALVDKYVFEEVCKWIRKRLDENKPFVQISVNVSRIQFYNTKFVETYSNIQNKYRIPKNTIEIEFTESVAFENQKHLLEIIHDLHENGFTCSLDDFGKGYSSLSVLKDLPFDVLKLDSMFFKASLDKDKEKIVIKNIVHMLKELNITTVAEGIECKEQVEFLRDIGCDLVQGFVFYKPMPILEFEKILDKEFVYNS

SEQ ID NO: 53627 - protein, 209 aa, Clostridium difficile
MSKVVETNHPLIQHKLTLMRDKNTGSKDFRELLTEIAMLMGYEITKDIPLKDVEIETPIQKTSSKVVAGKKLAIIPILRAGLGMVDGLVSLMPAAKVGHVGLYRDPETLKPVEYYCKLPQDIGERDIIVVDPMLATGGSAVAAIDLLKSKGAKSIKLANLVAAPEGIAEVQKYHDDVDIYVASVDERLNEHGYIIPGLGDAGDRLFGTK

SEQ ID NO: 53628 - protein, 74 aa, Clostridium difficile
MFNKVVEIIIEQLGVEDKEITMETSLMKDLEADSLDAVEIIMALEDEFGIEIPDTEAENFKSIGDIVKYIEANK

SEQ ID NO: 53629 - protein, 305 aa, Clostridium difficile
MIYTVTLNPSIDYIVKLDELKTGSTNRVKEEYVYPGGKGINVSRILKELGNDNTSLGFISGFTGEYIIRTLEEKELKTDFIKIKSGFSRINVKIKALKETEINGQGPNIDDEDIDTLYKKLDKLNQDDILILAGSIPSTLDEKLYENIMARLEKKNIKVVVDATKNLLLNVLKYKPFLIKPNNDELEELFGVKLNSIEDMVKYARSLKEMGAINVLVSMGKGGALLITEEEEVLISDVPKGKVKNSVGAGDSMVAGFISGYLNTGKYDYALKLGAASGSATAFSYDLAKREYIDKLVNEISVKKF

SEQ ID NO: 53630 - protein, 127 aa, Clostridium difficile
MKGRLPKVSTNCEIKRGDLYYADLSPVVGSEQGGVRPVLIIQNDVGNKYSPTVIVSAITSQINKAKLPTHVEISSNEYGLNKDSVILLEQIRTIDKKRLREKIGCLDENMMIKVDDGLQISLGLFTF

SEQ ID NO: 53631 - protein, 566 aa, Clostridium difficile
MQDFKVAISNCLKEKIEDLSKEEIEALIEVPPNKDMGDYAFPCFKLAKVFRKAPNMIASELAESIEPSGEITKVIQLGGYVNFFVNKSQLAETVIKKVLDEKENYGHSDFGKDKTVIVEYSSPNIAKPFHIGHIRTTVIGNALYKIYDSQGYKTIRINHLGDYGTQFGKLIVAFKKWGEKEVVESNPIPELLKLYVRFHDEAEQHPEMEDEARAWFNKLENGDEEAQELWQWFRNESLKEFNRVYKLLDIEFDSLAGESFYSDKMNRVIELLEEKNLLKESKGARIVDLEEYKMPPALITKNDGSTLYMTRDLAAAIYRKETYDFDKCIYVVGSQQNLHFQQWFKVIELMGYDWAKDLIHVGFGMVALEEGTMSTRKGRVVFLEDALNQAIDKTKEIILAKNPNAKNVDEISKQVGVGAVVFQELSNSRIKDYTFSWERTLSFDGETGPYVQYTHARCCAVLRKAEVEVTSDIDYSLLADEDSAEVLRVIESFNKNILLALKKNEPHIVTRFMLDLAQAFNKFYHDNPILVENLEIRKARLALVLATKQTLENSLKLLGMHAPERM

SEQ ID NO: 53632 - protein, 317 aa, Clostridium difficile
MSMIEIEKPKVDIVELSEDYRYGKFVIEPLERGYGITIGNALRRILLSSLPGVAVNAIKIDGVLHEFSTIPGVKEDVTEIILTLKELSATIDGEGSRTLKIEAQGPCSITGADIICPPDVEILSKDLAIATLDDNAKLNMEIFVDKGRGYVSAEENKTENVPIGVLPVDSIYTPVEKVSYHVENTRVGQKTDYDKLVLEVWTNGSINPQEGISLAAKVLVEHLNLFIDLTEHVSSVEIMVEKEEDQKEKVLEMTIEELDLSVRSYNCLKRAGINTVEELANKSEDDMMKVRNLGKKSLEEVIQKLEELGLGLKPSEE

SEQ ID NO: 53633 - protein, 1751 aa, Clostridium difficile
MDKGEENKMKIPKKIAAMLTVTMIAGSSTAGIASAQTVATNLTGQERYETAVKISQDGWKNADEVVIVNDSSIADALSATPFAKAKNAPILLTSKDKLNDKTKAEIQRLKAKKVYLIGGTSVLSTNIEKEIKDLKISFERISGAERYQTSLELAKKLDAISDVKKIAVVNGEKGLADAVSVGAPAAQNNMPVILADSKNGTAVADKFIKDAGITQSYVVGGESSISEAVKNKLPNSTRLGGTDRNDTNAKVIKEFYKKTDLKNAYVTKDGMNKQDQLIDALAVGVLGAKNQSPVVLVGKNLSASQKSLVNSKSFDKITKVGGNGNETAFNEMKSLQEVKTVEAKTISELKSAIDKATANDVINFKPTSEVKEAFTIQTDKAVTVNLNGTYTKTVTINMPNGDVNNYAKVDDVVIDDVKDGTFVNYGKITNLKVNDKNGAKIENNSKGEIGSLTVASGASQVKVTNGGKITTVTNNSKGTTIDNKGTISSVKGDNSPTISGNSPSSNSSGGSSSSGGSSGGSSGGSSSSKVGQIKFSATDKQIKMASGDKTVDPSDNTYILKLTNGTVKDGDVKANVKVAGLPSGLDYTAVGNRSANTITITVSGTASQSIQNDLNNVSVLVKAGAVSGTGATDSIANTTFEIKKYVAPAIGQLTFDATDKQIKMASGDKTVDPSDDTYVLTLTKGTAKDGDVKANVEVTGLPSGLDYTAEGDSSTNTITITVSRTASQAVQTDLDNVSVLVKAGAVSETTATDSAANATFEVKKYVAAPAVGQLTFDATDKQIKMASGDKTVDPSDDTYVLTLTKGTAKDGDIKANVEVTGLPSGLDYTAEGDSSANTITITVSGTASQAVQTDLDNVSVLVKAGAVSETTATDSAANATFEVKKYVAAPAVGQLTFDATDKQIKMASGDKTVDPSDDTYVLTLTKGTAKDGDIKANVEVTGLPSGLDYTAEGDSSANTITITVSGTASQAVQTDLDNVSVLVKAGAVSETTATDSAANATFEVKKYVAAPAVGQLTFDATDKQIKMASGDKTVDPSDDTYVLTLTKGTAKDGDVKANVEVTGLPSGLDYTAEGDSSANTITITVSGTASQAVQTDLDNVSVLVKAGAVSETTATDSAANATFEVKKYVAPAIGQLTFDATDKQIKMASGDKTVDPSDDTYVLTLTKGTAKDGDVKANVEVTGLPSGLDYTAEGDSSANTITITVSGTASQAVQTDLDNVSVLVKAGAVSETTATDSAANATFEVKKYVAPAIGQLTFDATDKQIKMASGDKTVDPSDDTYVLTLTKGTAKDGDVKANVEVTGLPSGLDYTAEGDSSANTITITVSGTASQAVQTDLDNVSVLVKAGAVSETTATDSAANATFEVKKYVAPAIGQLTFDATDKQIKMASGDKTVDPSDDTYVLTLTKGTAKDGDVKANVEVTGLPSGLDYTAEGDSSANTITITVSGTASQAVQTDLDNVSVLVKAGAVSETTATDSAANATFEVKKYVAPAIGQLTFDATDKQIKMASGDKTVDPSDDTYVLTLTKGTAKDGDVKANVEVIGLPSGLDYTAEGDSSANTITITVSGTASQAVQTDLDNVSVLVKAGAVSETTATDSAANATFEVKKYVAPAIGQLTFDATDKQIKMASGDKTVDPSDDTYVLTLTKGTAKDGDVKANVEVIGLPSGLDYTAEGDSSANTITITVSGTASQAVQTDLDNISVLVKAGAVSETTATDSAANATFEVKKHASDPISTIGKISSGLSSLFNILK

SEQ ID NO: 53634 - protein, 739 aa, Clostridium difficile
MKKREKVFDGLVFKHILILLILLVLIDLTSTIIYASNSMEITSRNMIEASKRELENYLEVNISLLKALSQDDRFSNGETSLIEKGKLLSPYQKEYNLFMIGITDTKGNASSTYRENVNSIKDKPSFEKAIKTKQVVVSDIEVSNVTGDKVFIIYVPIVKNNEMIGTIFASFYFQDVNNLISRSNFDDSIKFLMIDKDYTIISHPNKKYVNDKSKMLDLEGNIIGTTKSEILKNINKKCQGDFLSWDNWRLYNVKYTNIKWTNWTLVSKCNIFKNFKNLIVNFMIKLYFYIVIFMILWKLSNAKLIEQLKKLAYYDSLSGIKNKEKFRKDSMYILKNYYQDNFYLVQLDVNKFKYINEMFGYAEGNKILIHISQVLNNNTNKYEICARMDNDHFILLIACNTEDELLNRLSKINKEICNLNTTNSSKYKIVMSSGIYKITKKDDIKKIDLLIDRANIAAKSKKEKYEHSYSFFNEDTRNRLYKEKRLEDNMNKALEKGEFIVYYQPKYSLDDVNEIEGAEALIRWNSPEFGFISPIDFVPLFEKNGFIVNIDMFVFEEVCKTLNKWINKGYTPVPISVNMSRVHLYRDNFIENITDLISKYNISPEFIELELTESVVFDNLNILIDIMKKIKEIGFLISMDDFGSGYSSLNLLKDLSFDILKLDRGFLIETTDTKRGKIIISKIVEMAKAIDIKVICEGVETYEQVEFLKEIGCDKVQGYLFAKPMVLDEFEKHLNFKFD

SEQ ID NO: 53635 - protein, 1038 aa, Clostridium difficile
MIYMAKFKPLVDSSVKQAEAQVFDYWKDINILEKTLEKGKDDPSFVFYEGPPTANGNPGVHHVLSRTLKDSVCRYKTMSGYQVKRKAGWDTHGLPVEIQVEKELGLTSKQQIEEYGIAEFNQKCRESVFSFEKQWRIMTERMAYEVDLDNPYITLDNNYIESVWWILNKFNKEGYIYEGHKILPYCPRCGTGLASHEVAQGYKEVKTNTVIAKFKKKDADEYFLAWTTTPWTLPSNVSLTVNADVDYLKVKKGDEVYYVSKPLADKVLGEDYEVLEEMKGKDLEGLEYEQLMPFVEVDKKAFFITVGDYVTTEDGTGIVHTAPAFGEDDYNTGKRYDLPVIQPVDETGKFTSTPWEGRFVMEDGLDVEIIKWLASENKLYSKEKVVHNYPHCWRCQTPLVYYAKPSWYIEMTKLKDKLIENNNGVKWFPSFVGEKRFGNWLENLNDWAISRTRYWGTPLPIWRCECGHTDSVGSRAELAEKAIEDVNPETVELHRPYVDDIHLKCEKCGKPMTRVTEVIDCWFDSGAMPFAQHHYPFENKENFDQLFPADYISEGIDQTRGWFYSLLAVSTFVLGKAPYKSVLVPDLVLDKDGKKMSKSRGNTVNPMELFDQYGADALRWYLLYVSPPWTPTKFDMDGLKEIQSKFIGTMKNVYNFFTLYANTDDINPTEFFVEYKDRPELDRWILSKFNNLMKDVEENLAIFELNKTLRMIQDFINDDLSNWYIRRSRRRFWATELTEDKKAVYNTTYELLHGLCRAIAPFAPYMSEEMYRNLTGEVSVHLAEYPKCNEELVDTKLEEKMDLAKNLVTLGRASREVERIKVRQPLQKVLVDGKFEDTISDVVDLIKEELNVKEVIFAKDLDEYMNFSLKPNFKEAGPLLGSKMNLFVGALSKLNAHETANKLEKGETLTVDLDGEAFEFNKDLVLIGITAKEGFNVSVENNLFVILDTKLTEELINEGYAREFISKVQQLRKSNNFEVLDNIVIEYCGDDEIAKAVDHFNEYIKSETLALEINRVDDKSLEEQNLNDHMTGIKVIKK

SEQ ID NO: 53636 - protein, 212 aa, Clostridium difficile
MGIITKIEQQKRNDDRVNIYVDDKFFIAIFKELVYTFNLKKGNEINEEELKPILDDEMYIKAKNKALNILSHADQSEKKLKEKLSSEFDENIIERVIDFLKSYNLVNDSVLAQKIVNTNVNLNKCGKNRIKQNLYNKGINRSTINEAVSELDKDTEFENAMYLAKKRYERVKKEDKKKIYQKISQHLSYKGFDYDIIKRVLNKLLNFDEYDI

SEQ ID NO: 53637 - protein, 214 aa, Clostridium difficile
KFKIYREILVDWNKKMNLTGIEDEKEVYIKHFLDSISAVKNGYIKKWMSIIDVGTGAGFPGIPLKICLDSLELTLLDSLNKRINFLEEVSRVLELDNITFIHGRAEDFGKNEDYREKYDVATARAVAGLPILMEFCVPFVKVGGYFICLKGPNANLELEESQKAIDVLGLEYIEKIDVELPEVDLNHNILVFKKVMETPVKYPRKAGKPAKNPI

SEQ ID NO: 53638 - protein, 485 aa, Clostridium difficile
MKEYNSLLIDISKKGRKAYSLPKLDIDDIKIEDMIDQDMARQSELNLPEVGELELVRHYTLLSNKNFGVDTGFYPLGSCTMKYNPKINEDMAALPNFTGMHPYQSSDTAQGSLSLMYDLSRRLAEITGMDEVTLQPSAGSHGEFTGLMIIKAYHENRGDHKRTKVIIPDSAHGTNPASAAMANFDVIQIASDKNGAVDINVLKEVLNDEVAALMLTNPSTLGLFEKNIKEIATLVHEAGGLLYYDGANMNAIMGITRPGDMGFDVVHLNLHKTFSTPHGGGGPGAGPVGVKKELVPFLPIPVIERKEDKYVLNYDREKSIGKIKNFYGNFGVLVRAYTYILTMGRDGLKEASEMAVLNANYIKESIKDDYILPIDTLCKHEFVLGGLPRGEANIKTIDIAKRLLDYGYHPPTMYFPLIINEALMIEPTESESIETLDSFIEAMKSVAKEAKEEPELLKTAPHNTLVKRVDDARAVKKPILTWSQR

SEQ ID NO: 53639 - protein, 451 aa, Clostridium difficile
MDLKGKKVLLVGLAKTGISTIKHLDKLGASIIVNDIKDENKLRNILDELKSINDIKYILGHHPEDVDDIDMVVVSPGVPLDLPFILKLKNSGKYIIGEVELAFKLSNNPIFIGITGTNGKTTTTSLVGEIFSRAKRDTYVVGNIGNPVIDTIETSSEESVLVTELSSFQLESIDEFRPKVSAILNITEDHLNRHHTMEKYIEAKANIFMNQTVEDFCVLNYDDEIVKSLADKCNAKVIYFSRTKKVNGGVYLENNDIIIDIDDKIKFLNKDDVSLPGGHNLENCMAAIAIAYVCKIDLEVIKDVLMTFKGVEHRQEFVRNLDNVIYVNDSKGTNPDSTIKAIQSYDRPIILIAGGMDKGSNFDELLETAKSYVKSLVLLGETASNIENCAKNKGFNDIHIVKDMEEAVKTSYEISKSGDIVLLSPACASWDMYESFEVRGKDFKDNVNNLK

SEQ ID NO: 53640 - protein, 440 aa, Cornyebacterium diptheriae
MSAIFQAFRDADLRKKILITIALIILYRIGAQIPSPGVDYASISGRLRELTSDSSSVYSLINLFSGGALLQLSIFAIGVMPYITASIIVQLLTVVIPKFEELKKEGQSGQAKMDQYTRYLTLGLALLQSSGIVALADREQLLGSGVSVLKEDRNLWTLVMLVLVMSAGAILVMWLGEIITERGIGNGMSLLIFAGIATRIPSDGANILSSSGGVVFAVVLVAVIVLVVGVVFVEQGQRRIPVQYAKRMVGRRQYGGSSTYLPLKVNQAGVIPVIFASSLIYMPVLITQIINSGSHEVSDNWWQRNVIQYLQTPSSWQYIVLYFALIIFFSYFYVSVQYDPNEQADNMKKYGGFIPGIRPGRPTAEYLGYVMNRLLFVGALYLGIIAVLPNIALDLGVGASSAGSTPFGGTAILIMVSVALTTVKQIESQLLQSNYEGLLK

SEQ ID NO: 53641 - protein, 964 aa, Cornyebacterium diptheriae
MAAKTGNKRLVIVESATKAKKIAPYLGDDYIVEASVGHIRDLPRGAADVPAKYKKEPWARLGVNTDKGFEPLYVVSPDKKKKVADLKAKLKLVDELFLATDPDREGEAIAWHLLEVLKPKVPVKRMVFNEITKPAILAAAENTRELDDNLVDAQETRRILDRLYGYEVSPVLWKKVMPRLSAGRVQSVATRVIVERERERMAFISADYWDVEAEFDTGKPAQDSNPTSFTGRLTALDGKRVATGRDFNDRGELKGDAVVVDKQRAEALVEELTGVAMSVTKVEEKPYTRRPYAPFMTSTLQQEAGRKLHYTSERTMRIAQRLYENGHITYMRTDSTTLSEQGLKAAREQAISLYGADYVADAPRRYDRKVKNSQEAHEAIRPAGERFATPGDLHGQLDAEEFKLYELIWQRTVASQMADAKGTSMKVTITGNNAEFSATGRTITFPGFLRAYVEVSTLADGRDVADNAESHLPRLAEGDGVETKNLEADGHSTNPPARYTEASLVKKMEDLGIGRPSTYASIIKTIQDRGYVYSRGNALVPSWVAFAVIGLLEKSFAALVDYDFTSSMEDELDEIAAGHENGAHWLTGFYFGDAEASDAKAESIARHGGLKALVGDNLEQIDARLVNSLPLFKDQEGRDVNVRVGRYGPYLERQVGVSEDGEPEYQRANLSDSTTPDELTLELAEKLFATPQSGRELGRNPKNNRMIVAKEGRFGPYVTELVNDDERTEVEAKAEEIVAAEREAEDLQRAAEGKRAKNWGTKTAAAQKEKRIAQIIEETLKPSTASLFKTMEPSSVTLDEALQLLALPREVGVDPSDNEVITAQNGRYGPYLKKGSDSRTLASEDQIFSITLDEARRIYAEPKRRGRGATSQSVIKQLGDNDVSGKPMSVRDGRFGPYVTDGTTNASLRRGDDPTQLTEARANELLSERRAKEAADGGSSKKATKKASKKTTKRVAKAGARKKK

SEQ ID NO: 53642 - protein, 181 aa, Cornyebacterium diptheriae
MRLVLLGPPGAGKGTQAAILSEKLRIPHISTGDLFRANIGEGTPLGKEAKSYIDAGKLVPTDVTARMVKARLQKDDAEVGFLLDGFPRTVEQAEILKEMLKGFGVELNGVINYEVAEDVVVERMLARGRADDNEDTIRTRLQVYRDETAPLIRHYGDDIITIKAEGSIEDINARTLGALGK

SEQ ID NO: 53643 - protein, 138 aa, Cornyebacterium diptheriae
  MISC_FEATURE (27)..(27): X=any amino acid
  MISC_FEATURE (131)..(131): X=any amino acid
GTRISTGYPSTTPVGLALGPDSPWEDXLNPGTLSHPAEKFSTFHFVTHACILTRTHSTPSSHPGASQQCRRSPTQPTNTLLTAAASAVYLSPTTLSRRTTRPVSYYALFQGWLLLSQPPGCLRDPTSFSTXYTLRGLN

SEQ ID NO: 53644 - protein, 122 aa, Cornyebacterium diptheriae
  MISC_FEATURE (19)..(19): X=any amino acid
  MISC_FEATURE (24)..(24): X=any amino acid
  MISC_FEATURE (118)..(118): X=any amino acid
MLSAVIPPVRSQPALPLAXQLAHXRYVRPGPLVLGTAFFKFQRARRDRDRTVSRRSKPSSRAALMGEQPNPWDLLQPQDATSRHRGAKPSRRYGLLGKISLLSPGYLLSVERHHFHKXVPDH

SEQ ID NO: 53645 - protein, 72 aa, Cornyebacterium diptheriae
MAKEGAIEVEGRIIEPLPNAMFRVELDNGHKVLAHISGKMRQHYIRILPEDRVVVELSPYDLTRGRIVYRYK

SEQ ID NO: 53646 - protein, 122 aa, Cornyebacterium diptheriae
MARLAGVDLPRNKRMEVALTYIYGIGPARAAQLLEETGISPDLRTDNLTDEQVSALRDVIEATWKVEGDLRRQVQADIRRKIEIGCYQGLRHRRGLPVRGQRTKTNARTRKGPKKTIAGKKK

SEQ ID NO: 53647 - protein, 134 aa, Cornyebacterium diptheriae
MPPKTRSTARRSGRRVVKKNVAQGHAYIKSTFNNTIVSITDPSGAVIAWASSGHVGFKGSRKSTPFAAQLAAENAARKAMDHGMKKVDVFVKGPGSGRETAIRSLQAAGLEVTSISDVTPQPFNGCRPPKRRRV

SEQ ID NO: 53648 - protein, 201 aa, Cornyebacterium diptheriae
MARYTGPATRKSRRLRVDLVGGDMAFERRPYPPGQAGRARIKESEYLLQLQEKQKARFTYGVLEKQFRRYYAEANRLPGKTGDNLVILLESRLDNVVYRAGLARTRRQARQLVSHGHFTVNGKKINVPSYRVSQYDIIDVREKSQKMIWFEEAQENLLDAVVPAWLQVVPSTLRILVHQLPERAQIDVPLQEQLIVELYSK

SEQ ID NO: 53649 - protein, 338 aa, Cornyebacterium diptheriae
MLISQRPTLTEEYVDSARSRFVIEPLEPGFGYTLGNSLRRTLLSSIPGAAVTSIKIDGVLHEFTTINGVKEDVSDIILNIKGLVLSSDSDEPVVMYLRKEGAGVITAGDIEPPAGVEIHNPDLHLATLNEQGRLDIEMIVERGRGYVPATLYSGPAEIGRIPVDQIYSPVLKVSYKVEATRVEQRTDFDKLIIDVETKNSMAPRDALASAGKTLVELFGLARELNTAAEGIEIGPSPQETEYIAAYGMPIEDLNFSVRSYNCLKRQEIHTVGELAECTESDLLDIRNFGQKSINEVKIKLAGLGLTLKDAPEDFDPTQLDGYDAATGDYIDTDPEETE

SEQ ID NO: 53650 - protein, 157 aa, Cornyebacterium diptheriae
MPTPKKGARLGGSASHQKKILANLASQLIEHEAIKTTDAKAKLLRPYVEKLITKAKGGSVADRRNVAKFITNKEIVAKLFNELAPKFENREGGYTRIIKLENRKGDNAPMSQISLVLEETVSAEATRAARAAASKKAEEPAEAVEAEAPAADEAEEK

SEQ ID NO: 53651 - protein, 558 aa, Cornyebacterium diptheriae
MSETPSVWNETWNEITNELIQLSREPESEIPRITAEQRAYLKLVRPAAFVEGIAVLRVPHSRAKETIETHLGQAITSVLSRRMGRPFTVAVTVDPTLDVIQDLPHDVPEQHIVQHHVPEHPHYSPVSQGYPPHYAPEQSEYNTEYSDEYPSGWATYHVQTPQPSQSSQSAQQQPAQRMPDRRRYAEQQQVPQRSEEPVMGQRRAREKPAHDPDRNGSLNPRYTFDTYVVSDSNKLPWSAAWAVAEKPARAYNPLFIWGDSGLGKTHLMHAIGNYAQELDPKLKVKYVSSEEFTNDYINSVRDDRQEAFKRRYRDLDILMVDDIQFLQGKEGTQEEFFHTFNALQQADKQIVLSSDRPPKQLTTLEDRLRTRFQSGLIADIYPPDLETRIAILLNKASAEGITADRDVLELIASRFNASIRELEGAFIRVSAYASLNEAPINMATAQEALRDMMPEQADIEITAGMIMSVTAEYFHIDVDTLKGSGKSRSVAHPRQLAMYLCRELTDLSLPKIGEHFGGKDHTTVMYAYRKIGKEITEKRDTYDEIQQLTQQIKSSDRA

SEQ ID NO: 53652 - protein, 405 aa, Cornyebacterium diptheriae
MINHIEEPSSMDAHAVSFRVEKDDLSGAVSWVARNLPTKPTQPVLRAVVITADDEGLEFAGFDYEVSTKVHINADVRQPGRIAVAGKLMSDIIGTLPNKTIEVFVEGTQVQVVCGSSRFELPLIPLDEYPPLPQLPAVTGAIDPNLFTDAVLQVAAAAGRDETLPMLTGIHMEIDGENVTLTATDRFRLALRRFTWSPANPEAKAKLLIPAKNLSDNARSLDSGSTEPVEIAVGTGENIGAEGLFGIHIDNRQTTTRMLDADFPNVSPLLPKVHNAMASVEISALSDAIRRVALVAERNAQIRMQFTRDEVILSAGGSDAGHAEESVPCAFTGDQEFLIAFNSAYLRDGLSVIRTSRVVFGFTEPSRPAIMIPEPETLPEASADGTYPTPDTEFTYLLMPVRLPG

SEQ ID NO: 53653 - protein, 685 aa, Cornyebacterium diptheriae
MHASVATAEHEYGASSITILEGLEAVRKRPGMYIGSTGERGLHHLVWEVVDNSVDEAMAGYATHVDVTLLADGGVEVVDNGRGIPVEMHPSGAPTVQVVMTQLHAGGKFDSDSYAVSGGLHGVGISVVNALSTRVEADIKRDGKHWLQNFSMAIPDPLVEGGNARGTGTTIRFWPDAEIFETTTFKFETISRRLQEMAFLNKGLTITLVDKRVTDEELELEAIAEEGDTAENVSLDQIDVDADGNIDAPAAPKKREKKKVFFYPDGLKDYVAHLNKSKQVIHPTIISFDAKGNDHEVEVAMQWNNSYSQSVHTFANTINTFEGGTHEEGFRAALTSLMNRYAREHKLLKEKEANLTGDDCREGLSAVISVRVGDPQFEGQTKTKLGNTEVKGFVQRMVNEHIADWLDANPAEAKTIINKAVSSAHARVAARKARDLVRRKSATDLGGLPGKLADCRSKDPEKSELYIVEGDSAGGSAKAGRDSLYQAILPLRGKILNVEKARLDKVLKNAEVQAIITALGTGIHDEFDIKKLRYHKIVLMADADVDGSHIATLLLTLLFRFMPQLIEEGHVYLAQPPLYKLKWGKGEPGFAYSDAERDTLLAEGLAQNRKINKDDGIQRYKGLGEMNASELWETTLDPKYRVLRRVDITDAQRADEIFSILMGDDVSARRSFITRRAKDVRFLDI

SEQ ID NO: 53654 - protein, 856 aa, Cornyebacterium diptheriae
MSDDLLGGDGYDRVHPIDLNEEMETSYIDYAMSVIVGRALPEVRDGLKPVHRRILYAMYDSGYRPDRSYVKSARPVSDTMGQFHPHGDSAIYDTLVRLAQDWNMRYPMVDGQGNFGSRGNDGPAAMRYTECRLTPLAMEMVRDIRENTVDFSPNYDGKTQEPDVLPSRVPNLLMNGSNGIAVGMATNIPPHNLRELGDAIFWLLDNPEADEASALEACMKYVKGPDFPTAGQIVGSQGINDAYTTGRGSIRMRGVTSIEEEGNRQIIVITELPYQVNPDNMISNIAEQVRDGKLAGISKIEDESSDRVGMRIVVTLKRDAVPRVVLNNLYKHSQLQTNFGANMLSIVDGVPRTLRLDQMLRHYVTHQIEVIVRRTQYRLDEAEKRAHILRGLVKALDMLDEVIALIRRSPTVDIARTGLMELLTVDEIQADAILAMQLRRLAALERQKIVDELAEIELEIADYKDILARPERQRAIVRDELAEIVDKYGDDRRTQIIAATGDVTEEDLIARENVVVTITSTGYAKRTKVDAYKSQRRGGKGVRGAELKQDDVVRHFFVSSTHDWILFFTNFGRVYRLKAYELPEASRTARGQHVANLLEFQPEERIAQVIQIQSYEDAPYLVLATAQGRVKKSRLSDYESNRSGGLIAINLNEGDKLIGAALCDNDDDLLLVSEEGQSIRFNANDDQLRPMGRATAGVKGMRFKGDDQLLAMTVVKPDAFLLVATSGGYGKRTSLDEYSPQGRGGQGVLTFKYTPKRGKLIAAVVVDEDDEILAITSAGGVIRTVVNQIRPSSRATMGVRLVNLEDGVELLAIDRNVEGEGEEAAEAVATGAVDGPAERGKQTEVDLGIDNADEEA

SEQ ID NO: 53655 - protein, 426 aa, Cornyebacterium diptheriae
TRIRRFFTYPGGEYEMDIIHATEGNDGVVLDKLLSQTGMVTFDPGYVSTGSTESKITYIDGDNGILRHRGYDIADLAENATFNEVSYLLIKGHLPTVDELHKFNNEIRHHTLLDEDFKSQFNIFPRDAHPMSVLASSVNILSTYYQDQLNPLDEEQLDKATVRLLAKVPMLAAYAYRASKGAPYMYPDNSLNARENFLRMMFGYPTEPYEVDPVVAKALDKLLILHADHEQNCSTSTVRMIGSAQANMFVAVAGGINALSGPLHGGANQAVLEMLEEIKANGGDATDFMNRVKNKEKGVRLMGFGHRVYKNYDPRAAIVKETAHEILEHLGGDELLDLAMKLEEIALSDDYFVSRKLYPNVDFYTGLIYRAMGFPTDFFTVLFAIGRLPGWIAQYREQLATTTKINRPRQIYTGETLRKVTPREQR

SEQ ID NO: 53656 - protein, 147 aa, Cornyebacterium diptheriae
MSTYHPKSGDITRKWYVIDATDVVLGRLATHAADLLRGKGKPQFAPNVDCGDHVIVINADKVHVSSNKREREMRYRHSGYPGGLKTMTLGRSLEVHPERVVEESIRGMMPHNRLSRASVKKLHVFAGSEHPYAAQKPETYEFKQVAQ

SEQ ID NO: 53657 - protein, 501 aa, Cornyebacterium diptheriae
MTRTTAHELIAQVLDTDSFHSWDTAPVYGDISESYQQFLAKAREKSGVDESVITGEGTVYGHRVAVVLSEFNFLGGSIGAATARRIIAAIHKATEQRLPLLISPSSGGTRMQEGTPAFALMVSITTAVYRHKDAHLPYLVYLRNPTTGGVMASWGSAGHFTFAEPDALLGFLGPRVVELTTGRPLTQGVQSGENLAEKGVIDGVISPRELRASLKKIVEVILSPADVTATPHSDPCQIDSDRHSVWESIETTRHIDRPGARSIMHAIGRDNYVQLFGSGDGRRSPAVIVAVARLAGRSAVIIAQDRHAQPPHATTELGTEALRCARRGILLAHELQLPLISIIDTPGAELSDYAEEHGLAGSIARTLSELVSVDVPTLSLILGQGCGGGALAMLPADKVLATSHAWLSPLPPEGASAIIYRDTSHAAQMMEEQQVSAVTLKEVGIIDAIIDEPVAAHQHPDAFATCVLEKVTAALAELDDSPAVGRESRLQRYEKLAHTLI

SEQ ID NO: 53658 - protein, 177 aa, Cornyebacterium diptheriae
MSDQNVTENFEADAADIAAAAAATEEFTNTIGDVVAPEAEVETAAPVLHEGPIQTVGRRKRAIVRVRMVEGSGQFTCNGRTLEEYFPNKLHQQLIKAPLALIDRDGQFDIQATLTGGGPTGQAGAFRLAIARALNVYNPADRAALKKAGFLTRDARAVERKKAGLHKARRAPQYSKR

SEQ ID NO: 53659 - protein, 290 aa, Cornyebacterium diptheriae
MVTMKQHENIIPTITLNDGTEMPAIGFGTYKLREQDAYRAVRSAIEVGYRHIDTASLYKNEEEVGRAVADAITAGEVARDELFITTKVWNDMHGDQLTQRSFQESLHRLGLDYIDCCMVHWPWPQKGLYVESFAALAKIQGLGQLQSVAVANFYPEVLREIVAETGIAPVLNQVELHPGFSQAEQRAVDRELGVVTEAWSPLGRGDSLNAEAITLIAQCYEKTPAQVTLRWIHQLGCSVVPKSANPQRQRENLDIFDFELNTEDMNSITSLDEQGGRLFVDPHDFPGEVE

SEQ ID NO: 53660 - protein, 450 aa, Cornyebacterium diptheriae
MEGMTRLFGTDGVRGLANRKLTALLALKLGAAAAEVLTKDNRSTSRRPVAVVGRDPRVSGEMLAAALSAGMASRGVDVLRVGVLPTPAVAYLTDFYGADMGVVISASHNPMPDNGIKFFSKGGHKLPDSVEDEIEKVMETIPDGGPTGHGIGRVIEEAVDAQETYLKHLKGAVPRSLEGITVVVDCANGAASEVAPLAYAAAGAKVIPIHNHPNAYNINDSCGSTHIDQVQAAVLEHGADLGLAHDGDADRCLAVDAEGNVVDGDQIMAILALAMKENGELHKSTLVATVMSNLGLRLAMKEAGIELRTTKVGDRYVLEELNAGGFSLGGEQSGHIVLPDHGTTGDGTLTGLSLMSRMAETGLSLKVLASAMTVLPQVLINVPVSDKTIIQTHPDVVAAMERASDELGEDGRVLLRPSGTEELFRVMVEAPSKETARRIAADLASVVAKI

SEQ ID NO: 53661 - protein, 382 aa, Cornyebacterium diptheriae
MNLLETRISCDAIAANTRRLKDMVAPAQLMCVVKADGYNHGAPEVATVMARNGADQFGVATLAEAHQLRDAGITLPILCWIWSPEQDFSAAIDRDIDLAAVSMDHVRALIAEAMRRPAGTRVRVTVKIDTELHRSGIDEANWTEAFELLHACPQVNVTGVFSHLACADDLESDYTDHQAEVFRRAISAGRNVGLDLPVNHLAASPATLTRPDLHFDMVRPGLALYGHEPIAGLDHGLREAMTWIGSVTVVKPIAAGQGTSYNMTWHAPADGYLCVVPVGYADGLPRNVQGHLEVTIAGTRYPQVGRVCMDQIVVFLGDNSRGVAPGDEAIIFGPRDTQAMTVTELACATGTINYEILCRPTGRSHRTYSALDAVAPTHPTES

SEQ ID NO: 53662 - protein, 552 aa, Cornyebacterium diptheriae
MFTPVIDTVGGSLGLSALCAILPLIGFFIFLMVLKMKAHWAALSSVGVALLVGIFLFKMPANLALLSFAEGVAFGLFPIVYVIWMAVWIYDLTVKSGRFEDLRTIFSKIGRGDMRVQAMLIGFAFGGLLEALAGFGAPIAIVAAMLLAIGLKPMKAVLVTFVANCAPVAFGAMGIPVTTGGLLTQIPGEQVAAMAGRQVSLIALIVPFILALIMDGTRGVRQTWPMALLLGITFGGGQFLASNYFSYVLTDVVACLLSLICGVAFLRVWKPKTPEDQASEIDASTIHLSADRAFLALFPYLLVVVVFSITSLWKIGVNIPAALKSTDIKVQWPGLHGHLVNQAGEPIPNTIFNFNWLSTPGTILFFCGLITVLVYSAAAKNSNGAYPMSFKAGFSQLAEGAYKMRFSALTIAAVMGLAYVMNLSGQTASIGAFLAATGTIFPLLSPLLGWIGTWVTGSATSANALFAQMQSTTATQVSVSPTLLVGANTAGATLGKMMSPQTLTIAANAVNMENGERKIMAQAWKYSLGLLVYICIIAYLQSTPILGWMVVG

SEQ ID NO: 53663 - protein, 550 aa, Cornyebacterium diptheriae
MTPADLSQLIKQTAIDVLSARELDTTVLPETVVVERPRNPEHGDYATNVALQIAKKVGMNPRELGQVLADSLAANTAIDEASIAGPGFINIRLAAAAQGEIVAKILEAGATFGHSDLYQGRRVNLEFVSANPTGPIHLGGTRWAAVGDSLGRVLEASGAQVTREYYFNDHGRQIDRFTNSLVASAKGEPTPEDGYGGDYIKEIADAVVAQHPDVLALAEADLNERFRATGVEMMFAHIKESLHEFGTDFDVYFHENSLFESGAVDKAIQTLKDNGNLYFNEGAWWLKSSEYGDDKDRVVIKSDGDAAYIAGDIAYVADKFDRGHDLCIYMLGADHHGYISRLRAAAAAMGYEPSNVEVLIGQMVNLVRDGKAVRMSKRAGTVITLDDLVEAIGIDGARYSMIRSSVDSSLDIDLQLWEQQSSDNPVYYVQYGHARLCSIARKAADLGITAIDPDLSLLTHDREGDLIRTLGEFPAVVKAAAELREPHRIARFAEDLAGTFHRFYDSCQILPKVGESAEPIHTARLALANATRQVLANALRLVGVSAPERM

SEQ ID NO: 53664 - protein, 308 aa, Cornyebacterium diptheriae
MAIELPVGKKVTVTVPASSANLGPGFDTLGLALSLYDTVEVEVTDHGLEVEVFGEGQGELPLDGSHLVVKAIRAGLKAADVQVPGLRVVCHNNIPQSRGLGSSAAAAVAGVAAANGLAGFPLDDARVVQLSSAFEGHPDNAAASVLGNAVVSWTEIPVDGRTEPQFKAVTINVDSRIKATALVPDFHASTEAVRRVLPSDVTHLDARFNVSRCAVMTVALQHHPELLWEGTRDRLHQPYRADVLPVTAEWVNRLRNRGYAAYLSGAGPTIMVLHTEPVDEAVLNDAREAGLRVLSLDVADAVSVKVDA

SEQ ID NO: 53665 - protein, 350 aa, Cornyebacterium diptheriae
MIVLGIESSCDETGVGIIDLADDGTMTIVGDAVASSMEQHARFGGVVPEIASRAHLESMIPVMKEALAQAGVERPDAVAATVGPGLAGALLVGASAAKAYAAAWGVPFYGVNHLGGHVAVANLEGEELPHSIALLVSGGHTQILEVQAVGKPMRELGSTLDDAAGEAYDKVARLLGLGYPGGPVVDKLAARGNRKAIRFPRGLSRADDLRGEHRYDFSFSGVKTSVARYVESAEREGRVISVEDVCASFQEAVVDVLTSKAIMACKDTGASVLLLGGGVAANSRLRELAAARCQSASIELRVPSFKLCTDNGVMIAAVASQLIHEGAQPSGLSVGTDTSLEVEIPLVHSL

SEQ ID NO: 53666 - protein, 687 aa, Cornyebacterium diptheriae
MTNTDNSAQRNLAALRLPELRKIAAEMGLKGTSALRKGDLIAAINGTSAAHPTSVAPSEENKADAPKKERPARRRATKHVAQDAGSEPAPVVTEVAAPAEQNPAPKQEKEAPAGESERQPRRRRAVKTSVKTTQEEPTEVRVAEAAEATDKSSEEQSAEAGSEDKDNYHYESRSAARRARRNRARREQREYNRPGTKDESEASQPENENSRNDVAPESSKVADNSNEQARSDQADQPTKSDSNDNGREDNRRGNRHERGERGDRGDRNRRNRRNRRGRDRDDNRDNRENNNNEPREDEVLQNVAGILDIVDNNVAFVRTSGYHAGAADVYVNNQMIRRLGLRSGDAIVGQVRMNGENNHGGHNRGRNRQKYNPLVRVDSVNGMTVEEAKARPEFAKLTPLYPNQRLRLETEPKVLTTRVIDLIMPIGKGQRALIVSPPKAGKTTILQNIANAIATNNPECYLMVVLVDERPEEVTDMQRSVKGEVIASTFDRPPSEHTAVAELAIERAKRLVEQGQDVVVLLDSITRLGRAYNNSSPASGRILSGGVDSNALYPPKRFLGAARNIENGGSLTIIATAMVETGSAGDTVIFEEFKGTGNAELKLDRKISERRVFPAVDVNPSGTRKDELLLAPEEARIMHKLRRMLSALDNQQAIDLLIKQLKKTKSNGEFLMQVASSAPMAADAEED

SEQ ID NO: 53667 - protein, 356 aa, Cornyebacterium diptheriae
MSQVSAVDDIVSEYQGIEAQMSDPETMGDQTLFRKLSKRYSELQPIINVNNKLVQARDDHEAAEEMAYEDKEFAAEAERLAEEIVSLEEQLADLLAPRDPHDGDDIVMEVKAGAGGEEAALFAGELVRMYQRYAEKHGFTVEVLGLSESDLGGVKDMTLSIRSKTPSRDGAWSVFKFEGGVHRVQRVPVTESQGRIQTSAAGVLVYPEPDEVAEVEIDDKDLRVDVYRSSGKGGQGVNTTDSAVRITHLPTGLVVTCQKERSQIQNKARAMQVLAARLQAMAEEQAEAEAAEGRAAQIRTMDRSERIRTYNWPENRISDHRIGYKANNLDSVLNGDLDDLFSALQAAERAERLEAE

SEQ ID NO: 53668 - protein, 272 aa, Cornyebacterium diptheriae
MLAQALHKAEAILAEAGVASPRNDVHLMAAHLLNCQPMELFLKGDHDVPENFWEWVERRKNREPLQHILQVTWFGPLELHVGPGVFIPRPETEVLADWAVRHTDSEDIVVDLCTGSGALAAYIAHEHPECSVWAVELSDAAMAFARRNLPDRVHLVQGDVTDPEILDHLSGAVDLLVSNPPYVPLSNDLEPEVYQDPSMAVFSGDSGMDTINAMIPVIYRLLAPGGLVGIEHDDLTSELTQQALIDHGGFSNIEPLKDLTGRNRFVVASKIL

SEQ ID NO: 53669 - protein, 167 aa, Cornyebacterium diptheriae
MLRAIWAQSTDGVIGDGNDMPWHVPEDLAYFKATTLGEPVIMGRTTWTTIPERFRPLPGRRNFVLSSRAPGAWSTGAEVVTAIPELDCDAWIMGGGAVYTSTLPLVDEVVITLIDVTLAPVLGDAAVYAPALDDSFEVVEESPWQQSASGTVLGTPARYKFQRLRRR

SEQ ID NO: 53670 - protein, 630 aa, Cornyebacterium diptheriae
  MISC_FEATURE (310)..(310): X=any amino acid
  MISC_FEATURE (323)..(323): X=any amino acid
VWWRISGVSAPADAPQLFPELLSLARDRLLAALIVGACLGVGGVLLRTATSNPLADPHITGVNAGAAFGAVASSFITGSATGAYLLPGALIGGALAAGFTISLSVRGAGPELSGAHAVQKMVLLGIAVSAVFSALTAIFLVLDEAQLTTILAWLNGRLAGVRMGDLWPALCAFVMLFPVLVAGGRAFDSLGTGDVVSRAIGAHPARVRALAIVASVVLTATCVAAAGPIGFLGLLAAVVAQRIAGRAHRRSLVVAAAVGATTLLVADTVGQALWAPVETPVGILTGIAGVPLLLWGIRSLGSGTKRQGKXWRRKRHLLSLLLXVLLALVLACLLGMAIGAVQKSLPEVVAGLISGESLYWRYRMPRIVVGVLAGVGMAVSGSLLQTSLRNPLAAPDTLGITAGGGLAAVVALLGFGQLSPLALTPIAFVGSLLGAVVVLLAAGKSIFDPARLALTGVAVSVGLAAVTQLLLVRVAPEAGAAMTWLKGSLYARTMADAMTVAPVVVIGCVVALIGAKHFNALALDDAMMTSIGVRSRALRLVTLGVAIACGSAAVAAAGVLGFVGLIIPHAAKLLVGQALSRQIPVAAVAGAALVVATDAVGRWVFAPTEIPVGALIAIVGAPYFIYLVHR

SEQ ID NO: 53671 - protein, 279 aa, Cornyebacterium diptheriae
MPAIDLIVNMSTNNTIKTPYEDLLRTILEQGSHKDDRTGTGTTSLFGQQMRFDLTEAFPLITTKKVYWKGVIGELLWFLQGSSNVRWLQKRNIHIWDEWASEEGELGPVYGVQWRSWPTPDGQHVDQIAQALDILKNNPDSRRNIVSAWNVADLNNMALPPCHLLFQLYVADGKLSCQLYQRSADMFLGVPFNIASYSALTHMLAQQAGLKVGEFIWTGGDCHIYDNHREQVLTQLSREPRPYPQLTLRKASSIFDYDFDDFTIEGYDPHPAIRGEVAV

SEQ ID NO: 53672 - protein, 270 aa, Cornyebacterium diptheriae
MDRNSTATMPQQSLGCMSMSAGYGAELIVRDVSLDVPAGKITALIGPNGSGKSTLLKVLGRQLRAESGQVTLDGRDIADFGAREFARNLAFLPQQPVVPDGMTVRELISFGRYPYSGAFASLSAADHAAIERAAAATSITEFLDADAMALSGGQKQRMWIAVTLAQETGILLLDEPTTFLDPAHQLAILDLVHELNQQGRTIVMVLHDMAHAAKYSDHVVVMKNGEVLQQGPTQSTLNSGLIEQAFGISTMMVTDPETNRQLPIAYGIKR

SEQ ID NO: 53673 - protein, 308 aa, Cornyebacterium diptheriae
  MISC_FEATURE (6)..(6): X=any amino acid
  MISC_FEATURE (15)..(15): X=any amino acid
LTITSXCFRSPIKLXFPSCSNAQPPPPAVLFIIASCCSLQMGAAFAIQLFPIAGPWATTFARLFISGAILLAITRPSIRDFDRSQWSAIIVFGLTIGAMNTTFYAALSRIPLGTAVTIEFIGPLTLSAVLSKSARDLLWVLIAIAGISLFGWESLFGTGNLDPIGVAFVLIAGFFWAMYILASAKVGRLIPGSGGLALGMLIGSLIPLPLGAVNLPLFFTSSHLIALAIGTAILASLIPYSFEMAALRRLPSAIFGILCSLEPVFAAFFGWLLLHQPISTISVIAMALVITASAGTTINANRKNTPKV

SEQ ID NO: 53674 - protein, 389 aa, Cornyebacterium diptheriae
MGAGAGVAGVPMRELALIILVAASLTFLTTGIVRYAVVKSGRMGEIRERDVHTQPKPRLGGVAMFSGFIGAVFLADQLPALTRGFKPVTPEMSAVFWAGAIIVIVGILDDLFELDAITKLAGQVLGAAVMSILGLTWTLVYLPFGGGSTLVLDQVASTLVTVLFTVTLINAINFVDGLDGLAAGLGMIAGLSILLFSMTVLHDQGGMVSAYPPAIIAASLVGMCAGFLPHNFEPARIFMGDSGSMLIGLLLAAASTSASGKIDMSLYGTVDVIALMSPIIVVIAAVFIPMLDLVMAIVRRVRKGKSPFSADKMHLHHRLLSLGHTHRRVVLVLYLWVSVVAFGAVAFSIVPPVFATVGVITAIVFAVLASRGPVIRAQKEAHRREHPLS

SEQ ID NO: 53675 - protein, 312 aa, Cornyebacterium diptheriae
QAMSPAIIMLMCDGVRDDCREFFRRPSHRMLDFRYMRARNWERTLSVTTLAMKGEFHAPSLDHEFFPDPIWFADVANGWFTIDRLMFVRLLMALVLVIFFAVAMRSPKLVPSGLQNVAEYLLDFVRIHIAEDILGKKEGNRFLPILSTIFFVVLFCNLPSVIPFLNISPNARIGMPLVLALFGYIAFIYAGAKRYGFFKYVKSSVVIPNLPPVLHLLVVPLEFFSTFVLRPATLTLRLMANMLAGHIILVLLFSATNFFFWQLNGWTALSAVTLVAGIAFTLFEMLVIFLQAYIFALLSAVYIELALHADEH

SEQ ID NO: 53676 - protein, 188 aa, Cornyebacterium diptheriae
MTNVIKYLAEGEALPLEDHPSVLLPASYDIVWSLVVFIIVLILFWKFVRPKYQEVLTEREDRIKGGIQRAEAAQAEAKAALEKYNAQLAEARAEAAEIREEARAKGKQIEAEMKAKATEESNRIIESGEKQLAAQREQVVTELRREMGQNSISLAERLLGDQLSDDVKRSGTIDKFLAELDTVSPAGK

SEQ ID NO: 53677 - protein, 1478 aa, Cornyebacterium diptheriae
VATWFSDVFAQPTVVQRQAWAAISAGENALVVAPTGSGKTLAAFLWALNELVQGSGQTALLSRQAAGSAEVEASRAKGVKVVYISPLKALGVDVENNLRAPLTGINQVAARLGIDQSDITVGVRSGDTPASERSKQVRNPPDILITTPESLYLMLTSKARSILTTVDTVIVDEIHAMAGTKRGVHLALSLERLEHLAAQPVQRIGLSATVRPLDVVARFLGGDRPVEVINPPLEKKWQLAVHVPVDDMSDLPTPEPVSEIGEATIDDPLGLTTQPEGFAESALPAQGSMWTFIEQDVFDEVMEHRSTLVFVNSRRTAERLTSRLNELYAQRFQPEALSPALRRPPAQLMKSIDIAGEATAIIARAHHGSVSKDERALTEKMLKQGELRAVVSTSSLELGIDMGAVDKVIQVESPPSVASGLQRVGRAGHVVGAVSHGSFYPKHRADLVQTAVTVGRMTEGLIEELHVPTNALDVLVQHTVAAVAMDDLDVEDWYATVVRAYPYRDLPREAFDAAIDLTAGVYPSTDFAELRPKVIYDRITGTLSARPGAQRTAVINGGTIPDRGMFGVFLVGSGESGAPRRVGELDEEMVYESRVGDVFTLGASSWRIEEINKDQVLVTPAPGHTGRLPFWTGDQAGRPAELGKALGAFRRTLVADPSVVEGMGLDVRARSNVVAFIQQQQESTGVVPDEVTLVLERFRDELGDWRVVLHSPYGRGVNAAWALVAGAAFSQRTGMDAQPVASDDGIVLRVPESDAEPGADLFEIDPDTVEELVAQQVGNSALFAARFRECAARALLLPSRTPGKRAPLWQQRQRAAQLLDVARKYPSFPIVLETVRECLHDVYDLDALVELAAALKLRKVRIAEVTTQQPSPFATSILFSYTGAFMYEGDSPLAEKRAAALALDPALLAKLLGTVELRDLLDPTIIAEVDQDVRRRSQRRRAHTAEQLVDALRVLGPVPLTEIPASPRWTCPLCSRSSGRRVMEVRIAGVAHLALADDAALLRDALGVPVPPGIPAQVDTITDAVAQLVTRWARARGPFVLSDVQSAFGLAAGVAHGVVDTLHKSGVVTMGRFRAGVDQSEYMAPEVLKIIRQRSLAAARAETQPVSQSALGRFLPQWQQVAAMGQQPQLRGADGVFAVVEQLAGVRLPASAWETMVLPQRVSGYQPSDLDELTANGEVAVIGAGSAGSSDPWVMLVPTDYAAQLIDAPDVETLSPIQQQIVEILSNGGGYLISSIRDQILGSDTDVRTAIWELFELGMISPDGMAPIRARLSAGSGASSAHRAKRTPARGRLRMGRTRFAQSHQSGIAADMVGRWSLTIPADTDALRALLLTEKPGWIAMGWSLVAAWSQKTPWADLLWRTRCFHVLREAGKAMRGYLIDGLGAAQFSTPAVIDRLRGLGDSDDVTGWPSGTTDPEVYVLAAADPANPYGAALPWPESGPTRAAGSIVVLIDGLLIAHLTRGGRTLTVFDLPTGIEV

SEQ ID NO: 53678 - protein, 273 aa, Cornyebacterium diptheriae
MHAASREALARVTSDLDKALWEAKENAIATAAHTGAELFDVVEVLDGDRALRVAVADSAKSAEDRAGLVSAVFAGKVSPATLEVLVTSARELWSNPREFRDGLVTLGRRALLRSAEGQGQLGQVEDELFRLSRILDKEPELTLLLDDRSTDGAKKRELLAKVLYGKVTAVTEALALQVIGRRESNAIDDIDALSKEAAALQGHSVAHVVSAGRLNDEQNQALAQKLERIYGRAMSIHSEVDPSLLGGLVIRVGDEVIDGSTSGKLERLRANLA

SEQ ID NO: 53679 - protein, 553 aa, Cornyebacterium diptheriae
MLEETTESRKNMAELTISSDEIRSAIANYTSSYSAEASREEVGVVISAADGIAQVSGLPSVMANELLEFPSGVIGVAQNLDTDRIGVVVLGNYEILKEGDEVKRTGEVLSIPVGEKFLGRVINPLGQPIDGLGAIEAEEQRVLELQAPSVLQRQPVEEPMQTGIKAIDAMTPIGRGQRQLIIGDRKTGKTAVCIDTILNQKANWESGDKSKQVRCIYVAVGQKGSTIAAVRQTLEEHGALEYTTIVAAPASDSAGFKWLAPFAGAALGQHWMYQGNHVLVIYDDLTKQAEAYRAISLLLRRPPGREAYPGDVFYLHSRLLERAAKLSDDMGAGSMTALPIIETKANDVSAFIPTNVISITDGQVFLESDLFNQGVRPAINVGVSVSRVGGAAQTKGMKKVSGSLRLDLAAYRDLEAFATFASDLDAASKAQLDRGARLVELLKQAENAPQSVEHQIVSIWLAGNGHFDTVPVEDIRRFEFDLIDHLHAAVPQVFEQIAGGAQLSEESQAALVAATEDFKRTFQTTDGTPVINEPEVAALSADQVKKNTISVKK

SEQ ID NO: 53680 - protein, 538 aa, Cornyebacterium diptheriae
MRDYAGTSGKILAVTQQTSQKHNPVLVVDFGAQYAQLIARRVREANIYSEVVPHTATVEEIKAKNPAALILSGGPSSVYADGAPSLDPQVLELGIPVFGICYGFQAMTHALGGTVANTGNREYGRTEMTVDGGILHADLEETHKVWMSHGDAVSVAPEGFVVTAHSEGAPVAAFECAEKRMAGVQYHPEVLHSPHGQEVMVRFLTEIAGLEQNWTAANIAEELIDAVCAQVGPEGRAICGLSGGVDSAVAAALVQRAIGDRLTCVFVDHGLLRAGEREQVQTDFVAATGAKLVTVDEREAFLNKLAGVTEPEAKRKAIGAEFIRSFERAVAGILDDAPEGSTVDFLVQGTLYPDVVESGGGSGTANIKSHHNVGGLPDDVEFQLVEPLRLLFKDEVRAVGRELGLPEEIVNRQPFPGPGLGIRIIGEVTEERLETLRAADLIARTELTAAGLDSEIWQCPVVLLADVRSVGVQGDGRTYGHPIVLRPVSSEDAMTADWTRLPYDVLEKISTRITNEVSDVNRVVLDCTSKPPGTIEWE

SEQ ID NO: 53681 - protein, 547 aa, Cornyebacterium diptheriae
MSFDVTTTEPWATLSERYTAMKATTLRDLFASNPNRAQELSFEAAGLHVDLSKNLIDAETVAAFTALAKASGMREKIKAMFDGEHINNTEDRAVLHTALRLAVDAELNVDGQDVAADVHEVLGRMRDFATSLRNGSWRGYSNHTIKTIVNIGIGGSDLGPAMATKALRTYATAGINAKFVSNVDPADMHAVLDELDPESTLFVVASKTFTTQETLANAHAAKRWLVAAAGGDESAVAKHFVAVSTNAEKVAEFGIDTKNMFGFWNWVGGRYSVDSAIGLSLMSVIGPMDFMRFLDGFRAMDEHFRTADFESNIPVLMGMLNVFYNDFFGAETHAVLPYSQDLGRFPAYLQQLTMESNGKSVRHDGSAVTTNTGEIYWGEPGTNGQHAFFQLIHQGTKLIPADFIGFARPKEDLPTASGEGSMHDLLMSNFFAQTKVLAFGKTAEEIAAEGVSPELVAHKVMPGNRPTTTIMAEELTPFALGALIALYEHIVFVEGVIWDINSFDQWGVELGKQQANDLAPAVAGEVAVDSGDSSTDALISWYRSHRG

SEQ ID NO: 53682 - protein, 501 aa, Cornyebacterium diptheriae
MRCIVGTMTHTTQTLDDRIHELLQRIPTELFIAGQFQPAHNGATLSVTNPSDGSELATVASASEKEARAALDAAEKAQPTWAATPARERSEILRRAYDLVIEHKDDLAMIQSLELGRALPDSEAEVTYAAEFFRWFAEEAVRIRGDYRHNPTGNARIITHQQPVGPCLAITPWNFPLAMGARKLAPALAAGCTMILKPASKTPLTMLYLAQLLAEAGVPHGVVSVLPTANASVVSDLLHDARIRKLTFTGSTAVGQKLAAMAAEHSAAVSLELGGNAPYIVLDDADIDTAAQAVAVAKMRGAGQVCIAANRFLVHSSIAEEFTQRVVNIMRGFTQGPATAPGVDFGALSGDDQVSTVTTLVDDALSRGATKLLGDLPKGLPEHGSYYPATVLVDVPEDADIHCEEIFGPVVVISTFDDDDEAVARANDTKFGLAAYVFGSDLQRVLNVAERVDAGMIAVNKGALSDPAAPFGGVKESGLGREGGFEGIGEFLETKLISLPL

SEQ ID NO: 53683 - protein, 828 aa, Cornyebacterium diptheriae
MNNNEPFSQSPFGTNAAAAPSTSMASQANPFLRQAQPVSQYTGADLTEGLNPQQKAAVEHYGSPLLIVAGAGSGKTSVLTRRIAYLMRVRGVQPQNILAITFTNKAAAEMRERVSSLVGPVAQRMWVSTFHSTCVRILREQAQLVPGLNTNFTIYDSDDSKRLLSMISKDFSLDIKKFTPRLLATGISNLKNELIDADQACADAESTKNPYETTIASVFAEYQKRLRASNAVDFDDLIGETVRIFREHPPVTEYYRRRFRHVLIDEYQDTNHAQYALIHELVGSGPDASELCVVGDSDQSIYAFRGATIRNIEEFERDYPNAETILLEQNYRSTQTILNAANSVIAQNENRREKKLWTALGSGDPIVGYVADNEHDEARFIANEVDALADKGVAYSDIAVMYRTNNSSRAVEDVFMRTGIPYKVVGGTRFYERKEIRDIIAYLRLIDNPDDAVSLRRIINTPRRGIGDKAVAFLSLHADNHNVGFHKALLDATEDKVSMLGARGRNAVTGFVDMMKGIREEAANKVNEVTGMPDIGDMVSYILDVTGYKAELEKSNDPQDGARLDNLNELVSVAREFSSEAANQVAYERMGAENQAPEIPELSEGEAAPGSLMAFLERVSLVADADQIPDNEQGVVTLMTLHTAKGLEFPVVFLTGWEDGQFPHLRALGEPKELAEERRLAYVGITRARRTLYLSRAMLRSSWGNPVTNPPSRFLSEIPDELMDWRREEPEHSYDNSWGMGYGSSNSRSYGSQNSRSYGSPRTPKLPKHSNKPAIALNVGDRVNHEKYGLGTVTKVDKMAPADSVTIDFGSSGTVRLMLIGSVPMEKL

SEQ ID NO: 53684 - protein, 225 aa, Cornyebacterium diptheriae
MTTHILAADWSRLGDTFTEAILDTLIMVSVTLVVGGLLGLGLGVLLYTTRTGGILRNRFVYTVINILVNFVRPIPFIIMITAFGPLTLRVVGTTIGREAAMFIMSIAATFAVARIVEQNLVSIDPGVIEAARAMGASPWKIITSVIIPEALGPLVLGYTFIFIAIVDMSAMAGYIGGGGLGDFAIVYGYRAYDWQVTYVATFVIILIVQIAQLFGNWLSKKIMRR

SEQ ID NO: 53685 - protein, 290 aa, Cornyebacterium diptheriae
MNFTKFRTALSILSVTVVAATGLVACSGGSSDANTIKIGTTDSTKKAWDVWKDKAKEQGIDLEVVDFSDFSTPNQALSQNRLDVNLFQHLKFLAEYNVKSKSDLVPVGSTEIIPLALFWKGHDSLDGIEGQSVAIPNDPTNQARAINVLVANKLITLKTPGMSTPTPADVDTAKSKVTLTPVEAASAPAAYGEGKPAIINNTFLERSGIDAKTAVIQDDPASTEAEPYINVMVTTKENKDNPRWAQLIELWHTDEVQKALAEDSKGTSVEVKRSPEELQAILDRLEAEVK

SEQ ID NO: 53686 - protein, 290 aa, Cornyebacterium diptheriae
MKLRRSVALVSASLIAATGLVACSNSSDSSDQTTVKIGTTDGSKKSWKVFEDKAKEAGIKLDIKNFSDYSTPNDALAQDQLDVNLFQHLKFLAEYNVGKNADLTPVGATEIVPLALFWKDHTSLDGIEGKSVAIPNDPSNQGRAINVLVQAKLITLKKEGLITPAPSDVDEAKSKVKLTPVDAAQTTTAYGEGTPAIINNSFLDRAGIDPKLSVFQDDPNSAEAEPYINAFVTKAEDKDDANIAKLVEIWHSKEVQDAVAEDSKGTSVPVQRTAEELKKILDRLEADQKK

SEQ ID NO: 53687 - protein, 277 aa, Cornyebacterium diptheriae
MTNRELILRPAVLFAPANRPEIIPKAAARADMVILDLEDGAGSIDRNQAYANIRNAGLDPTTTFVRIVGPEDPHHAADLAFVKTTEYYNVIVPKIGAALPEGLDGLNVVPIIETPLAVINIASIAADPHVVGLYWGADDLTIALGGLYSRRRIDEPQPSSYRAPIEYARVQTLLHAAANGKWALDAVYQDFKDLDGLYTEALDSARMGFAAYPCIHPNQVDAVRRAFAPSAEQLEWAQRIAEETKKHPGAFQLDGEMVDTPLIALAHRLLQRHAAVD

SEQ ID NO: 53688 - protein, 82 aa, Cornyebacterium diptheriae
MKRNNIKKARMEQSRRPKKNPLKAAGIEKVDYKDINTLRQFISDRHKIRSRRVTGLTPQQQRQVATAVKNAREMALLPFTSR

SEQ ID NO: 53689 - protein, 101 aa, Cornyebacterium diptheriae
MAKKSKIAKNEQRKEVVARFAERRNELKAIIKNPNTSDEDRLDAQFELNRQPRDASPVRVRNRDSRDGRPRGFLRKFGVSRVRMREMAHRGELPGVRKSSW

SEQ ID NO: 53690 - protein, 88 aa, Cornyebacterium diptheriae
MKKDIHPDYHPVVFQDAGTGHQFLTKSTATSDRTVAWEDGNEYPLIVVDVTSESHPFWTGAQRVMDTAGRVEKFNQRYGALARRKKNK

SEQ ID NO: 53691 - protein, 428 aa, Cornyebacterium diptheriae
MTNPQNHDDARTSPTADQTAAFDRVENPYGNAHNVQEERLTEQSQPLGAQEPPVPLEPETSKREKRRVSIGTAVAMTLVAAIASGTLTGVYSTNRAGNSGSTTRTQVAESLRQPVSQDHPAPVEGSVEDVAAKVLPSVVSILVATRNGSAEGSGSIISEDGYVMTNNHVVAGAEQGAARISVTLNDGSEHPAELIAGDPNTDVAVIKIKDVSGLPVMKFGDSNNLTVGQQVVAVGSPLGLSATVTSGIVSALNRPVRAGGSETGQSSLIDAVQTDAAINPGNSGGPLVDATGALIGMNSVIASLSAGGKSESGSIGLGFAIPSNFARRVASQLIEKGYATQPMIGIQLISNANAKGAVIADVQPDGPGAHAGLRAGEVITKINDRYVDSADALIAAVRSSDFGQTVKLTVRGENDQNERQVDVTLTGE

SEQ ID NO: 53692 - protein, 366 aa, Cornyebacterium diptheriae
MRVLAAMSGGVDSAVAAARAVAAGHDVVGVHLALSQDPQTVRESSRGCCSLEDSADARRVCDKLGIPFYVWDFSDRFKEDVIDDFISSYEAGETPNPCLRCNEKIKFAALLERGIALGFDAVVTGHYARLTQPVDGGDGYLRRSIDPDKDQSYVLGVLGAHEIAHCMFPVGDTVKPKIREEAAAMGFSVAKKPDSYDICFIPDGNTQAFLGRHIGLRPGMIVDSDGNELKEHDGAWNYTIGQRKGLDIKQPAADGKPRYVTNIDAATGTVTVGSRENLKVIALTADRLKYLHPAMTGSFEAEVQVRAHGSVVACSVMVNESDDTMRVELHTPLSGVARGQAAVIYLPDDDGDIVLGSGTICATEHQ

SEQ ID NO: 53693 - protein, 677 aa, Cornyebacterium diptheriae
MTDNFADLRRQWDDLAEQVRHHRDAYYNHTPEISDAEFDQLFRQLQQLEQEHPELAVPESPTLRVGAPVEQSSFDNVEHLERMLSLDNVFDAAELDDWLQRTPSATYLTELKIDGLSIDLVYRSGRLERAATRGDGRVGEDVTANAKVIEDIPHRLQHSDAYPVPELVEIRGEVFIAVEDFALVNEQRQKEGGKPFANPRNAAAGSLRQKDTEAVRKRRLKMICHGIGASEGFEADTQFDAYKALEAWGLPVSPYTKRVHSAQEVQERVTYWAQHRHDATHEMDGLVIKIDSFAEQRALGSTARAPRWAIAYKYPPEEVTTKLLDIQVGVGRTGRVTPFAVMDPVFVAGSTVEMATLHNQTEVKRKGVLIGDTVVIRKAGEVIPEVLGPVVEKRDGSEREFIFPTLCPACGTRLAPQKEDDADWRCPNSQSCPAQLSSRLTYLAGRGAFDIEALGEKGAEDLIASGVLIDEAQLFNLTEDDLKRTKVYTTKAGALNATGEKLLANLESAKHTDLWRVLVALSIRHVGPTAARALAVRYRSLEALRAADVEDIANTEGVGAIIAQSFAQWFDVPWHRNIVEVWADAGVTMADSEADIPDQVLEGLTIVVTGSLVDFSRDSAKEAIVSRGGKASGSVSKKTSYVVVGENAGSKETKARDLGLRILNEDEFKQLLANGTV

SEQ ID NO: 53694 - protein, 196 aa, Cornyebacterium diptheriae
MAMSDALTLTAAKKNARNRIRAARLARSTADLHADNAAILNQLTALIRTINATRAAAYMPEVTEPGGVDFADNLTGILSELWIPKSLPNRQLVWGHYSGGDSVERGTFGILEPTTPSRSSDILHDVDLIIVPALGITPSGRRLGQGAGYYDRALAGVATPTVAILFDSEVNTTIPFEPHDATCDWIITPEGTKQVT

SEQ ID NO: 53695 - protein, 251 aa, Cornyebacterium diptheriae
MGAMRLAVITAPKKQEVLDHFNRFPELEATLESRGKKDQLAKVVRAAELIQPVSVVQETPLGLGHAVGLAESVLDDDEDVVAVMLPDDLVLPMGVVEKMVEVRRQLGGSVLCAFDVPREDVYNYGVFDIEECDYDGPYQVKSVKGMVEKPAVEDAPSTFVATGRYLLDRAIFDALRRITPGAGGELQLTDAIALLINEGHPVHILVHDGKRHDLGNPGGYIPAVVDFGLSDPTYGPHLKKVLRTILEEHGA

SEQ ID NO: 53696 - protein, 99 aa, Cornyebacterium diptheriae
MPEISRDEVAHLAKLSRLALTDEELDRFAEQIDGIIGNVSAVQQVAAEGVEPMSHPHSIKTTMREDVVEQILTPEQALDQAPAVDQQRFVVPQILGEQD

SEQ ID NO: 53697 - protein, 494 aa, Cornyebacterium diptheriae
MNKYLVPDSGLTSLSAAELAEKIHSREVTSREVTQAHLDRINDVDGTLHAFLHVGVEEALAAADAVDESLDKGEAPASALAGVPLALKDVFVTTDAPTTCASKMLEGYVAPYDATVTKKIREAGIPILGKTNMDEFAMGSSTENSAYGPTLNPWDIERTPGGSGGGTSAALASGEAPLGIGTDTGGSIRQPAALTNTVGVKPTYGTVSRYGLVACASSLDQGGPTARTVLDTALLHEVIAGHDKYDATSVNRAVAPVVAAAREGARGDLKGTKIGVVKQFDREGYQPGVLEQFHKSVEQLTAQGAEIVEVDCPHFDDALAAYYLILPCEVSSNLARFDGMRYGLREGDDGTHSAEEVMSLSRAAGFGPEVKRRIILGTYALSVGYYDAYYLQAQRVRTLIAQDFAVAYDKCDVLVSPTTPTTAFKLGEKVSDPLAMYNFDLCTLPLNLAGLCGMSLPSGLAPDSQLPTGLQIMAPAFQDDRLYKVGAAFEVGQK

SEQ ID NO: 53698 - protein, 471 aa, Cornyebacterium diptheriae
MLSTATKSDTQYPTMPLPEKEAWPALIALCIGFFMILLDQTIVAVATPALQADLHASYNEVIWVTSAYLLTFAVPLLITGRLGDRFGPKNIYIIGMVIFTLSSLACGFAPNMMTLIIARAVQGIGASMLTPQTMSVINRVFARERRGAALGIWGSVAGIASLAGPILGGFITAWVGWQWIFFINVPIGVVSVFAVARFVPRFKPTERSIDGLSMVLSVVSVFALVFALQQGESAGWAWWIWVVMVVGIAVGVLFAYQQNRAEAKGKDALMPLSLFRVRNFSLGNIGIAAMGFTIAGTPLPIMLYLQQVHSLTPLQAGLFMMPQALISAFFSPLIGRWSDHYSTSKLAGFGFSTMAMGLVLIAAVMIIDVNLWWLVPAFIVYGLGNAFVWSPNSTSTMRDLPLHHMGVGSGVYNTTRQIGCVIGSAAIGAVLQWRIMAGDMGAAYGQSIILGAVMLAVGFVSAMLAQDKPRR

SEQ ID NO: 53699 - protein, 354 aa, Cornyebacterium diptheriae
MKSKLFPLLVPILGASIVLAGCSNADTSKQAESKGGVTITNCGKEVTYTKADNLFVNDGNIISIALAAGAADNVKYVSSVQRDKELLHAKYGKDIDKAEDVAKEYPSLESIVAKHPDIFVAGWNYGFSEEKNLTPDALKDQGIDSYILSESCRQEGSEKRGLYDPWEAVKMDISNIGKITSHADTADSVVKDIDSRLETLKKAPQADKAPTAFVFDSGTDTVFTSGKFGAPQAIIEAAGGRNGAENVEDTWTTVSWENLAASKPDVFVFVDYPGQEFEEKIAALRSNPATKNLPAVKENRFINLPYAMWTSGPLNIDAAEQMRKGFEKFGLVPSSEIKPSLELPASVPGQNYYK

SEQ ID NO: 53700 - protein, 291 aa, Cornyebacterium diptheriae
MTDQPIIDYRFLEPLPRGIILAATPLGNIGDASPRLAQALAQAHVVAAEDTRRTRALAQALGVEITGQVLSNFDHNEQGRAQQLVEMARTHTVVVVTDAGMPIVSDPGFPLVEAAHKAGVPVTCFPGPSAVPTALALSGLHVGKFAFDGFAPRKQGQRRAWLESLQQEQRAVCFFESPHRIAATLADAAEVLGAKRRAAVARELTKTFEEVRRGGLGELAEWAAKGIKGEVSVVIEGVQHVQHEDVHSLVAVVEERVLAGERLKSACGEVAAHYGVSKKQLYDAVLESRAE

SEQ ID NO: 53701 - protein, 342 aa, Cornyebacterium diptheriae
MRIATLTSGGDCPGLNAVIRGIVRTCSEYGSTVVGYQDGWVGLMEDKRIQLYDDENIDRILLRGGTILGTGRLHPDKFKSGLDQIKANLEDAGIDALIPIGGEGTLKGAKWLSDNGIPVVGVPKTIDNDVNGTDYTFGFDTAVSVATDAIDRLHTTAESHNRVMIVEVMGRHVGWIALHAGMAGGAHYTVIPEQPFDIAEICKAMERRFQMGEKYGIIVVAEGALPKEGTMDFVEGGVDQFGHQTFNGIGQVIGEEIKKRLGHDVRTTVLGHIQRGGTPTSYDRVLATRYGVHAARACHNGDYGKMVALHGEHIDLIPLEDAVDTLKTVPEGRYRTARALFG

SEQ ID NO: 53702 - protein, 610 aa, Cornyebacterium diptheriae
MNNRVLVSVAWPYANGPRHIGHVAGFGVPSDVFARYQRMSGAEVLMVSGTDEHGTPLLVQADKEGVSVKELADRYNRQIVEDLAGLGLSYDLFTRTTTRNHYAVVQDLFKGLYENGYMIKETTMGAVSPSTGRTLPDRYIEGTCPICGASGARGDQCDNCGNQLDPADLINPVSKINGETPKFIETEHFLLDLPALADALAAWLKDRKDWRPNVLKFSLNLLEDLRPRAMSRDIDWGIPIPVEGWQDNGAKKLYVWFDAVVGYLSASIEWAYRTGDPEAWKKWWNDPESSGYYFMGKDNITFHSQIWPAELLGYQGKGAKAGSVHSLGELNLPTEVVSSEFLTMSGSKFSSSKGIVIYVKDFLKEFGADPLRYFIAVAGPENNDTDFTWDEFVRRVNNELANGWGNLVNRTVSMAYKNFGEVPTPGELTESDKKILAQAEEAFGVVGEALAHSRFKQGITHAMHIVGEANAYIAEQEPWKLAKDESQRERLATVLWTALQVVSDCNVLLTPYLPHIAQQVHETLGRDGVWAAKPQIVEVTDDMPVEPIGVGIPEAGQTYPVIMGDYAAQQARWARIDVQPGTALSKPKPLIAKLDPELGETGPEWAPVNP

SEQ ID NO: 53703 - protein, 501 aa, Cornyebacterium diptheriae
MTAAMYDLMDYDEVLEKFDPVMGLEVHVELATETKMFSAPSAHFGAEPNSNVDPVSLGLPGALPVVNAKGVEWAIKIGLALNCKIAESSRFARKNYFYPDQPKNYQISQYDEPIAYDGYLDVVLDDGTPWRVEIERAHMEEDTGKLTHLGGADGRIHGATASLVDCNRAGIPLIEIVTKPIEGAGERAPEVARAYVGALRDLVKALGVSDARMDQGSMRCDANVSLRPVGTVEFGTRTETKNINSLKSVEQAVRYEMQRQAQVLEDGGEIVQETRHYQETDGSTSKGRPKETAEDYRYFNDPDLPPVIAPKEWVEEIRATLPELPWIRRARIQKEWGLKDEEMRDLVNAGALDLIVETVEAGASASEARSWWVAYLSQKANESGVELDSLSITPQQVARVAALVKEGKLTNKLARQAVDGVLAGEGDVDEVVAARGLEVVRDDGAIEKAVDEALAANPDIVEKYKAGNTKVTGAIVGAVMKATRGKADPAQVNKLIAEKLA

SEQ ID NO: 53704 - protein, 284 aa, Cornyebacterium diptheriae
MSKKKPRPIPVPADTIPGLIDAHTHIASCGATEQDEVDAFVQRALAAGVERICTVGDGLAEAEFALQAAQMNSRVFAACAIHPTRARELDQAARNRLTEMAHDPRCVAIGETGIDTYWITHDPDNTADLETQEEALRWHIDLAVATGKALMIHNREGDDHLMRILEDSPQPPETILHCFSSPIDVAKQALDRGYVLSFAGNVTFKRNEELREAARIAPISQLLIETDAPYMTPEPFRGARNESALIGHTALCVAASRGESVADCVAGISATFDRVYGVDTSFGA

SEQ ID NO: 53705 - protein, 365 aa, Cornyebacterium diptheriae
MTYSRQAAQVYTPAVQRYEDMEYRQCGHSGLRLPAISLGFWHNFGDDKPLANQRAIVRRAFDRGITHFDLANNYGPPEGSAEINFGRIFREDLARHRDEIVISTKAGWNMGAGPYSFGGSRKYLMDSLDSSLDRLGLDHVDIFYHHRPDPDTPLEETAYALRDIVASGKARYVGISSYGPELTAEISEILAGEGCPLLIHQPSYSILNRWVEEPGEDGENLLESAANNGLGVIAFSPLAQGLLTDRYLEGVPVDSRAAAGKSLGKEMLNAKNLDMVRALNDLALRRGQTLAQLAIAWVLREQGDYGATTVTSALIGASSVAQLDQNLGALNNLEFSVEERNYIDTVAKDAGINIWAGATASKVHD

SEQ ID NO: 53706 - protein, 295 aa, Cornyebacterium diptheriae
MEDQASAQLLGPVEIRQLAEKLDVTPTKKLGQNFVHDPNTVRMIVSAADLNSDDHVIEVGPGLGSLTLALLDTAQKVTAVEIDPRLAQQLPLTVAERAGQFADRLNLIHKDALTVAPDDIDHPTALVANLPYNVSVPVLLHLLQIFPTIRRVLVMVQAEVADRLAADPGNKVYGVPSVKASFYGNVRRAGSIGKNVFWPAPKIESGLVRIDVFDPEHQPWPVTDDMRKAVFPLIDSAFAQRRKTLRAALSGHFGSGPAAEEALRTAGIDPILRGEKLDIADFVRLARVTAAQEQA

SEQ ID NO: 53707 - protein, 293 aa, Cornyebacterium diptheriae
MNPLHLETLLAIIDEGSFEDAAFALGISPSAVSQRIKALERETGRVVVRRTSPVTATDAGEVLVQSARRMALLQAETNAQLRGRIERIPLSVAVNADSLATWFRRVMASVAEMDNATLHMRIEDESHSLSLLRRGDVLGAVTGEKTPVSGCDSIALGAFRYFAVASPKLLDRYTIDGAVDWERMPVLRFGPRDGLQDRDIKRRLGEVPAGRRVNEIPSSEAFMEAARVGLGWAMLPDIQALPLLDSGEVVMLDSEVHEVPLYWQRWRLESPALERLTQAVVDAALEGLHPLSA

SEQ ID NO: 53708 - protein, 360 aa, Cornyebacterium diptheriae
MSTTTIVVDMSTQYEKYTSTENGGEFIRDTQYIDDRIVDSVSAPTPLEDGHTLWPAEPRRYRLVAARACPWAHRTVITRRLKGLEDVISLGLVGPTHDWRSWTFDLDPNEVDPVLGIPRLRDAYLKRFPDYPHGITVPAIVEVATGKIVTNDYPSIVCDLNDQWSKYERPGAPDLYPETLREEIDAITKRIFTEVNNGVYRCGFAGSQEAYDKAYDRLFTAVDWLEERLSHQRYLVGKHITIADIYLYTTLVRFDAVYHGHFKCNRNKITEMPNLWGYLRDLFQTPGFGDTTDFTEIKQHYYITHQDVNPTQIVPKGPSLESFFSPHGREKLGDSPFTEGVTPPGEISYEERLKNKIDGQ

SEQ ID NO: 53709 - protein, 735 aa, Cornyebacterium diptheriae
MTTIPNFAEYPASPEDQNVADSSALEQQVWTTPEGIDVKRVYKRNDRNDSVPAQQLDSYPGMAPFMRGPYPTMYTNQPWTIRQYAGFSTAAESNAFYRRNLAAGQKGLSVAFDLATHRGYDSDNERVVGDVGMAGVAIDSILDMRQLFEGIDLGKVSVSMTMNGAVLPVLALYIVVAEEQGVAPEQLAGTIQNDILKEFMVRNTYIYPPKPSMRIISNIFEYTSLKMPRFNSISISGYHIQEAGATADLELAYTLADGIEYIRAGKGVGLDVDKFAPRLSFFWGISMNTFMEIAKLRAGRLLWSELVAKFDPKNPKSQSLRTHSQTSGWSLTAQDVYNNVARTAIEAMGATQGHTQSLHTNALDEALALPTDFSARIARNTQLLLQQESGTTAPVDPWAGSYYIEWLTEQLAERARAHIEEVENAGGMAQATIEGIPKLRIEESAARTQARIDSGRQALIGVNKYVVEEDEQIEVLKVDNTKVRAEQLAKLEQLRAERDQAEVDRCLKALTEAARIEEKEPGNLDQNLLKLAVDCARAKATVGEISDALEEVFGRHEAEIRTLSGVYKDEVGKEGTVGNVSKAIAMADAFETEEGRRPRIFLAKMGQDGHDRGQKVVASAYADLGMDVDVGPLFQTPAEAARAAVDADVHVVGVSSLAAGHLTLVPALKEELAKLGREDIMVVVGGVIPPGDFQELYDDGAVAIYPPGTVIADAAIDMLEKLAANLGIDLKVDEA

SEQ ID NO: 53710 - protein, 613 aa, Cornyebacterium diptheriae
MFPLRSRVTTVGRNAAGARALWRATGTKDNEFGKPIVAIVNSYTQFVPGHVHLKNVGDIVAEAVRAAGGVPKEFNTIAVDDGIAMGHGGMLYSLPSREIIADSVEYMVNAHTADAMVCISNCDKITPGMLNAALRLNIPAVFVSGGPMEAGKAVVADGIAHAPTDLITAITASAKDSVNDDQLLSIEQSACPTCGSCSGMFTANSMNCLTEALGLSLPGNGTTLATHTARRELFETAGKLVVDLCQRYYGEEDESVLPRNIATKKAFINAMALDMAMGGSTNTVLHTLAAAQEGEIDFDLSDIDALSHRIPCLSKVAPNGNYHIEDVHRAGGIPAILGELRRRDLLEKGVHTVLYKEMDSWLDDWDIRGGKATDKAIELFHAAPGGVRTTEPFSQSNRWDSLDTDQARGCIHDVDHAYSADGGLVILRGNLAPDGAVVKAAGVDESIWTFSGPARVVESQEEAVSIILDKQVQPGDVVVIRYEGPAGGPGMQEMLHPTSFLKGAGLGKACALITDGRFSGGTSGLSIGHISPEAAHGGLIGLVENGDTITIDIRNRSLNLDVDDAVIEQRRAAMLEREKPWTPTNRNRPVSKALRAYASMATSADKGAVRQLD

SEQ ID NO: 53711 - protein, 266 aa, Cornyebacterium diptheriae
MTPRIIVTDMDGTLLNSEHEIPARFWPLLDEMHEQGIVFAPASGRQLYTLLDQFAQAGKDLSVIAENGTVVYHEGEIISVTTIDPEVAHRVIRTMAHSDLDWGVVVCRVDGAFIARGDVEFLTETVRYYAKLDVVDDLHSVVNDQVIKLAIYSFPDAETVAAPALAESVGDHTLAISGAHWIDIMSPHANKGVALQQLADNLGVPIEHTAAFGDYLNDYELLHTAGTAYAMSNAHPDIKDIADHVVGSNDEESVLTTIHSLLTAAK

SEQ ID NO: 53712 - protein, 652 aa, Cornyebacterium diptheriae
MLQHVSPRNYHKELDVVASSTQPNQPTPATLARRAQVLKPERMTGADAIVRSLEELGIDMVFGLPGGAVLPLYDSLYASTKLRHVLVRHEQGAGHAATGYAQATGKVGVCIATSGPGATNLVTPIADAHLDSVPLVAITGQVGRSLLGSDAFQEADIRGITMPVTKHNFMVTDVNMIPQAIAEAFYLAASGRPGPVLVDIPKDIQQAEIDFHWPPTIDLPGYRPVTTPHSRPVEQAAKMISQARRPVLYVGGGVIKANASQELQAFAEHTGIPVVTTLMALGAFPGSHELNMGMPGMHGTVPAVGALQKSDLLITIGARFDDRVTGALASFAPGAKVIHADIDPAEIGKIRAVDVPIVGDAQEVLTALLNVYKDLDLPQPRHERWLRYLNGLKSNYPRGWEKSDDGMIEPQAVIRALAKTVGTDAIYAAGVGQHQMWSAQFLDFEKPRTWLNSGGLGTMGYSVPAALGAKAGCPDKEVWAIDGDGCFQMTNQELATAAVEGMPIKVALINNGNLGMVRQWQTLFYDGNYSNTKLRNQGQYMPDFVMLAESLGCAAFRVTEETDIVPTIEKARAINDRPVVIDFIVGEDAQVWPMVAAGHSNSDIEYAHGLRPLFDGESSAAETPEDIDDVIDEATLLALEAQKRHLEPKENI

SEQ ID NO: 53713 - protein, 174 aa, Cornyebacterium diptheriae
MQQQETFRHILSVLVQDVDGIISRVSAMFTRRSFSLVSFVSGKTEMHGINRITIVVDASTQDIEQITKQLNKLIPVLKVVRLDEDVTVARALMLVKVSADASNRPQVVDAAKIFRAHVVDVAPDSVVIEATGNKGKLRALLDVLEPFGIRELISSGQIALNRGSKTMAPQSSRS

SEQ ID NO: 53714 - protein, 337 aa, Cornyebacterium diptheriae
MAIELLYDADADLSIIQGRKVAVIGYGSQGHAHAQCLRDSGVEVVIGLREGSKSSEKAQEAGFEVKSNADAAAWADVIMLLAPDTSQAEIFSHDIEPNLKDGDALLFGHGLNIHFELIKPAVNITVGMVAPKGPGHLVRRQFVDGKGVPCLIAVAQDPKGEGKDLALSYAAAIGGARAGVIPTTFREETETDLFGEQVVLCGGLEHLMMKGFEVLAEAGYAPEMAYFEVLHEMKLIVDLIWEGGIENMNYSISETAELGGYVAGPRIITPEVKENMKAVLADIQSGKFVRDMVADVEAGQPELKRYREEIAAHPIEATGSKLRDLMSWVKNPLDETA

SEQ ID NO: 53715 - protein, 544 aa, Cornyebacterium diptheriae
MSSVAQEAHRRRTFAVIAHPDAGKSTLTEALALHAHVISEAGAVHGKGNRKATVSDWMEMEKDRGISIASSALQFEYAPEGHSGEPFMINLVDTPGHADFSEDTYRVLTAVDAAVMLIDAAKGLEPQTLKLFRVCKARGLPIITVINKWDRPGRTPLELVDEIVTEIDLQPTPLFWPVGDAGDFRGLARINPDGEAEEYIRFLRTAGGSTIAPEEHYTPEEASSREETAWDTAAEEVELLAADGAVHNQELFLECTTSPLIFASAMLNFGVHQILDTLCELAPQPHGRESDERAVEAATGAFDSSREVTDEFSGVVFKVQAGMDKNHRDSLAFMRVVSGEFDRGMQVTHAQSGRSFSTKYALTVFGRTRSTVESAFPGDIVGLVNAGSLAPGDTIFAGRKVQYPPMPQFAPEHFRTLRAKSLGKYKQFRKALDQLAAEGVVQILKNDARGDAAPVMAAVGPMQFEVMMARMQNEYNVETVADPIPYSVARRTTPETATELAKQRGVEIFTRTDGELVALFGDKWKLAFIEKEHPEFELLPMVAD

SEQ ID NO: 53716 - protein, 205 aa, Cornyebacterium diptheriae
MADYTTIAAQPRNEFGKGFARRLRVAGQVPGVIYGVDVEAPIHFSINRLELHAVLRAHGVNAIIELDIEGEKHLTMIKHVDQNVLTLNADHVDLLAIKRGEKVEVEVPVVLTGETAPGTTLVQDADVVLVEADVLSIPEEITFSVEGLDVDSKVLAGDLAMPANTSLVADAETVIASVNHEEVAEEAEETEGEDAEEAPAAEGEE

SEQ ID NO: 53717 - protein, 326 aa, Cornyebacterium diptheriae
MTSHNWTANQKNLMVLTGRAHPELADAVAKELGVEITPTTARDFANGEIFVRFEESVRGCDAFVLQSHTQPLNKWLMEQLIMIDALKRGSAKRITAILPFYPYARQDKKHRGREPISARLVADLLRTAGADRIVSVDLHTDQIQGFFDGPVDHMHAMPILTDYIKGKYDLDNVVVVSPDAGRVKVAEKWANTLGDAPMAFVHKTRSVDVANQVVANRVVGDVAGKTAILLDDMIDTGGTIAGAVGVLRDAGAEDVIIACTHGVFSGPARERLSQCGAKEVITTDTLPQSTEGWDNLTVLSIAPLLAKTIHEIFENGSVTTLFEGQA

SEQ ID NO: 53718 - protein, 283 aa, Cornyebacterium diptheriae
MIACKIAPPSQAFGRIASMRFGRIATPDGMCFCVVEGDDAQAICKEIEGTPFTEPKYTGRQWKLDEVRLLAPMLPSKIVAIGRNYADHVKEVFQKSAEHLPPTLFLKPPTAVVGPGAAIRIPEFATKVEFEGELAMVIAKPCKNVKKEDWKSVVLGFTIINDVSSRDLQFADGQWARAKGIDTFAPLGPWIETDIDSIETDNLPIKAHLTHDGITETKQDSNSNQMIMDLGEIIEFITASFTLLPGDVICTGSPAGTAAMVPGDFIEIEIPGIGRLGNPVAKA

SEQ ID NO: 53719 - protein, 149 aa, Cornyebacterium diptheriae
MNLESMYQEVILDHYKNPLHAGLRESYDAEVHHVNPSCGDEITLRVHLSEDGLTVQDVSYDAEGCSISQASTSVMAEEIVGQPVDKALEKLAEFEKMITSRGKEEGDEDLIGDGIAFAGVSKYPARVKCALLGWKAFQAATSEALEGKV

SEQ ID NO: 53720 - protein, 211 aa, Cornyebacterium diptheriae
MGPNGSGKSTLAYTLSGHPRYEVTDGEVLLDGENILDMDIDERARAGLFLAMQYPTEIPGVSMANFLRSAATAVRGEAPKLREWVKEVKQAQQDLKIDKAFNERSVNEGFSGGEKKRHEVLQLDLLQPKFAVMDETDSGLDVDALRIVSEGINRYQEKSNGGILMITHYKRILNYVQPDFVHVFANGQIITSGGPELADDLEANGYDRFLA

SEQ ID NO: 53721 - protein, 497 aa, Cornyebacterium diptheriae
MNIMSDVRVRFCPSPTGTPHVGMVRTALFNWAHARHTGGKLIFRIEDTDAARDSEESYQAIIDSLKWLGMDWDEGVIVGGPHEPYRQSQRMDIYKDVLEKLKEAGFVYPAYSTAQEVEERHKAAGRDPKLGYDNYDRTLTDEQIAAFEAEGRQPVWRLRMPERDWKWNDLVRGEIEFKSSTQPDYVVARSNGAPLYTLVNPVDDALMGITHVLRGEDLLPSTPRQLALYEALKVIGVAQQTPEFGHLPFVMGEGNKKLSKRDPQSNLFNHRDAGIIPEGMLNYLALLGWSLAGEKDIFSVDELVENFDVTNVLANPARFDQKKLEAINADHIRLLEPKDFEQRLRAYLTEYTDFPTDYPAEKFAIAAELVQTRIKMLGDAYGLLSFLAIADEDLTLDEKSAKKNLKETAIPALDAGIAALEGVEEWTTPAIEAALHKALIEDLDLKPRVAFGALRVGISGQAVSPPLFESMELLGKESTLTRLRATREVTPYQVAAE

SEQ ID NO: 53722 - protein, 396 aa, Cornyebacterium diptheriae
MSPSLDFYAHQRNVEWHERGLERTPAQFYSPQTPHAIIDNRPMLLFSSSDYLGLSEHPFLKNAAIQAISSLGTGSGGSRLTTGSSIHRSIEIHLAQFFGSPDAVFFASGYQANVTIISTLAGPHCTIYSDSLNHASIIDGCRLSKSQVKTFPTGDYEALDAALAHCDTTNSLIITDAVFSMSGTIADLEQLRQVAARHGSWLLIDDAHGIGCLGNAGRGTAHLFPHAPTDFSQEVIVGTSSKALGGEGGFALCSEQVATLLRNQGRGYVFSTAPAPATMATTDAALTVLEQEPDRIRRLQSNIAYFAQRSSNVVPFQKSGFFSPIISYTIGDENEALKSAQLLRDNGFFIPAIRYPTVSRGSAMLRITMTAMHSHHDIDQLADALNQLESHRLDNS

SEQ ID NO: 53723 - protein, 265 aa, Cornyebacterium diptheriae
MPKLNEPFQSTVSRFPAGIFEPHPVQASILKMLTSQGRIEAKLFLRHGEQILLSFVIPVISIVAISFLHIVDEPTPLLVTLPVMLTMASLSSGFTGQAISLAFDRRYGALQRVGASGVPSWTIVLGKVIGVLTVSILQVLVISCIAFALGWRVTPSAYFCGMAVFFLGVATFTALGLLMGGTLSSELVLGLANLIWFGLIGIVSFVVFRNGSESSTWMSIVPSVAVGKGMSLAFAGIVPIKECVILLFWLVLGALGATRWFKFNS

SEQ ID NO: 53724 - protein, 700 aa, Cornyebacterium diptheriae
MTLSPELQALTSRHYPSDWDDLDTQAVDTARVLAADAVQNCGSGHPGTAMSLAPLAYTLFQRVMNVDPADPHWAGRDRFVLSCGHTSLTQYIQLYFGGYGLELEDLKALRTWGALTPGHPEYRHTKGVEITTGPLGQGLASAVGMAMASRRERALFDPTAADGASPFDHYIYVIASDGDLQEGVTAEACSLAGTQKLGNLIVFWDDNRISIEEDTEIAFNEKVVDRYRAYNWQVIEIDGGENVEAIEKAVAEAKADTSRPTFIRVRTVIGYPAPTKMNTGAVHGAALGAEEVAGTKKALGFNPEESFAVAPEVISHTRKLLERGAQRHAEWREHFESWAETNPENKALFDRMASRELPDGFDADLPSWEPDAKGVATRKASEATLQALGATLPELWGGSADLAGSNNTVIKGSPSFGPSTISTSTWTAEPGGRNLHFGIREHAMGAIINGISLHGGTRPYGGTFLIFSDYMRPAVRLAALMGTDAYYVWTHDSIGLGEDGPTHQPVEQLASLRAIPGVSMLRPADANETAAAWRAALLYKEGPKGLALTRQNVLVLEGTKEKARDGVSRGAYVLVEGSKKTPDVILMASGSEVQLAVEAAKTLEAEKIAARVVSVPCLDWFEEQDAAYQEEILPQAVSARVSVEAGVALSWYRHLGTHGRAVSLEHFGASAPYEKLFSEFGITTEAVIAAARESLAAAQQ

SEQ ID NO: 53725 - protein, 253 aa, Cornyebacterium diptheriae
MNPAQWNANIHLMGKINTDPAATSGIKVLDRAVSIMLAVAERPLSLTELCDVTNLPRATAHRLATALETHNILTRTSDGKWTIGAVLSSLGAGSSTKLIDVATPIMTSLMNETGESVQLYQLAGATRVCIAAQEPTIGLQNTVPVGTRLPLTAGSAAKVFLAYSSPTLRDAMLASGAQFTPEDLEEARDRGWSESISEREVGLASISAPVFDSEGLFIAVLSISGPTERLRPSPSTLWSQQLTEAAAHLSQSL

SEQ ID NO: 53726 - protein, 360 aa, Cornyebacterium diptheriae
MTAIDQLKNVGTSTWLDDLSRDRLQSGNLAELIKSKSIVGVTTNPAIFAAAMSKGTAYDSQIEKLKAAQADADSAVYAMSIDDVRAACDVFSEIYAESEGKDGRVSIEVDPRISEDRDATISQARELWNKVNRPNVMIKIPATRGSLPAITDALAEGISVNVTLIFSVARYREVIAAYIEGIKKAAENGLNVSQIHSVASFFVSRLDTEVDKRLEQIGSDEALSLRGKAGVANAQRAYAVFLEAFQAADLPVGAHVQRPLWASTGVKNPDYSPTFYVSELAGPDTVNTMPESTIDAVLAADDIHGDTLSSSSDSANEIFTRISQTGIDFEDVFAVLEQEGVDKFVAAWSDLLDSMESRLK

SEQ ID NO: 53727 - protein, 484 aa, Cornyebacterium diptheriae
MIRFMTSPMTSKDSKLTLAEKVWRDHVVSQGEGDQPDLIFIDLQLLHEVTSPQAFDGLRMAGRTLRHPELHLATEDHNVPTEGIHNGSLLEINDLVSRTQVETLRKNCEEFGVRLHAMGDKKQGIVHQVGPQLGATQPGMTIVCGDSHTSTHGAFGAMAFGIGTSEVEHVMATQTLSLKPFKTMAINVTGELQPGVTAKDLILAVIATIGTGGGQGHVIEYRGEAIEKLSMEARMTVCNMSIEAGARAGMIAPDETTFDYIKGREMAPTGQDWDDAVAYWKTLPTDEGAEFDTEITIDGSAITPFITWGTNPGQGLPLSSVVPSPEDFPGDNEKVAAEKALAYMGLTPGTPLRDIAIDTVFLGSCTNARMDDLRIAADILRGRSIADSVRMMVVPSSTMIKEQAEAEGLDKIFIEAGAQWRTAGCSMCLGMNPDQLTPGERCASTSNRNFEGRQGPGGRTHLVSPAVAAATAIKGTLASPADLD

SEQ ID NO: 53728 - protein, 687 aa, Cornyebacterium diptheriae
MAHLIEAAPNPHQPFVVTAGVAVGAAMRELELPNKGPEAIVCVKDSEGTLRDLSFVPEQDSKFTPVPANTEDGRTVIRHSCTHVLAQAVQAEFPGTKLGIGPAIENGFYYDFDVAEPFTPEDLQKLEKRMKKIVKQGQKFERRIFASVAEAEEALKNEPYKLELIRDKGNVDPGSDEATEIGAGDLTGYYNVNPRTGEVDWYDLCRGPHVPTTKYIPAFALTRSSAAYWRGDQSLAGLQRIYGTAWESKEALEEYQLMMAEAEKRDHRRLGAELDLFSFPDEIGSGFPVFHPNGGIVRLEMEEHSRRRHINAGYSFVNTPHITKGDLFKKSGHLDFYADGMFPPMQLDGEVDEEGNVVKQAQDYYAKPMNCPMHNLIFASRGRSYRELPLRLFEFGTVYRYEKSGVIHGLTRARGFTQDDAHIYCTEDQLEQELTSVLDFIISLLRDYGLDDFYLELSTKDPNKFVGSDEIWEKSTSILQRVATKSGLELVPDPAGAAFYGPKISVQARDAIGRTWQMSTVQLDFNLPERFNLEYTSSDGSKKRPIMIHRALFGSIERFFGVLLEHYAGAFPAWLAPHQVIGIPVADSFSEHLEKVTGMLRDNGVRASVDTSDDRMQKKIRNHTTGKVPFMLLAGARDVEANAVSFRFLDGTQINGVPVDKAIGVITQWISSRNNKQPSEETVKKLV

SEQ ID NO: 53729 - protein, 484 aa, Cornyebacterium diptheriae
MVIFGVTGDLARKKLLPAIYDLAHRGLLPAGFSLVGYGRRGWSKADFENYVKQAVVAGARTDFRENVWARLAEGMHFVQGNFDDDAAFDSLASLLADLDQTRGTAGNWAFYLSVPPDYFSDVCHQLQRSGMATAEGNSWRRVIVEKPFGHDQESARQLNNLINSVFPEKSVFRIDHYLGKETVQNIMALRFANQLFDPLWNSHYVDHVQITMAEDIGLGGRAGYYDGIGAARDVIQNHLIQLLALVAMEEPVAFTPQELQAEKIKVLRATRPVEPFAKTTARGQYSRGWQGSELVQGLREEDGFDPNSGTETYAACTLEINSRRWAGVPFYLRTGKRLGRRVTEIALVFKDAPHQPFSEGSRHSQGRNVVVIRVQPDEGMLMRFGSKVPGNTMEVRDVNMDFSYSEAFTEESPEAYERLILDALLDEASLFPTNEEVELSWQILDPILNFWSDRGQPEEYPAGTWGPAGADKMLEREGRAWRRP

SEQ ID NO: 53730 - protein, 406 aa, Cornyebacterium diptheriae
MSRRGFLTGTAGVAAAGALSACTEPAHDADAVGVDQTVAQEIEPFDGIHQSGIATPAQSHLIVLGLNCRAGVDSAAVRRLLTLWTEDARELTQARNPVGSLEPEMTSSPSRLTVTAGAGARLFDILGKSEMKPAWLKDIPVFSKDRLDPRWGQTDLVLQICSDDPMTAAFAMRHMTRSGSDYAEVKWVQQGFLNARGTLQKGETPRNLFGQKDGTINPHTAEEFDKQVWIDNEDDSPRWMRGGTCMVVRRISMNLDTWERLDRQSREVAIGRDIVEGAPLSGGKEHDSADYEAVDEYGLPKIDARSHMALATPPSDLPNQRLLRRAYTYNETPMVGTDQLSNAGLVFCCFQKDPRKQFIPIQQRLDASDRLNEWIKHIGSAVYAIFPGTDQKKTEASIWGAALFDS

SEQ ID NO: 53731 - protein, 338 aa, Cornyebacterium diptheriae
MRIRRQVMKIGVMGAGSWGTTLAKVFSDAGCDVTLWARREEVAREINTEHTNSTYLRGIALPHTLTATTQPTQALCDADVVVLAVPSQTLRGNLAEWCADIPQDALLLSLAKGIEKETFLRMSEVIAEVTGAQPDKVAVLSGPNLAREIAEEQPAATVIACTNEKNAQRIQHALAAPYFRPYTNTDVIGCEIGGACKNVIALACGMASGRGLGENTLATLMTRGLAEISRLGVAMGADPRTLSGLAGLGDLVATCSSPLSRNRTFGARLGEGKTLDEARAATNGQVAEGVISSQSIARLADSLGVDMPITRAVFGVCHRDQNVADMVAALMGRTKKSE

SEQ ID NO: 53732 - protein, 365 aa, Cornyebacterium diptheriae
MSQNLSAQNSSETPRIKVAIIYGGRSSEHSVSCVSAGAIMAHLDPQRYEVFPVGITHDGVWTVGESDPSRLKTVDRVMPEVQFTREVSLSVNPTTAGELCFEDGSLYAKVDVVFPVLHGRFGEDGTIQGLFELSGVPYVGTGVLSSACGMDKEFTKKLMAAEGLPVGKEVILRGSETLTEEHKRELGLPVFVKPARGGSSIGISRVADWSEWDAALSLAREHDSKVIVEAEIVGVEVECGVLERIDGSLMASVPAQLQDTDEGDEGFYGFDTKYLDDVVTAHIPAPFDAETTALIQELSLKAFTALSCRGLARVDFFVTDHGPVLNEINTMPGFTPISMYPQVFEATGIGYAQLLDNLIEQALHK

SEQ ID NO: 53733 - protein, 405 aa, Cornyebacterium diptheriae
MAIKTLKDLLAEGVEGRHVLVRSDFNVPLNDDREITDAGRITASLPTIKALVDNGARVILMAHLGRPKGEVNEKFSLAPVAEALSEALGQYVALAGDVVGEDAHERANGLNDGDVLLLENVRFDPRETSKEEAERGEFADQLVALTAENGAFVSDGFGVVHRAQASVFDVAQRLPHYAGTLVEKELEVLGNKVASAPERPYAVILGGAKVSDKLGVIEALATKADKLIIGGGMCYTFLAAKGINVQKSLLQEEQINKCKELLEAYADKIVLPVDLVAAAEFASDAENKIVAIDEIPEGWMSLDVGPKTVEKFAEVLATSKTVFWNGPMGVFEFENFSAGTRGVAEAIIAATANGAFSVVGGGDSAAAVRLLGLDEDGFSHISTGGGASLELLEGKNLPGVSVLES

SEQ ID NO: 53734 - protein, 334 aa, Cornyebacterium diptheriae
MTIRVGINGFGRIGRNFYRAITERGADIEVVAINDLTDNHTLSHLLKYDSILGRLGKEVSYDDESITVDGHRMVVTAERDPKNLKWGELNVDIVVESTGFFTDANAAKAHIEAGAKKVIISAPAKNEDATFVVGVNHTDYDPAKHNIISNASCTTNCLAPMAKVLDEKFGIVKGLMTTIHAYTGDQRLHDAPHRDLRRARAAAQNIVPTSTGAAKAVALVLPELKGKLDGFAMRVPVITGSATDLTFETTKEVSAEEINAAMKEAAEGELKGVLAYTEDPIVSTDIVTDAHASIFDAGLTKVIGNQVKVVSWYDNEWGYSNQLVSLTEYVGERL

SEQ ID NO: 53735 - protein, 347 aa, Cornyebacterium diptheriae
MAYYRNHTGPHHRGVPTTVTEEHIRNNPTLKEVGEQAAINVITAHAPSSRNGDDAAVLSHAGANSRAVVTTDMLVENRHFRLDWSTPAEIGRKAITQNFADIEAMGARPVAALLAISAPAYTRLQFVSDLARGIAERVSDYSAELVGGDITDGDAIVLSVTAVGQLGGSLPELALDRARSGHTVIVSGVIGESAAGLALLNRFGRDGVPERFMPLVSAHCATYVPEGRGFVARAAGVSSLTDNSDGLIVDLRTMARKSGVVIDLDPSAIQPSALMREAAEILEEDPWHWVLGGGEDHTLMGTTAHAVPTGFRKIGTVIKRSNQPTHAAGEVLVGGEAPAYDDGWVSF

SEQ ID NO: 53736 - protein, 328 aa, Cornyebacterium diptheriae
MGALSAQVKDELIKVSSTKQRSRIAELASIIRFAGSIDSALGKTVIEIELDNEAVAIRVAKEIEELFAISAKLVDLGPMATRRTPRHVVRIAEDAETLIRRVGLVTRSGHAVVGLPPQIISGSISDAEAAWRGAFLAAGQLSDPGRTSGLEVACPCLEASLALVGCARRLGLSAKPKETRGVEKVVIRDGEAVGALLSRMGAHKTRLVWDQKRARREARPLGNRLANFDDANLRRSARAAVAAAARVERAMTILGDDVPDHLAQAGQLRVQHRQASLEELGRLADPQMTKDAVAGRIRRLLHMADKKASDMGIPDTSVVVTEELLDDF

SEQ ID NO: 53737 - protein, 323 aa, Cornyebacterium diptheriae
MNKLDTSQLKIASMGGGHGLFQTLRAVRQLNPASIDAIVTVADDGGSSGRIRRELGQIPPGDLRMALAALAPFDDEGLQWETLLQHRFGGHGALAGHAVGNLIIAGLCDTLGSEIAALDAVAKVIKAEGRVLPACAEPLEIAAEVSGLDDDPRIMREVIGQVAVASTPGTVRRVRLIPERPEATEESVEAIENADLVTLGPGSWFSSVIPHVLVPGIPTALATTKALRVVVLNLSPEPGETAGFTAERHIHILSQHAQTLRADVILVDEGLIPHKGERVHLERAAAVLGAQISYHDLSETDPSGRRIHRHDPAKLAEALRLQL

SEQ ID NO: 53738 - protein, 295 aa, Cornyebacterium diptheriae
MRTDVEPRTEIPPVVITGLSGAGLSSAARVLEDMGWYVTQNIPSQFVVQLVELCADPHSPVDKIAIVSDVRSKEFSGSLEEVISELSGLGLKPLVVFMDARNDVLIKRFDNLRRTHPLQGSGTLLVGIEREREIMNQIKESADVVIDTSDLSIHDLRRSIELNFNGIANKLQHVTVQSFGFKHGSPRDTDLLIDVRFLPNPFWVPELRPFRGTDKPVSDYVLADEGAQKFLDNFTRMLRDMRPGFKHEGKNFITVSVGCTGGHHRSVAIAEELARRLREVPDLDVSVNHRDIARN

SEQ ID NO: 53739 - protein, 155 aa, Cornyebacterium diptheriae
MSKEGLPNVSSVAGAGLVVGIVSATWNEKICNQLHAEAIRTAKDCGAKVIETRVIGALELPIVVQKLAQTCDAVVANGCVIKGGTPHFDYVCDSVTEGLTRIALDSGVPVGNGVLTTLNEEQAIDRAGFDGSTENKGAEATIAAMHTALVLRDLP

SEQ ID NO: 53740 - protein, 438 aa, Cornyebacterium diptheriae
MDITRSGTPHNNEAYPIDQQNNDHPGVTLDSIERAIADIANGKPVVVVDSEDRENEGDLIFAADKATPELVAFMVRYSSGYICASLTSEECDRLQLPPMTSHNEDARGTAYAVTVDANTGTTGISATSRADTLRKLADSQFGPQDFTRPGHVVPLRAKAGGVLERAGHTEAAVDLARMAGLNPAGVLCEVVSEDDPTDMARAPELRRFADRHDLALISIEQLIEWRRRYELLVERAVSTQLPTEFGRFTAVGYRGIVDGVEHIALVAGDITSDEGKDVLLRVHSECLTGDVLGSRRCDCGPQLQASLRAISERGRGVVVYLRGHEGRGIGLLHKLQAYHLQDEGADTVDANKALGLPVDARNYSVAAHILRDLGVQSVCLLTNNPEKSLELERYGVKVTGREPVKVEVHEDNIRYLTTKRDRMNHDLPWIAEYKKEQS

SEQ ID NO: 53741 - protein, 202 aa, Cornyebacterium diptheriae
MFTGLIEEIGTITGMEEQGDSLVLSISAPALMVDVKQGDSISVNGVCLTVVICDATGFTADVMRESLDRSSLGQLRTGSYVNLERAMRADARMGGHIVQGHVDGTGVLLSRDHSEHWDVLRFSLPADISQYVVEKGSIAVDGTSLTVSSISEPLAENHWFEVSLIPTTLEHTTLGELKLREVVNLEVDIVGKYVERMLAGHK

SEQ ID NO: 53742 - protein, 526 aa, Cornyebacterium diptheriae
MAATENSESSATATAEGTASSGQGLANAGEASSATVKKAAKKTAAKKTARKVARKVTAVKVAATPTVTSSAESATAEPAIELPSSEPVKKAAKKTAKKTAKKVAKKAAKKTAKKTTAKKSTRKSAKKVAAPVPEEATQSSEESEDELESLAGEDSDEDYDPHLDEFDDDDEMHTDELGEDDSSDDDSDEDEGSSVWDEDESAALRQARKDAELSASADSVRAYLKQIGKVALLNAEQEVSLAKRIEAGLYATYRMEQMEEAFNNGDKEAKLTPAVKRDLRAIARDGRKAKNHLLEANLRLVVSLAKRYTGRGMAFLDLIQEGNLGLIRAVEKFDYTKGYKFSTYATWWIRQAITRAMADQARTIRIPVHMVEVINKLGRIQRELLQDLGREPTPQELAKEMDITEEKVLEIQQYAREPISLDQTIGDEGDSQLGDFIEDSEAVIAVDAVSFTLLQDQLQDVLHTLSEREAGVVKLRFGLTDGMPRTLDEIGQVYGVTRERIRQIESKTMSKLRHPSRSQVLRDYLD

SEQ ID NO: 53743 - protein, 356 aa, Cornyebacterium diptheriae
MPLSAELPLNTIYAETTVIGTEMNFIYPAVIAAVQEGEKAWGTTHPNPPVGAVVLSSNGSIVGRGHTQPPGGSHAEIMALRQAGENTKGGTLVVTLEPCNHWGRTGPCSHAISESGIEHVVYLMQDTGSLEKGGAEYLRRQGLKVTFLGLSVAALIPWQASKDRGWPYVVGKTAHTLDGFVAAEDHSSKWITGSASRDYANRQRRHFDAIIVGTGTVKADNPALTARKDDGTLLPHQPLKVVIGTSKISEGTQLARSGFVQFSTIEEALVQLWDRGVRYVLVEGGPHLLHGFLTSGNLDQLHSYSAPMLLTRGVSLLQEEEKKSAESANTTIASALRGSPQSISMLGDDILQVINI

SEQ ID NO: 53744 - protein, 380 aa, Cornyebacterium diptheriae
MIAECSSRELEALKPEVRAALRLGAYQLLYTRVGAHAAVDTTVRIMEAIGQDRAKGFVNGVLRTISRTSPQSWIEKLTPSGEVESIAFQHAHPAWIARSFSQIVGMNELEAALSADSERPKVHLVARPGEMSAEELALIVGGDEGKYSPYAVYLESGDPGALEPVREGLAAVQDEGSQLIARAVTEAPIHGEDQGKWLDLCAGPGGKAALLGAIARIDGATVDAVEVSKHRAKLIENIVRGLPVKVTVGDGRSPGLAPGYDRVLVDAPCSGLGALRRRPEARWRKQETDIEELTKLQSQLLESALRLVRTGGIVVYSTCSPDLRETRQIVDRILRSHEVEELNAAELVPSMENTGEYKSVHMWPHRHGTDAMFFAVLRKK

SEQ ID NO: 53745 - protein, 914 aa, Cornyebacterium diptheriae
MGLCQIACSEGGFGQMLDVLVTLAIVTSNANRLMLIDGHSMAFRAFYALPAENFSTSGGQATNAVYGFLSMLSSLLVEEKPTHVAVAFDVGRQTFRTEMFPEYKAQREAAPPEFKGQVEIIKEVLETLGITTLEKENFEADDIIATLATAAGPLGFDTYIVTGDRDSFQLVNESTTVLYPMRGVSVLHRFTPEAVEEKYGLTPVQYPDFAALRGDPSDNLPNIPGVGEKTATKWIVQYGNLDSLLAHADEIKGKAGNSFRERLDQVRMNRTLTEMIKDLELPYAPDQLERKPADASAIASKFDELEFGSNLRDRVIHAVDAQGNVSEESEEYKPEVVIDHEKLASWLATRAGQSLALYVRGHGSPASGDAESAAIVDKQFHAVAFDFGDLDADDDQAFAQWIASDSPKYLHEAKAVFHMLAGRGYTLNGIEHDTAIAGYLLRPGQRTYDLKDVYQRHLQRQLGGGSSESGQLSLLDAPDAQELVDSAVAILELSKSLTAQLQAIDAYELYREMELPLVGVLARMEATGICVDVATLREQRDIFVEQVKEEESAARELAGDETLNLSSPKQLQVVLFDTLGLPKTKKTKTGYSTAAKEIESLAVKNPHPFLDHLLAHREFQKMKTTLDGLIKAVGDDGRIHTTFNQTVASTGRLSSTEPNLQNIPVRTPAGRKIRSAFVVGQGYKSLLTADYSQIEMRVMAHLSEDPGLIEAYQTGEDLHNFVGSKVFDVPVDQVTPELRRRVKAMSYGLVYGLSAFGLSQQLNIPAGEAKVIMESYFERFGGVKRYLDQVVEQARKDGFTSTLFGRRRYLPELSSDNRVARENAERAALNAPIQGTAADIIKIAMLRVDARLTAENCQSRVLLQVHDELVLEVASGEQEKVQQLVEEEMDAAISLRVPLEVSAGVGTNWEEAAH

SEQ ID NO: 53746 - protein, 513 aa, Cornyebacterium diptheriae
MPRVCGVLRDAFLSINDSYIIFGAFIHMPTNNVPQVAINDIGTAEDFLAAVDATIKYFNDGDIVEGTVVKVDHDEVLLDIGYKTEGVIPSRELSIKHDVDPDEVVEVGDQIDALVLTKEDKEGRLILSKKRAQYERAWGAIEELKEKDEPVTGTVIEVVKGGLILDIGLRGFLPASLVEMRRVRDLDPYIGQQIEAKIIELDKQRNNVVLSRRAWLEQTQSEVRSEFLHQLQKGQVRKGVVSSIVNFGAFVDLGGVDGLVHVSELSWKHIDHPSEVVTVGDEVTVEVLDVDLDRERVSLSLKATQEDPWRVFARTHAVGQIVPGRVTKLVPFGAFVRVEEGIEGLVHISELAQRHVEVPDQVVNVGDEAMVKVIDIDLERRRISLSLKQADEDYTEEFDPSKYGMADSYDEQGNYIFPEGFDPETNEWLEGFDEQRQAWEARYAESERRFQLHTVQIEKNRVAAAEAAAAGEATNYSSESAEAAPAAANTEAEGGSLASDEQLAALREKLAGN

SEQ ID NO: 53747 - protein, 410 aa, Cornyebacterium diptheriae
MSETAASGLRLFTSESVTEGHPDKICDAISDTILDALLSVDPHARVAVETVTTTGLVHVVGEVRTSGYVEIPKLVRDKLIEIGFNSSEVGFDGRTCGVSVSIGEQSQEIGAGVDQSHEVRSGENTDADDQAGAGDQGLMFGYATNETATLMPLPIDLAHRLARRLTQVRKTSVVSHLRPDGKTQVTLAYDESGRPVRLDTVVVSTQHDPDVTQEWLFAQIKEHVVDWVLRDSGLESTLDISGYSLLVNPSGSFVVGGPMGDAGLTGRKIIVDTYGGMARHGGGAFSGKDPSKVDRSGAYAMRWVAKNIVAAGLADRAEVQVAYAIGRAKPVGLYVETFGTAKFGLTDEQIQDAVLHVFDLRPAAIIRELDLLRPIYAGTAAYGHFGRDDLKLPWENTDRAEQLRDVLSLG

SEQ ID NO: 53748 - protein, 511 aa, Cornyebacterium diptheriae
MRTPLSSVSPQLVQRFHELGFTPSSIRNFLGRPGFAAISRGEPASVLYAMRENEDSDFYPLIATFILHRPVAAEALHRVLGGSLTDQLTETGVLEIVDASKAYLTAKIDIRWLELEDDLFWVFSDTDASMIADHVPGKDHVLGVGAASLSLLATTPRSPVNSVLDLGTGSGVQALGQLRHARSVTATDVHPRALDFAEATFAGAHFDVEILDGSWFEPIKNRKFDRIVANPPFVVGPPEIEHVYRDSGLDLDGATETVVRGAVDHLHSNGTAHLLGSWVHKNGESVASRVAEWIPSHGVIAWFLQRDTVDPIQYVNTWLRDESIDPRSEIGFKRTLSWLDHFSRAKVEAVGFGYVAIQRVDDSIPSEVYFEELTHQVDDYLGDEIEEFFVRVDWLREKNRDGIAQSQFYLRPGVAKESVSVTDIDSGMGFTHLKYRITRTEGPRWSHEVDEHIVSVIAGLHPEGLTLEDVATLYAVSNGLDDESFVDAIIDPVVALVRHGILLPAEITKGW

SEQ ID NO: 53749 - protein, 1118 aa, Cornyebacterium diptheriae
MPKRNDIKHVLVIGSGPIVIGQACEFDYSGTQACRVLKEEGLRVTLINSNPATIMTDPEFADHTYVEPIEPEYIEKIFEKEIAEGHPVDAVLATLGGQTALNAAIKLDRRGSLEKYNVELIGADIDAIERGEDRQKFKDIVAKIGGESARSRVCHNMQEVYDTVEELGLPVVVRPSFTMGGLGSGLAFNQEDLERIAGGGLAASPEANVLIEESILGWKEYELELMRDGADNVVVICSIENVDALGVHTGDSVTVAPALTLTDREYQKMRNQGIAIIREVGVDTGGCNIQFAVNPRDGRLITIEMNPRVSRSSALASKATGFPIAKIAAKLAIGYTLDEITNDITGVTPAAFEPTLDYVVVKSPRFAFEKFTGSDDTLTTTMKSVGEAMALGRNYIAALGKVMRSLENKQVGFWTTSDEFFAGDRAKNLDAVLEDLKRPTEGRMYDVELALRLGGSIEEVHQASGLDPWFLAELQSLIDFRESLMKAPVLDEPLLRKAKFFGLSDRQIAALRPEFAGEDGVRRLRWSLGVRPVFKTVDTCAAEFEATTPYHYSAYELDPAAESEVRPQTEKDKIIILGSGPNRIGQGIEFDYSCVHAALELSRVGYETVMVNCNPETVSTDYDTADRLYFEPLTFEDVMEVYHAESESGHVAGVIVQLGGQTPLGLAEKLRDAGVPVIGTTPEAIDLAEDRGEFGEVLRKAQLPAPAFGTATSFEEAKTVANNIGYPVLVRPSYVLGGRGMEIVYDENSLHAYIERATEITSDHPVLVDRFLDNAIEIDVDALCDGENVYLAGVMEHIEEAGIHSGDSACALPPMTLGAEDIENVRRSTEALAHGIGVKGLMNVQYALKDDILYVIEANPRASRTVPFVSKATGVHLAKAAARIMTGATIPELQAEGMIPTGYDGGSLPENSPIAVKEAVLPFNRFRRPDGTMLDTLLSPEMKSTGEVMGLADNFGAAYAKAEQAAFGALPTEGTVFVSVANRDKRTLIFPIQRLASLGFRVLATSGTAGMLRRNGIECEVVLKQTQVQEARQNGTEGQRSVVDMIKAGEVDLILNTPAGSSGARHDGYQIRAAAVNVGVPLVTTVQGVTAAVQGIEALRAGELSVRALQELDHSVTR

SEQ ID NO: 53750 - protein, 393 aa, Cornyebacterium diptheriae
MISVYPKTKVKGDRVTSQDRSEAVLVLADGRIFKGESFGAEGATLGEAVFTTAMSGYQETMTDPSYHRQIVVATAPQIGNTGWNDEDGESHGDKIWVAGLVIRDLSTAVSNWRAKRSLEDEMREQNIVGISGVDTRAIVRHLRNFGSVAAGIFSGEAAKQPHDELIEIVKSQPSMAGADLASEVSTQEAYVVEPDGEALYTVVAYDMGIKTNTPRNFSRRGIRTVVVPANTPAEDIAQYNPDGVFVSNGPGDPATADVMVGIVQEILAQKIPFFGICFGNQILGRALGMNTYKMKFGHRGINVPVLNHLTGKIDITAQNHGFALEGTALEQFDTPFGPAHVTHTCLNDDTVEGVALVNGLAYSVQYHPEAAAGPHDANPLFDQFVELIQANKK

SEQ ID NO: 53751 - protein, 448 aa, Cornyebacterium diptheriae
MSTQNYPATGRLAEPEYGTLLVKNVKIYGEGEPVNVLITDGVITDTHAGDVKADREVDGQGGVLLPGLVDIHVHLREPGREDTETIATGSAAAAKGGFTAVFTMANTMPVMDQPIIAESVWHKGQDIGLCDVHPVGSITKGLEGKEITEFGMMAHSQAKVRMFSDDGKCVDNPLIMRRAVEYARGTDVLLAQHCEDPRLTDGAVAHEGAMAAKLGLGGWPRVAEESIVARDAILARDYGGRMHICHASTQGTVELVKWAKEHEIPLTAEVTPHHLLLTDERLATYDGVNRVNPPLRENSDILALRDALLNGTIDCVATDHAPHGSEDKCCEFEHAKPGMLGLETSLAVVAAVFVETGLADWRFVAKVMSERPAEIVKLPGHGRPIAVGEPANLTIVDPGAKWTASGEKMASKATNTPYEGMEFNARVTTTILRGRLTCVDGEPTQARA

SEQ ID NO: 53752 - protein, 198 aa, Cornyebacterium diptheriae
MSILTVGEKFPEFNLTALKGGDLHDVNASQPEDYFETVSLDKYEGKWKVVFFYPKDFTFVCPTEIAAFGKLDEEFQDRDTQILGGSIDNEFSHFNWRATHPELKTVPFPLFSDIKHDLIKALGVENEEGVADRATFIIDPDGIIQFVSVTPDAVGRNVDEVLRVLDALQSEEVCACNWQKNDPTKNIDKFAELEKGLN

SEQ ID NO: 53753 - protein, 200 aa, Cornyebacterium diptheriae
MVSASAIGYYGHARGDEILDEGSTQGDDFLASVCEEWEAASRTDATSNKRIVNIRTGVVMSGRGGMLPVLKAVFSVGLGGPFRGSNPWMSWIAIDDLCDIYIRAVLDPKLSGAINAVAPNPIKNQDFVDALAKELKRPAKMTISSLGPAILLGQQGAKELALADQRVQPRVLNNLDHHFRYVDIRSCLAHELGGENLLDI

SEQ ID NO: 53754 - protein, 199 aa, Cornyebacterium diptheriae
MNPEDENTSQTKKPAEELKSQETRSSWKRRGSRYKARRRAVDILFEAEMRDIDPVAIVEDRVVLSRLNGTDVNQVPSYTKEIVSGAAMELDRLDELIAAHLAEDWSLERIMTVDRAILRVSVWELIFNPDVPLATAIIEGVELASEYSTDVSPAYVHALLDSIAKNIDEYRAGSVTPVENSEAEAAGYPVEESIEEDSQ

SEQ ID NO: 53755 - protein, 362 aa, Cornyebacterium diptheriae
MEQQEKRGTVRKALLGSVIGFGGLALAGCDVEAPGGPLGTALGFGWPKGITPEATSMYNFWVWVWVTAWIIGFIMWGLFIYGMFSWSAKRAKKAGKDEFPRQTQYNIPLELVLTIVPIIIVMALFFFTVQTQDKVTAMDKDPKVTVDVTGYQWNWKFGYAKVAGELSPTGSDYVGTDEKRQEAAEKTKFDQGGDNPNPINGRSKTDTSYLHFNKIETLGTSEEIPVLVLPSNTPVEFDLASADVSHAFWVPEFLFKRDAYNHPEQNKQQRRFQIEKIEKEGAFVGRCAEMCGTYHAMMNFEIRVVSPEKFAQYLKFRNDNPQATNSDALKSIGEAPYATSTHPFNSERATRDGANFDDTAAA

SEQ ID NO: 53756 - protein, 640 aa, Cornyebacterium diptheriae
MCGLLGMLSSTGQASKYAAAIESALPCMHHRGPDEAGTWHDDHAVFGFNRLSIIDLEHSHQPLRWGPEGEPDRYAMTFNGEIYNYVELRKKLQDLGYTFNTSGDGETIAVGFHHWGADVVLHLRGMFGIAIWDTKEQRLFLARDQFGIKPLYFATTEAGTVFASEKKCILGMADAIGLDLGLDQRAIEHYIDLQYVPEPESLHQHIRRLESGCFAFVSVGGNVEQTRYFRPQFPAQEFPKDKEQDLFDRIAKALEDSVEKHMRADVTVGSFLSGGIDSTAIATLAKRHNPNLLTFTTGFEREGYSEVDVAAESAAAIGVEHIVKIVSPEEYANAIPQIMWYLDDPVADPSLVPLFFVAQEARKHVKVVLSGEGADELFGGYTIYKEPLSLAPFEKIPSPLRRGLGKVAEVFPDGMRGKSLLQRGSMTMEERYYGNARSFNFDQMKRVIPWAKKEWDHREVTAPIYAQSEHMDPVARMQHLDLFTWMRGDILVKADKINMAHSLELRVPFLDKEVFEVAETIPYDLKIANGTTKYALRKAMEQIVPPHVLHRKKLGFPVPMRHWLAGDELFGWAQDTINESMTDQYFDKAAVLAMLNEHKNGVSDHSRRLWTVLAFMIWHGIFVEHRIDPGIEKRDYPVYL

SEQ ID NO: 53757 - protein, 564 aa, Cornyebacterium diptheriae
MNNVMTDTIIKGTGVVSGVRYAKAVWISPRPKLPQAGEVVDEADRAQQLDNFVAAADAVAQRLLDRSEHAEGAASEVLKATAGMVKDRGWQKAVKKGIQGGHPAEYAVVAATTKFVSMFEAAGGVMAERTTDLRDIRDRVIAELRGDLEPGLPDVHEQVVLFADDLSPADTAALNTDYFVGLVTELGGPTSHTAIIARQLNVPCIVATGEKIHKIEVGTDVLIDGALGTVTLDADPETARAAELESRMLAERIAQWKGPAETKDGHRVQLLANVQDGKAARIAATESQAEGIGLFRTEMCFLTATEEPSVDEQAAVYKKVLEQFPDSKVVVRSLDAGSDKPVAFASMADEMNPALGVRGLRVARANESLLTRQLDAIAQAAHELGRDENSPTWVMAPMVATTREARWFAGLCAERGLTAGAMIEVPAASLMADKLMPYLDFVSIGTNDLTQYTMAADRMSPQLAYLTDPWQPAVLRLIKHTCEEGKRFNTAVGVCGEAAADPLLACVLTGLGVNSLSAASTAIAGVGAQLASVDFETCVRAAEAAVNAEGAIDARAAVRKVLQP

SEQ ID NO: 53758 - protein, 321 aa, Cornyebacterium diptheriae
MILTFTPNPSIDKTLQLDSVLTRGAVQRLSGVQTVAGGKGINVAVALAKAQADTVALYPAHPEDPFNKLIRESQIPAQRVTIRGEVRINTTVTEPDGTTTKLNIQGPQIHEDELQALQKNLLERTARCSWAVLAGSLPPGVPTDWYVHLTKLLNARHPSLRIAIDTSDVPLQKVGESFGNCALSLIKPNGMELGQLVGLDGYVLEKEAAQGNFDPVVSAARKAILQGVENVLVTLGAAGAVLVTKDHAWKATPPPITVLSTVGAGDASLAGFILASEDGLPPEKCLAQAVAYGAAAASFAGTHMPYPHQIDVNHTPVTLLS

SEQ ID NO: 53759 - protein, 403 aa, Cornyebacterium diptheriae
MLRWTTAGESHGQALIAMLEHMPAGVPISREEISFQLGRRRLGFGRGARMKFEADEVSILGGVRHGYTIGSPIAIMVGNTEWPKWTTIMSADAIDESDPDVAAAMSSGRGARLTRPRPGHADFAGMVKYNHDEARPILERSSARETAARVAAATVARSFLRETLGVEVFSHVISIGRSEIDQTVCPTFEDLGRIDDSPVRSASAQAEASMIDQINAAKKQGDTLGGIVEVIVNGLPIGLGSHISGEDRLDAQLAAALMGIQAIKGVEIGDGFEEARRLGSEAHDEIVLRDGVVARQSNRAGGIEGGMTNGESLRVRAAMKPISTVPRALQSIDMDSGKRATGIHQRSDVCAVPAAGVVAEAMVALVLARAVLEKFGGDSLAETKRNIAAYNEYVKTRIAFDGE

SEQ ID NO: 53760 - protein, 289 aa, Cornyebacterium diptheriae
MPGHFILTIMIHFRAAVLGHPIEHSLSPLLHNAGYAALGLSQWSYGRFDCDSQQLSELVDKCDPSFQGFSVTMPCKFEALEYATSVSERAQRIGSANTLVRAENGWYADNTDTEGVRGALEILFSDRGGAAEALKNTRAIVVGAGGTSRPAIWTLGTLGVAEIVVVNRSDRREELEPVLEGEPTKISFVGFDSNLRSHAQSASVVISTVPSVGVSDYIDDLVHAPVLDVIYDPWPTPLIQHAQKKGVPCIGGHIMLLHQALSQFEQFTGVKAPREAMQKALFDHLFGDN

SEQ ID NO: 53761 - protein, 649 aa, Cornyebacterium diptheriae
  MISC_FEATURE (11)..(11): X=any amino acid
  MISC_FEATURE (582)..(582): X=any amino acid
DNSLIALAPAXDSDKTSIIKELYHVMKTAGVTDDVDTLIADTLTREESGSTALPQGVAIPHCRTSAVAHPVIAFASLSKQVLFDGSQNPVDLVFLIVVPLDAKRAHLKILSTLARALINQSAEASLRAATTPTQVEAIISASLDSKTAMAENNAPSSPIRIAATTACPTGIAHTYMAADALTSAAKARGDASLLVETQGTSDNSVLSEKEIASADVVIFAADVGVRDHERFKGKRILECSPRQAIRDPNDTLSAAIALKNSSRNTTVRPHATHRVAATAYDLERKMRHAAMTGVSYMVPFVAAGGLLLALGFLLGGYDIAAGWQAIAIQHSFTDLPSHDVVIDIATGQVVSFQRSGLLLYLGAVAFAIDSMSMQFIVAALSGYIAFAIAGRSGIAPGYIGGAVSVFVGAGFLGGLVTGLLSGTLAWWLSTRRVPALISSLMPIVIVPLISSLLWVLIMFLVLGKPLSLLLLSLQNWLAGLSGSSAIILGAVLGLMMCFDLGGPVNKAAYLFVTAGLSTNEPAALHIMAAVMVAGMLPPIALSLATIMDKKVFTDTERENGKSAWLLGLSFISEGAIPFYRRXSIRVIPSLMIGGASAGAISMGTATGSHAPHGGIFVLFAISPAWTFLLALLIGVIVSALIVILLKRMW

SEQ ID NO: 53762 - protein, 88 aa, Cornyebacterium diptheriae
MASKTVSVGSSVGLHARPASIIAEAAGEFDEDIFLTIEGEDDDETDAASSLMIMALGAEKGDKVTVTSENPEAVEKIAALIEKDLDAV

SEQ ID NO: 53763 - protein, 171 aa, Cornyebacterium diptheriae
MVVQPDIPGDNDPGMGRRLGVDVGTVRIGLAMSDSGARMAMPFETLARETGLKDSDKQDIDRIAEVICDNHIVEVVVGLPRDLKGNGSKSVKHAKDVAFRIRRRMHKNGWEHVAVKMADERLTTVVATQALRASGVSEKKGRRVVDQAAAVEILQSWLDARINVLENRTIP

SEQ ID NO: 53764 - protein, 888 aa, Cornyebacterium diptheriae
MQTHEIRERFTNHFVKAGHEAVPSASLILDDPNLLFVNAGMVPFKPYFLGQQNPPFPNGTATSIQKCVRTLDIEEVGITTRHNTFFQMAGNFSFGQYFKEGAITHAWQLLTGTVAEGGLGLDPERLWVTVYLDDDEAAEIWNKKIGVPSERIQRLGMADNYWSMGIPGPCGPCSEIYYDRGPEYGAEGGPIADDNRYMEIWNLVFMENERGEGIGKDNFEIVGPLPKKNIDTGMGIERVACILQGVDNVYETDLLRPVINVAEELTGATYGTNDDDNIRFRVIADHSRTGMMLILDGVTPGNEGRGYILRRLLRRIIRSAHLLGAKGKTLEKFMNTIMDTMTPSYPEIADNRERILRVAITEEKAFLKTLASGTELFEDKADQVKNSGNKVLDGAAAFKLHDTYGFPIDLTLEMAAEAGLNVDIEGFNSLMAEQRARAKADNRAKKHGHADLSIYREWVDEHPTVFTGYDELTTDSKVLGLLSAGNKVNEIKAGEEVEVILEASPLYAEAGGQLGDRGQILMGDTVLKVNDVQKIGKKLWVHKATVAQGGLSVGDVVTAQVDSDWRHAARQAHTGTHLIHAALRQVLGPTAVQAGSMNKPGYLRFDFNYTESLTPRQLEEIQNITNQAVDSDWDVNTIETSLEEAKAMGALALFGENYGSEVRVIEVGGPFSIELCGGTHVTHSSQIGPVAILGESSVGSGVRRIEAYTGLDSFKYLAKEQALVENIASSMKVKPEELPDRIAALTQKLKDAEKAIADMRSAQLMAQATGLVAGAIEVNGVKLVAQRVSDVENMGDLRSLAADIKQRLDDVPAVVALVGEDASGKAPFVVGATKAAVSAGYKANAYAKILGQYIEGNGGGKPDMAQGSARNSSGFDQGIAAVKAEMSA

SEQ ID NO: 53765 - protein, 371 aa, Cornyebacterium diptheriae
MKSMSSITFKKIDHPNPTPADKVQEIVANPGFGKYFTDHMVTIDWNETEGWHNAQVQPYAPVSLDPAASVFHYGQAIFEGLKAYRHADGTIRTFRPEANAARFQRSAQRLAMPELPIEVFIESIQQLVSVDHDWVPAAGGEESLYLRPFMIATETTLGVHSSKSYRYFVIASPAGAYFSGGIKPVSVWLSEDYVRAAPGGTGAAKFAGNYAASLIAQTQAAEKGCDQVVWLDAIEHNYIEEMGGMNLFFVMGKGDQAHVITPKLSGSLLPGVTRDSLLQVARDLGYTTEERLVSKGEWEETATSGAMSEAFACGTAAVITPVGSVKSTHGEFLVNNNEAGSITMQLREALTGIQRGSVADTHGWMHTLVEA

SEQ ID NO: 53766 - protein, 452 aa, Cornyebacterium diptheriae
MDSLFDSPVQTARSSSDSDAHNFFKAGPYAPLAARMRPQSLDEVVGQRHLLDSGKPLQRLIAGSGDASVILYGPPGTGKTTIASLISAGTGHEFVGLSALNSGVKEIREVIDQARRNLIHGKRTVLFIDEVHRFSKTQQDALLAAVENRTVLLVAATTENPSFSVVAPLLSRSLILQLKPLTHDDIKTVLLHALQDKRGLDNRITISDEALEQLVLLSGGDARRSLTYLEAASESLADGEELTPEIIRHNVDKAIVRYDRDGDQHYDVVSAFIKSMRGSDVDAALHYLARMIDAGEDPRFIARRLVIHASEDVGMADPQALSVAVAASQAVALIGMPEARINLAQATIHLATAPKSNAVITAIDAALADVKQGKTGPVPAHLRDGHYAGAKQLGNAVGYKYPHDDPRGIVEQQYIPNGLEDVVYYRPSEHGAEQRIESYLGKLRRIVRGQRR

SEQ ID NO: 53767 - protein, 428 aa, Cornyebacterium diptheriae
MSTASWGWTLHGDGKTIAPGAVVAPEERLSWSRTIGIGMQHVIAMFGATLLVPTLTGFPVNTTLLFSGISTMVFLLITRNRLPSYLGSSFGFIAPLMASQGEGIGVQLGGVVATGLALILVGFIVKSAGRKVIDLVMPPAVTGAIVALIGLNLAPSAAGNFQSQPLVAVVTLASILLFTVAGRGMVARLGILIGVIIGWVFAAITGNLAEGASDSVREAAWIGFPQFHTPEFTTHAILVTLPVVIVLIAENVGHVKAVSEMTGRNLDDLAGDALIADGIGTTFAGAFGGSGTTTYAENIGVMAATKVYSTAAYWVAALTAVVLAFIPKFGALIFTIPTGVLGGAALVLYGLIGMLGVRIWQDNKVNFNNPVNLTAAAVALIAGIGNLTLVIGGIELQGIAWGSMGIIVFYPVLKWLYLRVGEGNNARF

SEQ ID NO: 53768 - protein, 500 aa, Cornyebacterium diptheriae
MSAQFSLPATGLATQLELSKKLPEDIDALVVPTFKGEDGLELAASGLFDENLEIAIWDLLVAVGATGKQGEVVRIPSIEGIEVDFIVGVGLGDNDSLDDDTLRRAAGDAARSLAGVQHVATTLGAFGLQPAVEGFALGAYNYTGVRSKQKKPLPLEKVTFISLGDKKAAKEEFTVGQIIAESVALCRDLVNAPSSHLYPESYAAIIRDTAEKIGLGVEILDEKKLEKQGFGGILAVGTGSSRKPRLVRLTWAPKKAKKSIALVGKGITFDTGGISLKPGAGMDDMISDMGGSATMVATIIAAARLGVKLNVTATIPLAENMPGGNAFRPGDVITHYGGITSEILNTDAEGRLVLADAIARASEDKPDYLLNVATLTGAQIVALGDRTSGVMGSDEFRDSVALTGRTVGEPAWAMPLPEEIGEDVKSPVADIRNVTGSRSGGMMAAGWYLSHFVGEGIEWAHVDIAGPAYNKAGVYGYIPKRATGVPVRTFVQVLSNLAEQ

SEQ ID NO: 53769 - protein, 599 aa, Cornyebacterium diptheriae
MLRTHLAGDLGKETAGQTVTLTGWVSRRRDHGGVIFIDLRDSSGLVQVVFRENDVAEQAHHLRSEFCIKVTGEVEARPEGSENPNLASGAIEVNVTDLEILNEAAPLPFQIDDVSQGGEVGEETRLKYRYLDLRRPNQGAALRLRSQANKAARNVLDSHDFVEIETPTLTRSTPEGARDFLVPARLKPGSWYALPQSPQLFKQLLMVAGMERYYQIARCYRDEDFRADRQPEFTQLDIEMSFVDQDDVIALAEEIVSSLWKLIGYEIPTPIPRMTYADAMRLYGSDKPDLRFDIKIVECTDFFKNTTFRVFQNEYVGAVVMDGGASQPRRQLDAWQEWAKQRGAKGLAYILVGENGELTGPVSKNITDEERAGIAAHVGAKPGDCIFFAAGETKSSRALLGAARNEIAKKLDLIKEGDWAFTWVVDAPLFEPSSDATASGDVALGHSKWTAVHHAFTSPKPEWLDSFDENPGEATAYAYDIVCNGNEIGGGSIRIHRRDVQERVFKVMGITEDEAREKFGFLLDAFAFGAPPHGGIAFGWDRIVSLLGGFSSIRDVIAFPKSGGGVDPLTDAPAPIPLEQRRETGVDFKPKKKTDESAV

SEQ ID NO: 53770 - protein, 673 aa, Cornyebacterium diptheriae
MNLFHIGTEFRRFGHGKLPPIAIVVIMLMPLLFGGLFVWSYWDPIGHLNKLPVAVVNSDTGVTKEGKTINAGEQITHSLVDQQQAKFIEVSADQARKGIADGTYYFAIEFPTDFSQAATSVKDPQPHQAKLNAVYNNANGFLATMLGNQVVGRVLAAVNENLGSQVANQLLVGFNTIGQGLGAAADGAGQLADGSHKAHDGADKLADGSTQLNNGLQQANDGAHKLYDGAGQLDQGIHTASNGADALADGLTKLNAATDTLGNGAGQVSAGVDKLVGVAQQASDAQAQLTVPLVNLSAQLRATGIPQAIDLANSADGIINSINAAGIGPQSDMMTQLSKLRNGASEIHRQLSDPTAQYRAGINSATEGAQKLSTGLHQLSDGSEKLVIGTKTLADGTTKLSAGSQQLTVGASQLSSGLVRLDEGASELSLKLGESKDKIPQFPDDTIADSARNVSTPVAENVARDSLSLFGLGLAPMFIALGLFMGGTVTFMLMRPLQRRVVDSGVTPFRVVLASYIPAVIVGFCQATIMFLVQRYAIGLHAHNEFLLWAAMCLTSMCFMAITQGLNTVFGSTVGRVLCIAFMSLQIVSSGGLYPPETQPAPLRWFHTFDPMTYSVNILRQAIYPTDVALDHRAVQGVSVLIFIGALFLLFSTIAAMRERQMKMKDFHPEVAV

SEQ ID NO: 53771 - protein, 649 aa, Cornyebacterium diptheriae
MAHSVVMPELGESVTEGTITQWLKSVGDAVTADEPLLEVSTDKVDTEVPSPVSGVLLEIKFEEDDTVDVGDVIAIIGEEGDAPAAKEEPAEEPKAEAPKAEAADSTDVVMPELGESVTEGTITQWLKSVGDTVDVDEPLLEVSTDKVDTEVPSPVAGTILEILFNEDDTVDVGDVIVRVGTPGSAPAAKEEPAKEPKAETPKEEPKAEAPKAEAADSTDVVMPELGESVTEGTITQWLKSVGDTVDVDEPLLEVSTDKVDTEVPSPVAGTILEILFNEDDTVDVGDVIVRVGTPGSAPAAKEEPAKEPKAETPKEEPKAEAPKAEPKKEAPAKTINNENVPYVTPLVRKLADKHGVDLTTVEGTGIGGRIRKQDVLAAAGVGAAPAAQVAPAQPVSAASTKSVDPEKQKLIGTTQKVNRIREITARKTVEALQISAQLTQLHEVDMTKVAELRKANKPAFQEKHGVNLTYLPFFAKAIVEALVAHPNVNASYNAETKEMTYHADVNLSIAVDTPAGLLTPVIHKAQELSLPELAKAIVDLADRARNNKLKPNDLSGGTFTITNIGSEGALSDTPILVPPQAGILGTGAIVKRPVVITEDGIDSIAIRQMVYLPLSYDHQIVDGADAGRFLTTIKDRLETANFEGDLELS

SEQ ID NO: 53772 - protein, 237 aa, Cornyebacterium diptheriae
MQLNYSTITGVTRDDLEDEGAWLYAEVVRKIHELNPHTGVENLTPDFSGKPDLLQEVFEARPEVFAHNLETVPRIFKRIRPAFRYERSLDVIRQARDFGLVTKSNLILGMGETVDEIRDALVDLHSAGCDIITITQYLRPGPMYHPIDRWVKPEEFIDHADFARELGFGAVMSGPLVRSSYRAGKLYAEALAARGESLPENLAHLATTADGSTAQEANTLLEKYGPSQDTPVVSSKA

SEQ ID NO: 53773 - protein, 372 aa, Cornyebacterium diptheriae
MAPRKNSKTQQPTGDNRKKALDAALAMIEKDFGKGAVMRLGDENRPPISAISSGNTAIDVALGIGGFPRGRIVEVYGPESSGKTTVALHAIAQAQKAGGIAAFIDAEHALDPDYARKLGVDTDALLVSQPDTGEQALEIADMLVRSGAIDIIVIDSVAALTPKAEIEGEMGDSHVGLQARLMSQALRKMTGALYNSGTTAIFINQLREKIGVMFGSPETTTGGKALKFYASVRCDVRRIQTLKDGQDAIGNRTRLKVVKNKVSPPFKIAEFDIMYGEGISRESSIIDLGVDNGIIKKSGSWFTYEGDQLGQGKEKVRLYLKETPELADEIEDKIFRALHIGKYAALKDADDALTDDPVDMVPNVDFDDSDDD

SEQ ID NO: 53774 - protein, 423 aa, Cornyebacterium diptheriae
MSKKKLQTIQAPKGVPDYIPPVSPEFLGVRDTFAHQAHLAGYEHIELPIFEDTTLFARGVGESTDVVTKEMYTFADRGDRSVTLRPEGTAGVMRAVIEHNLDRGQLPVKLNYYGPFFRYERPQAGRYRQLQQVGVEAIGVDDPALDAEVIALADRSLKVIGLTGYRLELTSLGDHTCRPQYREKLQEFLFKLPLDEETRHRAEINPLRVLDDKRPEIQEMTVDAPLMLDNLSDSSREHFELVTGMLDDLNVAYVVNPRMVRGLDYYTKTTFEFVHDGLGAQSGIGGGGRYDGLMAQLGGQELSGIGYALGVDRCLLALEAEQKRVTDGSRVNVFGVAMGSAAKREMVRIIDALRSAGISADMAYGDRGLKGAMKGADRAGARFALVLGDRELENNCVAVKDLAQQGQRDVSLDNLILEIQSAL

SEQ ID NO: 53775 - protein, 478 aa, Cornyebacterium diptheriae
MAFTSTEDVIKYIKEENVEFLDIRFTDVPGREQRITIPASMFTEEAAEDGFAFDGSSIRGFTTIDESDMNLHPDIATAMVDPFRKAKTLNMKFFVHDPFTREPFSRDPRNVARKAEQYLASTGIADTCFFGAEAEFYVFDKVSYEIEGNRSHYEVDSDNGWWNRGVDQNLDGTHNRGYKTPFKGGYGQCAPYDTLEDLRDEMTLTLRDAGFDIERQHPECGTGSQQEINYRFNTLLHAADDLQTFKYIIKNTAFRNGKTATFMPKPLAGDNGSGMHAHQSLWKDGKPLFHDEVGYAGLSDMARYYIGGILHHAGAVLAFTNPTLNSYHRLVPGFEAPINLVYSQRNRSAAIRIPITGSNPKAKRIEFRAPDPSGNPYFGFAAMMLAGLDGIKNRIEPHAPVDKDLYELPPEEAASIPQAPTSLEASLKALEEDNEFLTDGDVFTDDLIDAYIKLKYDNEIAPVRLRPTPQEFEMYFDC

SEQ ID NO: 53776 - protein, 204 aa, Cornyebacterium diptheriae
MMQSIPLGTYVPGESVVHKTPPLVKLGILIVFIVVSTIWGTTPLRALSSCVVAVSLYFVAKIPLPVAWSQLWLPLPVLLTLGAFQWWQRGAFYSSSLVLTIYAGLMAAVLVTLTSTLASMMDALETALQPLKKYGFPVESVVLAFSLTLRLLPLMLNTVNEVLDARKARGVAFSLTALGTPVMIRSINRARSIADALMARGAGD

SEQ ID NO: 53777 - protein, 279 aa, Cornyebacterium diptheriae
MANPFSKAWKYLMALFDSKIEENADPKVQIQQAIEDAQRQHQELSQQAAAVIGNQRQLEMQLNRRLAEIEKLQGNTRQAIQLADKARAEGNIQKATEYENAAEAFAAQLVTAEQGVEDTKQLHDQALQQADAAKKAVERNAMVLQQKVAERTKLLSQLEQAKMQEKVAESIQSMNSISNRDTPNLDQVREKIERRYANALGTAELAQNSVQGRMAEVEQAGIQLAGHSRLEQIRAEMSGGQLGAGNSATQQSIESAQQATPSAADDAVARKMRELRGEA

SEQ ID NO: 53778 - protein, 1254 aa, Cornyebacterium diptheriae
MFCERREPKRLIAGFISILLTAVLGISLTSADAVAQADEINLAQKAVQEQDAREFATSMLDTSFEASRQAAVIALSGSDQDWNAYFNGGREEAQLQDLRQILTTLATVGGENVQTEANRLLQSGSVEEISSFIDIGWQDAQLKDDRAQAWQAAQAEEGTSLKTAADKALRVDTAEALSDFVAGGEDEARANDKRREVYALSDSELPTVSANAAEALRIGTDTAIDEFLRYGQYVAADQDAEHMTVSQLVDLTIQESKTATDENNKAWMQADRAARAAEAARIATEKSRDEALAADSAQQRAGNAAAAAGRLASQSANMADQAVAASHEARAALRETAAALARAAAASARAQSAAAHAASAANAAAYDANAAHGARIAAEQARNAAQAAEQSQQAFRYAEEAAGFAQSAGQAAGSAARNADAAAAAATEAANAAGESQGAADEARAGAARARAAAGRARAAASEVDRLVANIRSLVEQTRQAAKEAAEHANNSAQSADDAAREAGNAHYAAQVAGRHAQFSSQSAERARNNIQLAKDIHEQATNSAQERLQAERAFLKEQARLAREIQDVADSKKAQEKQRKDDLTTQMNELRSSLPANEGEFDPTDEALSNLRQLALNAAQVGSPSVAGAAKVALTGNTDADLIEFAFNAYPDALFEDNLNLVNHWALFDPNEDLRNAADEAGYEDDITLDEFVNITAPQMRLPGLVKKAWELRDGAGPQVQAAADSALKEGTPDALDEFVNGDGYEKARYLDQVQQAYELTDTGGPEVQIAAEAAVTGDRQQLDEFVSIGQYRRAILDSQRDAHNAEINALLSAGQNAAELASQEAANAQEAYTRATGDAQRAIQYASEAQKWAGSAQQSAQLAQGHLASAQKSLSFALEQQQRAHQAANAAAADAAQATNNADQAASYAATAQVAAQSAAQSATDARQSANAAGNDAHLASQAANDAYFAAWEKEMAELEQARSVQAEGLANVESTSILQKIKDIIGKESLDLILDLIGVTDVLKCFHGEISGCLWTAVGLLPIGKAGKLIKALPAVRKLIGRAKDIKRAIEYSPIKAALDDALIPAACATLRLSNVRFRNTAAHLGTYRTPAPGQHSYAIVASKCKYPPTVKAINGRFPINGQYAGGKWRNGDPDLMPKDWSYGDIYFTDEGFPIFDRFVAQFDANAMTFNPEAMPHGKVPDVTITPTGRSYKDIRAADAVLGIDRRYRKEHGLVWHHHQDTGRMQLINKDVHDAVKHTGGYAIWSKPLNV

SEQ ID NO: 53779 - protein, 196 aa, Cornyebacterium diptheriae
MSVKQERENTSEHSTPSNWNVPNVLTSLRIIVIPLFAWFVLQSDGHITRWLWWAFGTFVALMITDKLDGDIARAKNLVTNFGKIADPIADKALMITALVTLNIIGLVPWWITIVIVVRELGITLWRFFELKKGNVVPASKGGKIKTTLQAFAVALYLLPLPDAVQPIQFFVMLCAVVVTVVTGVQYLIDAKKLKNA

SEQ ID NO: 53780 - protein, 335 aa, Cornyebacterium diptheriae
MEVNGVTWVITIAVIAGFFVFDFFSHVRTPHEPTLKESALWSVFYVVLACAFGVFLWLTWGEPGNPHQHGIEFFTGYVTEKALSVDNLFVFALIMGAFKIPRQYQQKVLLIGIALALVFRLVFILLGAAVIQAWSDVFYLFGIFLLYTALKLIWDEVTDKPETDPSDMRIIKWLRKVVHVTPNYEKDHLYIHQKGKFALTPLFIALVAIGMIDLMFAFDSIPAIYGITQEPYVVFTTNAFALLGLRQMYFLLDGLLDRLVYLAYGLGLILAFIGAKLLLHAMHENKLPFVNGGEPIAVPEIATHWSLVVIVGILAITIVASIIKSKRDDTQGVVR

SEQ ID NO: 53781 - protein, 923 aa, Cornyebacterium diptheriae
MARTLHREHDDEEFDAVDDAFSSEETVVTNRKRKPSRMTKTKKNLFDDDIEDQHDDFDEEAGLGRFTLALSDESVDSIGLILIALAFIVGASVWFDIAGPIGAAIAAGVHFVIGAGALILPLALVAIAIALMLGKLPEPDHQPRLVLGTSVIAISMLGLIHLFAGDPADWQGRTHAGGIVGAYSGGMIARGFSVYLAIPLLVLVIIYGALRINNVTVKELFEAIQDTVQGLRDDSEDEDDPLYADADAEIEARSRGEKLHRPQPRREKPRPAPERRRMSAPLVDDVDEDVVSRPLFDDPSTAQSQKSSVETQRAARDVSETDEFPAVDEPTVVVPRKPSAPRMSLPQTPVTDVEAAADVVAAGRKAVQDAVKARESHNVGAALAPSTPAQPYEAPESHYAVPSTQLLIPGKEAKTHSEANDRMIEAISDVFAEFKVDAHVTGFSRGPTVTRYEVELGPGVKVSKITNLQSNLAYAVATDNVRLLTPIPGKSAVGIEVPNTDREMVRLGDVLNSESVHSDHDPMLIGLGKDIEGDFVAHSVQKMPHLLVAGSTGSGKSAFVNSLLVSLLTRATPEDVRLILVDPKMVELTPYEGIPHLITPIITQPKKAAAALQWLVEEMEQRYMDMKSTRVRHIKDFNRKVKSGEIQAPLGSQREYHPYPYIVCVVDELADLMMTAPKEIEDSIVRITQKARAAGIHLVLATQRPSVDVVTGLIKTNVPSRLAFATSSLTDSRVILDQAGAEKLIGMGDGLFIPQGGRPQRIQGAFVTDEEIQAVVDAAKAQGEPNYTEGVTEDKAAEAKKDIDADIGNDLEDLLQAVELVVTAQLGSTSMLQRKLRIGFAKAGRLMDLMETRGIVGPSEGSKAREVLVKPEELETTLWMIKGAKPEDAPKEDDWQSADSGVSDASDPSHGERAAYNPSSNAF

SEQ ID NO: 53782 - protein, 746 aa, Cornyebacterium diptheriae
MRSMSARLARSLTGNRVRVNSVLEPMLAIHREFHPKADAEVLNRAYATAERLHDGVFRKSGDPYITHPLAVATIAAEIGMDTTTLVAALLHDTVEDTDYSLEDLTADFGAEVARLVDGVTKLDKVALGAAAEAETIRKMIVAMSQDPRVLVIKVADRLHNMRTMRFLPPEKQAKKARQTLEVIAPLAHRLGMASVKWELEDLSFAILYPKKYDEVVRLVADRAPSRDRYLNQVIAQLTSTLKENHIDAEVMGRPKHYWSIYQKMIVRGKDFDEIFDLVGIRVLVDNVNNCYAAIGVVHSLYSAMPGRFKDYISSPKFGVYQSLHTTVMGDGGKPLEVQVRTHEMHYNAEFGIAAHWRYKETKGKNSGEQAEIDQMAWMRQLLDWQKEAADPNEFLDSLRYDLTSKQIFVFTPKGDVVNLPVDSTPVDFAYAVHTEVGHRCIGAKINGKLVALESKLKSGDRVEIFTSKDQNAGPSRDWQDFVVSPRAKAKIRQWFAKERREEYLEVGRDALATEVQRGGLPMHRLFTAQSMKQVATELHYPDVDALYTAIGSGSISAAHVANRLIAAFGDTEDAENTLVSRTPFSELVSSKSQVTDKNGILVEGSPDVMAKLAKCCMPVPGDEIFGFVTRGGGVSVHRTDCTNADSLRNEPERLINVQWASEGGSVFAATLQLEALDREGLLMDLTRVINEQRVQVVAMSSHASDDHVATVRFTFSVSDTKQLGSLMTQLRNTEAVFDVYRVTSGG

SEQ ID NO: 53783 - protein, 227 aa, Cornyebacterium diptheriae
MSYSQHDPHVAALLDHTSELPAAERAYLYLKQQITHGHLSDNDMISEGDIGKVLSLSRTPVREAFLRLETEGFLRLYPKRGALIVPLGAEDIRDIYESRYLIEAHSAQKVAQLPSAQRTAIVAALEATIEKQEEALSRERLDLYTDFDAEFHQHIMKAAGNEILAHLYNSLRDKQARITSRIVTRNADNAQVFVQGHKQLTLAIRDGNSDTYQQVLSEHLATSQHQF

SEQ ID NO: 53784 - protein, 684 aa, Cornyebacterium diptheriae
MTEPRSRARKVTRKAGPPEAAETPVFQAPDSTATAEPADSAVKNSEKAEKDSSAESSRNNRGRNAQRGGRNRRGNGSSNRSSQSKNNQSNNRGRRTPVKSMQGADLTQRLPEPPKAPKNGLRIYALGGISEIGRNMTVFEYNNRLLIVDCGVLFPSSGEPGVDLILPDFGPIENKLDKVDALVITHGHEDHIGAIPWLLKLRPDMPILASKFTMALIAAKCREHRQRPKLIEVNEKSDINRGPFNIRFWAVNHSIPDCLGVAIKTGAGLVIHTGDVKLDQTPPDGRPTDLPALSRFGDEGVDLLLCESTNATVPGFSGSEADVAPTLKRLISDAKQRVILASFASNVYRVQAAVDAAVAAGRKVAFNGRSMIRNMEIAEKMGYLKAPRGTIVSMDDAAKMAPHKVVLITTGTQGEPMAALSRMARREHRQITVRDGDLIILSSSLVPGNEEAVFGVMNMLSQIGATVVTGRDAKVHTSGHGFAGELLFLYNAARPKNVMPVHGEWRHLRANKELAISTGVEADRVVLAQNGVVVDLVDGRARVVGQMQVGHLYVDGVTMGDIDAEVLEERTSLGEGGLIAITAVIDSRTARLLERPTVQAKGFSEDAVAMMPEVTELVEKTMNDLAAEGENDPYRMVQQLRRRVSRFVEQKWRRKPMIMPTVIPTTSATIDIDDADVRASRESQ

SEQ ID NO: 53785 - protein, 482 aa, Cornyebacterium diptheriae
MKYISTRDASSTPAHFTDILLGGLAPDGGLYLPEQYPQLTEELLEQWRTLLEDKGYAALAAEVLKLFIDDISAADIEKITARAYTTPKFSDEDIVPVTKLENNIYIGHLSEGPTAAFKDMAMQLLGELFEYELGRRGESLNILGATSGDTGSSAEYAMRGRKGIRVFMLTPAGRMTPFQQAQMFGLDDPNIFNIALDGVFDDCQDVVKAVSGDSEFKKNYRIGAVNSINWARLVAQVVYYISSWLRVTDSNDQKVSFCVPTGNFGDICAGHIAKQMGLPIDRLIVATNENDVLDEFFRTGDYRVRSSADTYETSSPSMDISRASNFERFVFDLLGRDAGRVADLFGVQVKQGGFSLAQDPAFAEAANRYGFASGKSTHADRVATIADCYENRGMMIDPHTADGVKVARDWACDIDSPIVCLETALPVKFADTICEATGREPEMPERFANIMDAQRRVTDLPNDVSVVKDFIVTSIEETEKTQ

SEQ ID NO: 53786 - protein, 248 aa, Cornyebacterium diptheriae
MAIKVGVLGAQGRVGQAIVAGVTAAYDLELVAEVDRGDSLDVLVQSGAEVIVDFTTPDSVMDNLEFCISHGIHCVVGTTGFTPERLEIVKKWAEEKGNTGVLIAPNFAISAVLTMAFARQAARFFDSAEVVECHHPNKLDAPSGTAIHTAEGIAQARREAGMPTQPDATEQSLDGARGADVGGVKVHAVRMTGMVAHEEVIFGGPGQSLTIRQDSYDRTSFVPGVLVGVRNVAQHLGLTVGLEHYLDI

SEQ ID NO: 53787 - protein, 755 aa, Cornyebacterium diptheriae
MSTKPSNVVFNIDEEFGITEAIATIDNGDFGKRTIRFETGQLARQADGSVTTYLDDDTMLLATTTASNQPREGFDFFPLTVDVEERMYAAGRIPGSFFRREGRPSTEAILACRLIDRPLRPTFVKGLRNEVQVVITVLSVNPQDMYDVVAINGASAATQLSGLPVSGPVGGVRMALIADDAHPKGQWIAFPTHEQHEQALFELVVAGRIVSKKQGKKTVDDVAIMMVEAGATEQVVDRVKAGAPAPTESVVAEGLEAAKPFIEVLCRAQAGLAERAAKETQEFPLFPPYTDVVYDAVEKKVSKKLRSLLTIKSKQDRDEATNAYMEEIEADLIAQLGSDDEAAASKAIRAAYNAVMKKIVRHMILTEHFRIDGRGVTDIRDLGVEVDLIPRAHGSSLFERGETQILGVTTLDMLKMEQQIDSLTPATSKRYIHHYNFPPYSTGETGRVGSPKRREIGHGALAERALVPVIPSREEFPYAIRQVSEALGSNGSTSMGSVCASTLSLYNAGVPLKAPVAGIAMGLVSDEVDGETRYVALTDILGAEDAFGDMDFKVAGTRQFITALQLDTKLDGIPSEVLAQALSQANDARNTILDTMAEVIETPDEMSDYAPRITAITVPVNKIGEVIGPKGKTINSITEETGANISIEEDGTVYVSAASGAAAEAAIEKINAIANPQLPKVGERFLGTVVKTTAFGAFVSLLPGRDGLVHISKLGGGKRIEKVEDVVNVGDKLEVEILDIDNRGKISLAPVKNED

SEQ ID NO: 53788 - protein, 89 aa, Cornyebacterium diptheriae
MALSTEQKKSILAEYGLHETDTGSPEAQVALLSARINQLTEHLKFHKHDHHSRRGLLLLVGRRKGLLKYLADNNVDRYRDLIARLGLRR

SEQ ID NO: 53789 - protein, 345 aa, Cornyebacterium diptheriae
MSTITRPESARASFIDDSLWLKVDQVDIWHRLEDIPADLKASVITIGVFDGVHRGHRTLVAAATDRAQALGVPSVLVTFNPHPLSVLRPDKMPPLLGTVNQRADLAESLGVDHMFAMNFTAELSHLSPEEFFCSVIKDKLNAQAIVVGKNFTFGYKAAGTTDTLKALGEKYGVEIYVLDLLTENGDVVSSTAIRSDLLEGDIRRANWGLGREFSVHGDVVRGAGRGGKELGFPTANLYFPDSIALPEDGVYAGWLTVTSSAPIDGDMVRGVRYPAAISVGHNPTFGDKRRSVESFVLDRHADLYGHSIVVEFVDRIRPMVKFDGIDELLVAIENDVTQTRAILHI

SEQ ID NO: 53790 - protein, 300 aa, Cornyebacterium diptheriae
MNDALADSGLVIVDKPQGMTSHDVVSKIRRTFSTKKVGHAGTLDPMATGVLVLGLERGTKFLAHMVASTKSYTATIRLGAATTTDDREGETITSASPDQLAGITETKISDAVKQFRGSIMQRPAAVSAIKIDGKRAHQRVREGEKVEIPARPVTISRYDILEIRRDAAFIDIDVEVDCSSGTYIRSLARDLGEELGVGGHLTALRRTQVGPFTLDNAVTLEKLEENPHVSLTLDQALAASYPVLSVSEKEASDLAMGKWLTPRGLKGIHAAVDPHGRAIALVKEQGKRLATIFVARPSTL

SEQ ID NO: 53791 - protein, 377 aa, Cornyebacterium diptheriae
MKVIIEADGGSRGNPGIAGSGTLIYNADRSQVLKEYSYVVGKATNNVAEYHGLLNGLRGAAELGATEVSVRMDSKLVVEQMSGRWKIKHPDMKELALECKKVASSIGSVSYEWIPRSENSHADALANKAMDALAEGAAVGFLELEEPAAKTDSEEKVVETATSPAVWNGATTQATRFVLLRHGQTAMSAARQYSGRSNPELTSVGLEQARRAAAFIGRRGGIDAIVASPLQRCQQTAHEVSEQLGGMPVRTIDGLIEMDFGQWDGLSFSQAHEADPELHSAWLDDSRTAPPGGESLQQVHRRVKKVREELERKYAGKTIVVVSHVTPIKSILRQALDASASMFHRMHLDLASISVAEFYSDGPTCVRSVNDTHYLYG

SEQ ID NO: 53792 - protein, 511 aa, Cornyebacterium diptheriae
MIAESSPLMDLVDVSRWQFGITTVYHFLFVPLTIGLAPIVAAMQTAWFITKKDMWLRSTKFFGTLFLVNFAMGVVTGIVQEFQFGMNWSEYSRFVGDVFGAPLALEGLIAFFIESTFLGLWIFGWGRLPKAVHLASIWLVAIAVNVSAYFIIVANSFMQHPVGARFNPETGRAELVSLGKLLANPTALAAWPHAVTGSLLTGGTFVAGIAGWWMIRERLAQRTEDAAFWRKNFRLGAWTTLASVAGLSLTGDIQGKLMFVQQPMKMAAAESLCETELDPSFSVLSVGTHNNCESVKHLIDVPGVLSILSQNKLSGVTLEGVNQLQEKYEALYGPGNYVPNLFVTYWSFRAMIGLMAASVVLAIVGLWMTRKGRIPQLRWLGTAALIAVPFPFLANSAGWIFTEMGRQPWIVAPNPEATPGSPDGEDLIHLIVDFGVSSHPTWVVWTSLIGFTLVYGSLACVWFWLMKKKVVAGASEDSSSMLGYGPHSSDHDESPADDLLHLGAHATEGKE

SEQ ID NO: 53793 - protein, 383 aa, Cornyebacterium diptheriae
MQVTLTIGSLALDSVVALAPMAGVTNIAFRTLCREQELERTGTVSGLYICEMITARALVERNEKTLHMTTFGPQEDIRSLQLYTVDPEYTYKAAKMIAENNMADHIDMNFGCPVPKVTKRGGGSALPYKRRLFGNIVAAAVKGVEGTDIPITVKFRMGIDDDHLTYLDAGRIAAEEGAAAVTLHARTAAERYSGDAHWDAIGTLKEHMRDSGIPVLGNGDIFKAEDAKAMLDASGCDGVVVGRGCLGRPWLFAGISAALRGEELPPEPTLGEVTRIIYRHAELLAEHDGEKKASRDMRKHMGWYMRGFPVGGEFRGALARINSLAELREVLAPFADSNALAADSDSARGRQGSPAKVALPDGWLADPDDATVPEGAEIMHSGG

SEQ ID NO: 53794 - protein, 606 aa, Cornyebacterium diptheriae
MIGGVRLPDGGGATIRLARGASLSDFAEKINADAAALVQALFNLGEMVTATASVNEETLQLLGEEMNYKVEVVSPEDEDRELLESFDLQFGEDEGTEEDLAKRPPVVTVMGHVDHGKTRLLDTIRKTNVGSDEAGGITQGIGAYQVTVNIDDLSRKITFLDTPGHEAFTAMRARGAKSTDIAVLVVAADDGVMPQTVEAINHAKAADVPIVVAVNKIDKPGASPDKIRGQLTEYGLVPEEYGGDTMFVDISAKQNINIDGLLEAVLLTADASLDLRANPDMDAQGVAIEAHLDRGRGPVATVIVQRGTLRVGDSVVAGDAYGRVRRMVDEYGNDVEEAGPSRPVQMQGLNGVPGAGDNLLVVEDDRVARQIANQRNARKRNALAAKTRKRVSLEDLDSVLKETSTLNLILKGDNAGSVEALEDALLKIEVDDEVQLNIIDRGVGAVTQTNVSLAAASDAVIIAFNVRAEGKATEEANAEGVDIRYYTVIYRALEEVEQALKGMLKPIYEEREIGRAEIRAIFKASAVGLIAGCMVESGKVRRNASIRLLRDGTVVADNAKIESLRREKDDATEVAAGYECGMVLSYPDIQVGDIIEVFEQVEVPRT

SEQ ID NO: 53795 - protein, 332 aa, Cornyebacterium diptheriae
MNIDVQALKAIEADRNIAVDELLETIARALLFAYQEYKDTNTVENSRARVDINSVTGHVSVIVSELDEDGVVTTEYDDTPENFGRVGAQAVRDAIVRRLREAETLKAYDAYSEYEGRVVSGIVQADIFANEKGIVVIHLGTEVDGQDGILIPAEQIPGESFKHGDRVKAYVVGINRTPRDLQINLSRTHPELVRRLFELEVPEVADGSVEIIGIAREAGHRSKVAVKATVKGLNAKGACIGPRGQRVNNIMNELGGEKIDIIDFDDDPAKFVGNALAPSKVVHVEITDAEAQTAQVTVPDYQLSLAIGKEGQNARLAARLTGWKIDIRSDAS

SEQ ID NO: 53796 - protein, 585 aa, Cornyebacterium diptheriae
MITRLSTLFLRTLREDPADAEVPSHKLLVRAGYIRRTAPGVYTWLPLGLRTLRKVETVVREEMDAIGAQELLFPALLPREPYEQTHRWTEYGDSLFRLKDRKGGDYLLGPTHEEMFASAVKDMYSSYKDFPVTLYQIQTKYRDEERPRAGILRGREFVMKDSYSFDMSDAGLEDSYQRHREAYQRILDRLGVEYVICAATSGAMGGSASEEFLAVSDNGEDTFVRATEGPYAANVEAVVTQPGVERPLEQAPEAVEYETPNAETIEALVQWAQSAGVTVEDRSVAAADTLKCLLVKITQPGAEEAELAGILLPGDREVDMKRLEASVEPAEVELASEEDFKNNPFLVKGYVGPRALNAHGVKVLADPRVVSGTSWIAGADAVEHHVVGLTMGRDFTVDGYIEAAEIREGDPAPEGQGTLTLARGIEVGHIFQLGRKYTEAFDVQILDESGKRAIPTMGSYGIGVSRLMAVLAEQRHDETGLNWPLEVAPYQVHVVVANKDKEAIEAGDALVAALDSHGIEVLFDDRPKVSPGVKFKDAELLGMPFVVVLGRAFKDGNIELRERGQETVLVSADEIVDTVVAKLNR

SEQ ID NO: 53797 - protein, 218 aa, Cornyebacterium diptheriae
MQQADVILADHLGPASELAQLCDVSTKDIIDVSKLPYGKQVAQSKINELLIEHAQAGKKVARLKGGDPYIFGRGFEELQACAKHGIACEVVPGVTSAVSVPALAGIPITQRGVVHSFTVISGHVPPQHPQSLNDWEALARTGGTLSVIMGVKNAGAIAQALIDAGRGADTPVAVVQEGSTENQKSFKTTLAQLGQAMKDNDIKPPAVYVIGEVAGLQA

SEQ ID NO: 53798 - protein, 166 aa, Cornyebacterium diptheriae
MPIPKIQLDHLNIYYGDFHAVRDVNLEILANRVTAFIGPSGCGKSTVLRSMNRMHEVTPGARIDGRVLLDGRDIYASDADPVMVRSSVGMVFQKANPFPTMSIADNVVAGLRLTGVKDKKRLAEVIERALRGANLWEEVKDRLAKPGGGLSGGQQQRLCIARAIAT

SEQ ID NO: 53799 - protein, 341 aa, Cornyebacterium diptheriae
MTSTLPTLRQTDGTLRPQSPEQPTKHHTPKRRRYADRILEGLTRGSAITIITVVIAIGAFLLWRAIPAISNHPGGLLGFLTYAGNWNVATTSAMLFGIPNLLATTVLISALALMVAMPVALGVSIFLNFYSPRMLRTPLGFLVDMVAAVPSIVFGLWGWQVLGPALSGVYEWLARVTNGFFLFHVYPNSPAFATGRNILTGAVVLSVMILPVIAATTREVLAAVPRSHVEAALALGATKAEMIRMAVLPFGRNGFIAASMLGLGRALGETMAIYLIVSPSSQFRFSFFDGGTTFATAIANAAPEFNDDLRAGAYIAAGLVLFIVTFVVNSLARLIAQKSSR

SEQ ID NO: 53800 - protein, 350 aa, Cornyebacterium diptheriae
MFAFGDKVGGVRALIVSNPNSTTQSAEMFRHVIPTLRAVPGLELRAQMTHYAGHARHMCENLTVEDYDVVIAVGGDGTVNEVINGLLGDLPSAPPALAVIPTGSANVFARALGLPADPAQAAEVLADALHKGSTRRINLGKWGSQWFAVNAGFGIDADVIASVERVRRRGFAATPLRYAHAAIRSWLKLHRHAPRMSVRAINRNGEEFVHDDLPIVIASNTNPWTFLGPLPVVTNPRNSFDLGLSLWAITDLRGIGGVASMAHLVGIGHNKVIADVLQRRTLMFDDATEVSIVCHKNQRFQADGEYVGQFDEVTLKAVADAIEVYAPTEPVKPTPLSMLKVGLSFFDPRL

SEQ ID NO: 53801 - protein, 350 aa, Cornyebacterium diptheriae
MLSNRESKKIAVIVNDFSEINIDAALIAGEGHLERGEDKFVELTNGCICCTLRDDLVQSVGALASSGDYDHIVIESTGISEPMPVAATFEWVWDDGTRLADIAPIDTMATLVDASQFLTYMGKKTYLTDRDLGVTEDDERTIADLLVDQVEFADKIYITKSDLVDDERYHATKALVRRMNPRASIDKLVNGRVITASGENRNAINDLLGAMCYDEETARTYQGYVAELDNPHTPETEEYGISSFVFKGDRPFDRQRLIAALRSTRGIVRSKGHCWISDRIDMVQVWHQAGPDLRIAPAGYWQSAGITPSNEIVVIGVNFDHAQAQQLLNDAMLSDSEVQQLLSTADAAKS

SEQ ID NO: 53802 - protein, 135 aa, Cornyebacterium diptheriae
MSELVGLIHRDLRPLSMREAEVSLSIQNVISAYYDGRFARILTVPLLQQATDFRMSVWSALRRIPSGSPVSYATLARMSGHEGAVRAAASACANNPVALFVPCHRVIRSDGSYGGFRYGLAVKRSLLTREVAHNK

SEQ ID NO: 53803 - protein, 392 aa, Cornyebacterium diptheriae
MKTCLSPCPSLCPLKHAHLGCTIYFVTNPESLATYSSPLLNLPGAAEPQGGNEIPEYTGVAWHYGQPLVEQRYFERSGGFVDRSHRGVLCISGEDAAVFLNNLVSQKLIDLPHPWAGEALDLDIQGHVVHHMEIIATDEVFYVHVPAAQLESLHTFFTRMIFWSKVTIEVIDAAVISVISAQHLDALVDVPLPEALAVSPVIDFSLPRRDILVPRASLMAVAASLQEHGFQPAGMMAYTAARVRSVQPVMSLDMDATTIPHEAASLIGRGDHIGAVHLNKGCYRGQETVGRVENLGRSPRVLVMVLIDGSAPEQPHPAAPLTAGGRTVGFLGTVVDDFELGPIGLAVVKRSALKSATLQAGDDVALSIDPDSLPHDDGEKAGRVAINKLRGL

SEQ ID NO: 53804 - protein, 267 aa, Cornyebacterium diptheriae
MVESWPVEQCSAAVVTSDEVTTAGDGNIRYELASVTKLLSTYAVLIAVEEGAFALDTPCGPEGATVRHLLAHASGVGFRSTDACKAPEQRRIYSSYGFELLADVIAHEADMPFAQYLDEAVCQPIGMTHTQLWGSAGHESYSTVNDLVLFAREILQPSLIAQETLVQACTVQFPELHGIVPGYGMYKPCPWGLGFEIKGEKNPHWTAAVMPHTTVGHFGQAGTYLWVDRESQRAMVALTNRSFGDWAKPLWAETNAGVWEHLDQLNL

SEQ ID NO: 53805 - protein, 499 aa, Cornyebacterium diptheriae
MADSTTAQHVTDEVDVALIGAGIMSATLGAMLRTLEPGWTQVMFERLDAPAQESSSPWNNAGTGHSALCELNYTPEVKGRVQIDKALGVNEKFQISRQFWSYQVNEGVLPSPREWINPVPHVSFGRGEDQVAYLKKRYEALAAHPLFPNMQYTDDRAKFAEMLPLMADGRSEFEKVAISWTDAGTDINYGSQTRQFLKAAEKNGTEIRYGHEVKDIKRDGAKWRVTVKNVHTGDTQVIRANFVFVGAGGMALPLLQKTGIVEIRGWGGFPVSGQWLRCTNPDIIEQHAAKVYGKASIGAPPMSVPHLDTRVIDGEKGLLFGPYAGWTPKFLKKGSYLDLFKSIRPTNLMSYLGVGAQEFGLTKYLITEVMKDQAARMESLREYMPNAKDEDWELVTAGQRVQAIQPVVGPRFSTLAFGTSLINSADGSVAGILGASPGASIAPAAMLELLERCFGQKMVEWGPTIKDMIPSYGIRLATDQKLFNEIWDHTQATLQLDKK

SEQ ID NO: 53806 - protein, 230 aa, Cornyebacterium diptheriae
AHDHNATSPMVEYRRWIYDRGPRPITRGWFHLVASWCALVSGSVLSTYAFIYRPWPQALGVLTYAIGVVALFGVSAAYHRGRWKTPEAVAWWRRADHATIGVFIASTYTPLCLIALPQSLWVLYLAWAGAAGALILSMVWITHPRWLAASIYIALGWLITPLIPALWRAEGAAVVWLLFIGGIVYSAGAIVYAMRWPGRNATIMGYHEIFHAATIVAAIIHLVAVWMVVV

SEQ ID NO: 53807 - protein, 632 aa, Cornyebacterium diptheriae
MAGKGRIPDSDIQAIRERTPIEEIVGEYVQLKPAGADSLKGLSPFKEEKTPSFHVRPNHGYFHCFSTGKGGDVFSFLMEMEQLTFPEAVEVCAEKIGYQINYQGGTTGARREEPGTRKRLIEANRVAHQFYRQQLETPEAAVARQFLLDRGFSQQHIYGFECGYAPEGWDTMTKFMLRKGFEFKELEAAGLSTMGRRGPIDRFHRRLLWPIKSVSGDVIGFGARKLFDDDKLGKYMNTPETLLYKKSKVLFGLDLAKKSIASQHQAVVVEGYTDVMAMHAAGITTAVAACGTAFGEEHLQILRRYMLDDAYFAGSLIYTFDGDEAGQKAAMRAFEGDQKFSGQSYVAVAPDGMDPCDLRLAKGDAAVRDLVAQRVPMFEFIIRTLISEYPLDSVEGRLQALRRAVPIVASIRDRALKTEYARLLAGWVGWPDPNEVLQQVRAEERRPKTQPRQRRATRIDSNSQPAMIQSMLVMPDRKEPRLWPQREALKIALQYPEHAGEYFDSLPDDAFTHESYAAVRKAIVAAGGCSDAIRGSTWLDAVRDNVYDMVGKSLVSELAVEHIILDEWGLAAHTDTTLARLMEQRIGNQIAQLKGAMQRMRPSEDMQAYNSLFADLVALEQTRRELLEKIFK

SEQ ID NO: 53808 - protein, 595 aa, Cornyebacterium diptheriae
MEYRGYDSAGVAVVADGAVSFRKKAGKVQALEQELETSPMPQSCLGIGHTRWATHGGPTDANAHPHVVDGGKLAVVHNGIIENFAELKSELLGFGHNFVSETDTEVAATLLGHIFNNEANKDLTRAMQLTCQRLEGAFTLLAIHAETPDRIVAARRNSPLVIGVGEGENFLGSDVSGFIDYTKNAVEMDNDQIVTITADGYHITDFQGNHAEGKPFVVEWDAQAAEKGGYEFFMEKEIHEQPAAVRDTLMGRFDESGKLTLDELRIDESTLRSIDKIIVIACGTAAYAGHVARYAIEHWCRIPTEVELAHEFRYRDPIVNEKTLVVTLSQSGETMDTLMAVRHAREQGAKVIAICNTNGSSIPRESDACLYTHAGPEIAVASTKAFLAQITATYLLGLYLAQLRGNMFADEVNAVLGELRTIPDKVSAVLDGVEDQVKTLAQDMKDATSVLFLGRHVGFPVALEGALKLKELAYLHAEGFAAGELKHGPIALIEEGQPVFVIVPSPRGRDSLHAKVVSNIQEVRARGAITIVIAEEGDDAVEAYANHIIRIPQAPTLMQPLLATVPLQIFACGVAAAKGFDVDQPRNLAKSVTVE

SEQ ID NO: 53809 - protein, 461 aa, Cornyebacterium diptheriae
MAQNNVIDTVVNLCKRRGLVYPCGEIYGGTRSAWDYGPLGMELKENIKKQWWRTFVQARADVVGLDSSIILPRQVWVASGHVATFTDPLVESLHTHKRYRADHLIEAYEAKHGHAPENGLADVPDPETGQPGNWTEPQMFSGLMKTYLGPVDNEQGLHYLRPETAQGIFVNFKNVMTTARMKPPFGIAQVGKSFRNEITPGNFIFRTREFEQMEIEYFVPEELADQKFNEWVDDCWNWFVDLGINPDNMRRFDVPEEDRAHYSKGTIDMEYKFGFQGNPWGELMGVANRTDYDLGCHIKESGEDLSYFDQTTGERYVPWVIEPSFGLTRALMAFLVDAYCEDEAPNAKGGVDKRVVLKLDPRLAPVKVAVLPLSKKDTLTPVAEEVAAKLRQFWNVDYDTSGAIGRRYRRQDEIGTPFCVTVDFDTLEDNAVTVRERDTMTQERVALADLQSYLAARLIGC

SEQ ID NO: 53810 - protein, 479 aa, Cornyebacterium diptheriae
MSYVAEKKKIANVLSNRYASAELTELWSPEAKILLERQLWIAVMKAQKNLGVDIPTEAISAYEAVIDRIDLDSIAQREKITRHDVKARIEEFNALAGYEHIHKGMTSRDLTENVEQLQIYRSLEMMRNKSVSVAAAIAQHAAQYQSLVMAGRSHNVAAQATTLGKRFASAAEEILVAIDRVEDLLSRYPLRGIKGPMGTAQDMLDLVGGDESKLAALETQIADHLGIARVFDSVGQVYPRSLDFDAVSALVQLGAGPSSLAHTIRLMAGNETVTEGFKEGQVGSSAMPHKMNARSCERVGGLQVILRGYLTMVADLSGQQWNEGDVFCSVIRRVALPDAFFALDGMYETFLTVLAEFGAFPAMIDRELERYLPFLATTRILMAAVRVGVGRETAHEVIKENAVAVALNMRENGGEQDLIDRLAADERLPMTREQLDEALADRHAFIGAAESQVARVVDRVNDLVRRYPAAAQYTPGDIL

SEQ ID NO: 53811 - protein, 378 aa, Cornyebacterium diptheriae
MFPSDRSHVDPFRVMQILGEAQSRDDALLLCVGQPSTGAPRAVIERVHSRIDASALGYTATLGIPELREAIAQWHAQKYGIDTAARNVVVTTGSSGGFVALFLAALDHGDPIAMTRPGYPAYRNALTALGAKIIDLPCGAETRFQPTVEMLEACVEKPKALIVTSPDNPSGTIIDGAELARITDWCERNSCLLISDEIYHGITYGRECHSAREYSDKAVVVGSLSKYFSMTGWRLGWLIVPDELVEALDNLQANLALCPPAVSQEAALAAFGPEARAELESHVQRYARNRALLLKRLPELGLGKCAPPDGGFYLYIDVSEHTDDSEVWVRELLNATGVALAPGVDFDPVDGHRFVRLSFCGEYEEILQACERLRTFMP

SEQ ID NO: 53812 - protein, 245 aa, Cornyebacterium diptheriae
MTKQLVPPQIPQEFLPRHIALVMDGNGRWATNRGLKRTEGHKRGEAVLLDMVDACIAMGIPYLSAYAFSTENWRRSTDEVRFLMGFNRDVLRRQRDALNAKGVRVRWVGRRPRLWRSVIRELEAAEELTKDNTTMTLAMCVNYGGRAEIVDAAREIARRSAVGTLRPEEITEDSFTQFLDEPDMPDVDLFLRPSGEKRTSNFLLWQSAYAEMVYQNKLFPDYTPEDLFAAVEEYALRDRRFGGTK

SEQ ID NO: 53813 - protein, 444 aa, Cornyebacterium diptheriae
MRKTPARLVAGCFAALVLLGTVLLLLPVSREGHAQADVVTALFTATSAVCLTGLTVVDTATYWSHFGQLVILALIQVGGLGIMTLTTFAGWVLVGRIGVKGRLNAAAEGRGRELGEVTGLLIATIGFTLVVESAVAVALTLRFHAMGFDWWASLWEGVFHAVSAFNNAGFGLRSNNLMPYVGDGWIILPISAAVIVGGLGFPMLLELHRRATFRRQGQAIRRMSLTSLFTIAGTIVLLAAGTVGIAVLEWRGVLAPFDGPTKMLAAFFHSVTSRTAGFNSIDMSQLHPTSLLLTDSLMFIGGGSGGTAGGIKITTVGVLLAVMVAEIRGDDQILIRGRRIPNRTVRQALAVTMLAVLTVGVAVGLVLVLAPEFGVLDLSFEVVSAFATVGLSTGITGSLPSAAQLVLVVLMYAGRIGPVSLVAALAARSSKRQYSYPVERLIIG

SEQ ID NO: 53814 - protein, 274 aa, Cornyebacterium diptheriae
MVGEKIAITANQPETTRHPIRGIVHREDAQIIVVDTPGLHKPRTLLGERLNEVVKDTYADMDLIAITVPADEKIGPGDRWILDAVKKVAPKTPLLGIVTKVDKASRDQVAVQLMELHELLGGNSEVVPVSAVTGEQRDVLLDVITRLLPEGPKFYPDDHITDDDTETRLSELIREAALSGLKDELPHSVAVQIDEILPNDEREGVLDVHAVIYVERPGQKSILIGKDGRRLGRIIHNARPEIIKILGSNVYLDLRIKVLKNWQQDPKQLGRLGF

SEQ ID NO: 53815 - protein, 442 aa, Cornyebacterium diptheriae
MSPVVLGLITLAALLCSGLLGTVEAAVSSISLARVEQIDKDKETRASRVLLNVVEKRAEHINLLVLLKTFLDVTAAVFAVMLTLELIDNETWAVTAAIVGVALVTFTVVGVFSRTVGRKNPYTVSLSSAFLLSALAKLLGPIARLLIRIGNIIAPGPGFRDGPYNTEVELREMVDIAQEHGVVEIEERRMIQSVFDLASTTARSVMVPRTDMVWIESGKTAGQATSLCVRSGFSRIPVIGETVDDIIGIVYLKDLVQRTYYSTDSGRSVLVDDVMRPATFVPDSKNLDALLHEMQHDRNHIAMLVDEYGGIAGLISIEDILEEIVGEIADEYDDREMAPIERLNDTELPTYRVVSRLSLDDLIETIDEDLDREIEFSEEILDQVDTVGGLIAFEKGRIPLPGTTVTTSGLQLQAEGGRDRRGRIQVRSVLVSVLPVESLSEL

SEQ ID NO: 53816 - protein, 252 aa, Cornyebacterium diptheriae
MSLPVFIYNLEDLVAGKHSEIPTGNVVLDGAEGRHAVSVKRMTAGEQIKLIDGRGGWATATVASTSGKSTLNLQVFECNEEATPTPTVTVFQAIPKSERSELAVDLLTQGGADAIVPWEAHRCVAKWVGAKRSKGVLKWQQAAIAAAKQSRRTRIPEIAEPMTTAQIAEQLEQFDVVLVLHEDAAVPFATVDVSTAKSIALIIGPEGGVSPDEAEAFRKAGARAVKLGPEVLRTASAGIVALAALGVQTSRW

SEQ ID NO: 53817 - protein, 857 aa, Cornyebacterium diptheriae
  MISC_FEATURE (747)..(747): X=any amino acid
  MISC_FEATURE (788)..(788): X=any amino acid
  MISC_FEATURE (803)..(803): X=any amino acid
  MISC_FEATURE (817)..(817): X=any amino acid
  MISC_FEATURE (824)..(824): X=any amino acid
  MISC_FEATURE (832)..(832): X=any amino acid
MFSRWGDFSYRHRKVVPIVIVALILAVYTLFGARLADRMSQEGWEDPGSSSAQAAAIEHDTFGRDNDGDVILLFTAKDGIAHSPSFDKIKKYLDSLKTDHSDHVDAVTSYFDKRNAQLISKDGTTAFAAVSLRGDGEQTLKDFRAIESDLHPQFPEVTVQVAGSTAVADALDKGMSGDIKRAEVVALPVVAVLLLIVFGSVVAAGMPLIVGILSILGSLGVLSILAGFVQVNVFAQSVVTLLGLGLAIDYGLFMVSRFREELDAGRPIPDAVRITTATAGKTVTFSAAMVAVALSGLLVFPQAFLKSVAYGAISAVGLAALLSITVLPALFGMLGKNIDKWTLRRTSRKATSLRSTAWYRIPAWAMKHSALVTVGIVAVLLGLTLPLAGVKFGGINETYLPPNNTVRTAQASFDENFPHFRTEPIKLVITGATNQQLVDVYQQANKVEGLTDRFKPSSATKDGTTVLSAGIENREDNAKVVEQLRAIDAPEGVSVYIGGIPAMEVESIEALFDKLPWMAIYIVTATFLLMSLVFGSMILPAKAIIMTILGLGSTLGILTAMFVDGVGSSLFNFSAGPLMSPVLVLIMAIVYGLSTDYEVFLVSRMVEARAKGESTDEAIKYGTAHTGGIITAAALIMIVVCGAFGFSEIVMMKYIAFGMVVALLFDATIIRMMLVPAVMHLLREDNWWGPAWLKKMQVSEGGSTEHDPLHHLTVDLDTAGRSGRTVKDDAELVPFSELMKRLSEESXDADPEQQVGAISVPPCCSGDRSVSSSKQNAPSLQRATPKSXLLTTLASSSPSSPWXSPSSRWQESCGNSXGPAAATXACYGPQSXLSLPTHGPAPSPAALRSPPCTNSAP

SEQ ID NO: 53818 - protein, 166 aa, Cornyebacterium diptheriae
MDSEEPPNVRVACSGDIDEVVRLMHDAAAWMSAKGTPAWDVARIDRTFAETFVLRSELLVASCSDGIVGCCTLSAEDPEFWPDALKGEAAYLHKLAVRRTHAGRGVSSALIEACRHAARTQGCAKLRLDCHPNLRGLYERLGFTHVDTFNPGWDPTFIAERLELEI

SEQ ID NO: 53819 - protein, 578 aa, Cornyebacterium diptheriae
MAKNFAEQIVESLENQGVKRIYGLVGDSLNPIVDAVRTSNIEWIHVRNEETAAFAAEAESLLTGELAVCAASCGPGNTHLVQGLYDANRNGAKVLAIASHIPSRQIGSHFFQETHPEALFAECSGYCEMANSALQGEVILHHAIQSTMAGKGVSVLVLPGDVTMQDVEDDTFTGSRISNARPIMYPDPAEAADLVKAINEAKTVTLFCGAGVRYARKEVLELAEKIKAPIGHALGGKMYIQYDNPFDVGMSGLLGYGACHDASNDADLLILLGTDFPYNDFLPRKNVAQIDIDGSHIGRRTRISHPVVGDVAATISNILPHIEEKTDRSFLDRMLKKHHRKLNDVIEAYTSGVEKHTPIHPEFVANIIDEIAADDAVFTIDTGMCNVWGARYITPNGKREMIGSFRHGTMANALPQAIGASAANPRRQVVTFSGDGGLGMLMGELLTVKLHNLPIKTVVFNNSSLGMVKLEMLVQGMPEHETDHEHVDFDAIAAAVGIEHIKITDPAKARQQLQAAFDYDGPVLIDIITDPNALSIPPNITMDMLMGFSRAATRTVFGGGVGHMVDMAKSNLRNIPKP

SEQ ID NO: 53820 - protein, 628 aa, Cornyebacterium diptheriae
MLTSQLSKAMDSTVRSIAKILRSASALWPFYVGVVLSAITVAVLALITPFIIKDATDTIVEAVNGNMAIDNATKKVIWLSLGLLVAQLANTILNNIGGYVGDVLAAKLRQILSTRYFAQLLGMPQRYFDDQVTGTIIARLDRSITSITQALQAMANNFFPMLISVAAVLGIAATYYWPLAVLLATIIPIYMWLTSLTSKKWQVIEEKKNEQIDLAGGRFAEVVSQVKVVKSFVSEPRELRSFGEHYEETVTFTRQQSRFWHFMDTLRTGSMNLVFFAIYLVLFYRTLHGYFTLGDMVLLIQLVNMARTPMTMMSWMVDTTQRAITGSKDYFEVMERQLEPTVNPEISAATATTGLPELNTAPTKPLVPATEQPAFDFRNVSFAYNEGEEVLHNVSFHANIGQKIALVGESGGGKSTLVNLLLGLYKPTHGALNVCGQHASEISAEDLRATVGVVFQESNLFSGTVRENIAYARPDASLEEVIAVAKRANAHDFIVNFPQGYDTLIGERGLRLSGGQKQRVSVARAMLKDAPILVLDEATSALDTKSELAVQAGLEELMRGRTTLIIAHRLSTIADVETIITLKNGAVDEIGSPQELAHSGGIYAELLKLTANASDDSKEQLKRFGFHS

SEQ ID NO: 53821 - protein, 434 aa, Cornyebacterium diptheriae
MASPTSEKKLSGGAIIATALMLFSMFFGAGNLIFPPVLGANSGENFTPAIIGFLLGGVALPAITIVAMTLSGNDIRDLGSRAGSWFNLSFAIIAYLSIGAFYAIPRTGAVSYSTVIQPVMSEPSTAASVGFNALFFAVALLLSLNPTGIVDKLGKILTPALLILLVILVTLAVFKLNGTAAPATDSYREAPLTSGLLEGYMTMDSIAALVFGILVISSLRYQGGNNERQVIGAAVKASLIAAGLLGIIYLGLGYMGHIIPNGQGFADGAALLSSASQQTMGTPGQVIFGLIVLLACMTTAVGLLASTSEFFNRLIPGISYKGWLFIFALISFAVGSLGLAKVLAVAAPVITFIYPIAITLVAITVIEMLVKNLNLFWGFRLPAWTVTLWSAITVIASDTLAWAPFHDISLSWIWPALIGFVLGLSIDKALAYKS

SEQ ID NO: 53822 - protein, 1528 aa, Cornyebacterium diptheriae
MGVKLDATIAYEYPTIAALSQRLIEGAPEAATPVFTQRETQRTASHDIAIVGMAARYPGAHDIDQMWSMLIEGRDGITDLPEGRWSEYAADEVTSEKIANTDLRGGYLDDIAFFDAEFFGLSPLEAVNIDPQQRIMLELTWEALEHAHIPASSLKGKPVGVFFGSSNNDYGMLIGADPAESHPYAMTGNASSIVANRVSYAFDFRGPSVSVDTACSSSLVSVHQAVRALREGDADVAVSGGVNIMAAPFVSTSFGELGVFSPTGKIHAFSDDADGFVRSDGAGVLVLKRVEDAVADGDTILAVIKGSAVNSDGHSNGLTAPNPDAQVDVLQRAYADAGIDPRYVDYVEAHGTGTILGDPIEATALGKVLGPGRDAATPTLLGSAKTNFGHSESAAGAAGLIKVVLSMMNNTLPASLNFAGPNRYVDFDAEHLEVVEDPREWPEYSGKKIAGVSGFGFGGTNAHVVLSSYEPAADVERRHAPSLIDPDNPNAVTLEVSGLLPSRRREAAAALADFLEGRPDSDLPKVARSTAKRNHGRSRAVVTAETTEEAVKRLRTVAEGKTAMGIAVADAPSNAPVFVYSGFGSQHRLMAKKLLGVSEEFAQRIAELDELVVFEAGWSMLDIITNDEETYTTETAQVTITAIQIALTDLLASFGATPAGVVGMSMGEIAAAYAAGGLSDRDAMTIAIHRARLMGEGERSLPEDQLGAMAVVEFSVEALEEFRQQNPEFSGVEPAVYAAPGMTTVGGPREAVIKLVEKLESEGKFARLLNVKGAGHTSALDPLLGELAAETSMIEPKPLRIPLYSSVDRATVYPVGSVVHTTDYWLRCTRQSVWFQDATEQAFAHGAMMLVEISPNPVALMPMMNTAFSVGKSDAQLLFALKRKVDEVASIRDLLAKIYVTGAPISFEYGDGEIIPAPHIPWKRQHYWTSARPSSSNRVAMPGTKVTLPGGAQAFTMVADQVPSTAALIDATVTSVQPGAQVLAISETATLPATGELTTVATPNVGGVAVVVYRVIDGQTQQIAEAFATTLSAPHPPAAEVAPDSVVGTVVEVEAPEVPDNLLWDPATETVEERLRAIVSEAMGYDVADLPRELPLIDLGLDSLMGMRIKNRVEHDFQIPPLQVQTLRDASVADVVALLEELVADRGAAQPAETEIAIEHTATAAESHEVGVAPRDASERLVFATWAGITGAAAAGVTSTLPKITEEQAREIAERLTERAGVAMSAEQVQQAETLEPLANIVREGLETDVEGNIRVLRARPEGSTQPAVFMFHPAGGSSVVYQPLMRRLPADVPVYGVERREGSLEERAAAYLDEIKQYSDGLPIILGGWSFGGALAYEVAYQLQDSDVEIATIALLDTVQPAHLAPDTKEETVKRWERYSAFAKKTYGLDFPVPYELLETAGEDALLAMMAEFLSTTDATEHGLSAGVLEHQRASFVDNRILDRMDMQRWANVKIPVMLFRAERMHDGAIELEPAYAEIEPDGGWSAIVEDLVIIQLSGDHLAVVDEPEIGKVGVALTNRIEQLQGK

SEQ ID NO: 53823 - protein, 604 aa, Cornyebacterium diptheriae
MDLHKAMGQFFDAKGNIALPPQITLAGLSELFYQSDVDGGDRHCMRYWDYSTEGGVARDYNRREINTRIKSVAARLQQVAQPGDRVAILANNSPEYLFGFIGALYAGLVPVPLYDPSEPGHADHLTAVMADAQPAIVLTNNASAAAVRRFFSALPGAQRPRIISIDSLPDTLAQSYQIPTPSMAAAAINPVDLPAFLQYTSGSTRTPAGVVLTNRSIVTNVLQIFAAAQLKTPLRLVSWLPLHHDMGIILAVFVTLLGLEFEMMSPRDFIQQPKRWIDQLDRREGDNAIYAVVPNFALELAARYATPSEGLDLSAVEGLIIGSEPVTEKAVEAFAERFGPYGLNRQNMRPSYGLAEASLLVTTPQTPQRPVISYFDREQLAANRAVIVDKGDNAVALTGVGQVVRPQNLVIVDPETRTEVADGTIGELWAHGENMAAGYLDRPEDTAETFHNTLAGRLENSRAAGVPEESTKWMATGDLGVIVDGELYITGRLKDLVIIAGRNHYPQDIEYTVDHASEHIRPAAVAAFAIEGDAVEQLIILAERDLDRDPSGDAEAIDAIRAAVTEAHGVVPADIRIVAPDEILRSSSGKIARRVNKKAYQESH

SEQ ID NO: 53824 - protein, 269 aa, Cornyebacterium diptheriae
MDAAGLARSTFFYHQQRLNVPDKHIDLKEAIVEVFTRTNRRYGYRRIHAHLRQDGWNVNHKLVYKLMDELGLKSKVRAKKRYNAYQGTVSHIAENVLDRCFTPDKPNTVWTSDVTEFRIAGTKVYLSPIMDLYDRSIVSYSVSTSPNTAFTSRSLKDAITSQSPGSGLLVHTDQGIQYQHSSWRDLITSIDGIQSMSRKGNCYDNAVMENFFGHLKSEMHHGESFDGLEHFRQALDGYIHWYNHERIQKRLKGLAPMQYRNQTLEPLTA

SEQ ID NO: 53825 - protein, 545 aa, Cornyebacterium diptheriae
MVFRHIRIGYPPDLGISLRSRSVQFQPRTYHRLPCVFMTSFSRSAVATLALAGIVGLSGCSAGSTSSQAHHISTSAKAVSLGLTAPPASLDFTTVSGAAIPQALMGNVYEGLVRIQQDGTIVPWLAQSWTVSPDGKEYIFRLRDGVTFSNGDAFTAETAKFSIDAVKSDAWTNGLKKQMAKVESTEAIDHHTLKVTLKARSNTWLWSMGTLVGAMMTPNGVSELATKPVGTGPYVVDKWAVGTSLSLAARPDYWGEQTRNDRVVFRYFGDAIALTNAVRSGDIDAAIGLQNPELLESITSRGDLKVHVGSTNGEVVLSMNNNRAPFNDVRVRQAVMYGVNRQDIINTTWEGYGTDTGGQPVPPTDPWYQEMNRYPYDLEKARELMREAGAVGTPITISVPSLPYANSASEIVLSQLRDIGFDVRLESTEFPSVWLSKVYKAKDYDMSVVAHVEARDIPNLFGNPDYYLGFDDEQVRELLAQADSGDADSYVSTMKKVVNRIMDQAGADTLFNLPNIVVTQPDVSGVPTNLVADGLVVSNISRSED

SEQ ID NO: 53826 - protein, 273 aa, Cornyebacterium diptheriae
MRHLSIGGKIGASIVIAVALLALVSLVWTPYDPLHVIADDRLQGPSIRHLLGTDRYGRDVFSQIMVGSRITLLVGVVAVAVASLIGTPLGMWAGMRRGLVDTIIMRFSDIVLAFPGLLMAIVATAIFGASSVTAMAAIGVASIPTFARMSRAATMQVMSQDYILAARNAEQGWLTIARRHVLPNIMGVVIVQASVAFALAILAEAGLSFLGLGTPPPDPSWGRMLQSAQSSLATAPLLAVFPGMAIALTVLGFNLLGDGLRDLVDPRTRRRNS

SEQ ID NO: 53827 - protein, 525 aa, Cornyebacterium diptheriae
MTTSNVVFDPQKSELLAGCFSDSNKPATLYINGTWQPADSGEVRTITNPADGSVVGVVSEAGEHDTERAIAVARETFDRGEWLAVPAVERGKILLKVGALLREHKDEFARAESADTGKRLAESELDMDDIANAFDYFGTLAQHEAGRVVDPGDPNVRSRIDVEPVGVCGLITPWNYPLLQVSWKVAPALAAGNTFVLKQAELTPHTAMMLMTLFERAGVPAGVANLITGAGANCGNPLSTSPLVDMVSFTGGLVTGRLIARNAAETVKRVALELGGKNPNVIFADADFDAAVDNALNGAFVHSGQVCSAGSRIVVEESIHDRFVEELTRRAAQIKLGGPLDTAAETGPLISLEHRDKVDAYVVAAKEQGATITTGGRVADASDNEGSHATGNTDLAAGAFYLPTIIDNCTRDMDCVHDEAFGPTVTVETFRTEEEAIAIANDTEYGLAGAVWTQDAGKAERVARKLRHGTIWINDFHPYLPQAEWGGMKQSGNGRELGPTGLAEYQEHKHVYQNIAPAVTGWFAG

SEQ ID NO: 53828 - protein, 463 aa, Cornyebacterium diptheriae
MTLRIFDTGTRSLRDFEPIRPGHASIYLCGATPQTQPHIGHVRSGVAFDILRRWLIAQGLDVAFVRNVTDIDDKILTKAAENGRPWWEWVSTYEREFTWAYNQLGVLPPSVEPRATGHVTQMVEYMQRLIDNGFAYAAEGSVYFDVAAWTAAEGSDYGSLSGNRVEEMEQGETEITGKRGAHDFALWKAAKPGEPSWPTPWGDGRPGWHLECSAMATWYLGGEFDIHCGGLDLQFPHHENEIAQSHAAGDGFANYWMHNHWVTMSGEKMSKSLGNVLSVPNILDKVRPVELRYYLGSAHYRSMLEYSEGALLEAAAGYRRIEAFLTKVADVEAGQWTTEFEEAMNDDLAVPRALAEIHTQVRHGNSALAAGDVDKAHEIAASVRAMAAVLGVDPLDEKWLDSAASDSSTNAALDVLVQAELQRRTEARAAKDWATADEVRDRLHAAGITVTDTPDGPTWALNN

SEQ ID NO: 53829 - protein, 160 aa, Cornyebacterium diptheriae
MTNTPIIPRVGIATDAHQIEAGKPCWIACLLFSGADGCEGHSDGDVVAHALVDALLSAANLGDLGSFVGVGRKEYDGVSGTQLLTECRELLESHGFTIGNGAVQLVGQSPKMGPRREEAERVMSEILGAPVSVSATTTDHLGFTGRSEGRAAVATAVVWK

SEQ ID NO: 53830 - protein, 215 aa, Cornyebacterium diptheriae
MSDFRTRYQIVSEKIAAAAQRSGRKPSDIRLIAVSKNHPVAAVQEAMDAGVTVFGENRPQELVEKAQAIPNAYWCAIGRLQRNKAKDIVRYAQEFHALDSLRLAQALDQRLDHQLDVFVQVNTSHEEQKGGIAPSEVEPFLAELSQFSHLHVRGLMTMARNDPCERVVRASFSELRELRDALLPHGELSMGMSGDFEWAIEEGATSVRVGSALFL

SEQ ID NO: 53831 - protein, 597 aa, Cornyebacterium diptheriae
MSLRNRLRTSISKHDTDGEFIQDRTRDVVIVGGGSAGSVLANRLSEDPDTSVMVLEAGRSDSLWDLFIHMPAAFSFPIGNKYYDWAYESEPEPHMNGRRIYHARGKVLGGSSSINGMIFQRGNPMDYEKWGALPGMQNWDFKHVLPYFNKMETALGADANDPRRGHTGPLKLTRGPATTPLFQAFFRSVQEAGYNLTNDVNGYRQEGFAPFDRNILKGKRLSAARAYLHPVMDRTNLEVRTRALTTRILFNEAGTQATGVEYEWKGKKRRVMAKKVILCGGAFNTPQLLQVSGVGDREVLEKAGVDVVKHLPGVGANLQDHLEVYVQYNVTKPVSVQPNYKMTRRPFIGLQWLLTKKGPVASSHFEAGGFARSNDDEAYPNLMFHFLPMAIRYDGTQPEGDHGFQFHVGPMYSDTLGHVHITSPDPKAKPEIIFNYLATEQDRREWVEAVHVSRRLLDTDAMKEYTDGEISPGADVQTDEEILEWVRNDAETALHPSCTAKMGSADDAMAVVNPENMQVHGIDGLYVCDASAMPIITNGNIYAPVIMMAEKAADLIKGIKPLAPIDVPFYKAKQGMPLYAEGEKVRDHTKAIPGADH

SEQ ID NO: 53832 - protein, 387 aa, Cornyebacterium diptheriae
MSDFDLIVVGSGLFGLTVAERAASQLGKKVLIVEKRSHLGGNAYSEAEPETGIEIHKYGAHLFHTSNKRVWDYVNQFTAFTGYQHRVFAMHNGTAYQFPMGLGLINQFFGRYYTPDEARELIKEQSAEIDSKDATNLEEKAISLIGRPLYEAFIRDYTAKQWQTDPKELPAGNITRLPVRYNFDNRYFNDTYEGLPVDGYAQWLSNMADHENIEVRLDTDWFEVREDLRAQNPEAPVVYTGPLDRYFDYSEGHLGWRTLDFETEVLNTGDFQGTPVMNYNDAEFPYTRIHEFRHFHPEREDRHPKDKTVIMKEYSRFAEEGDEPYYPINTPSDREMLFKYRELADAETESGKVYFGGRLGTYQYLDMHMAIASALSMFDNKLVDALK

SEQ ID NO: 53833 - protein, 206 aa, Cornyebacterium diptheriae
MRAMITSAVVDEVIVIISPQMQDYAAALLLRWGLFSADIPVRLVHGGAERADSVWCGLQAIADTDAVVLIHDSARALTPPGMIARVARAVLDGNKAVIPVVPVADTIKTVHGTTVVATPPRRDLRAVQTPQGFDIAALRAANIAYQQQQPDFEATDDASLMEWFGTPVLCVDGDPMAFKVTTPLDYALAKAVTDQAEPTIFEVPSD

SEQ ID NO: 53834 - protein, 463 aa, Cornyebacterium diptheriae
MAKKARSSHICSECGYTSPKWLGRCPDCGAWGTFQEHQVTTSSAAPSVSAKPIGLTPTSPAQSITRIDATRSSTQSTGIGELDRVLGSGIVPGSVVLLAGEPGVGKSTLLLEVASKWAQQKQGSSNRTALYITAEESAGQVRMRAERTGALQDSLYLAAESNLDIVFGHVEQIKPSLLIIDSVQTMQASGVEGVAGGVAQSRAVTAAITSLAKTTGIPCLLVGHVTKDGNVAGPRVLEHLVDVVLNFEGDRHSSLRMLRGIKNRFGATDEVGCFEQHSDGIREVPDPSGLFLSHHGSTPDGTAVTVAMDGVRPIVAEVQALVVPTEAKNPRRAVTGLDPTRVPMVLAVLAARAGKRTHSSEVYVATVGGMKVGEPATDLAIALATASALNKKAIAEKTVVLGEVGLAGEIRRVPNIQRRLMEAQRLGYKRAIIPVSDPSETKVAGIKVIQVSDIREALDVAVG

SEQ ID NO: 53835 - protein, 878 aa, Cornyebacterium diptheriae
MFERFTDRARRVIVLAQEEARGLNHNYIGTEHILLGLIHEGEGVAAKALESMGISLEAVRQEVEEIIGHGSEPPAGHIPFTPRAKKVLELSLREGLQMGHKYIGTEFLLLGLIREGDGVAAQVLVKLGADLPRVRQQVIQLLSGYEGGESPENNNEGEAVGAGTGAGRAGRGGGAGERSNSLVLDQFGRNLTQAAKEGKLDPVVGREQEIERIMQVLSRRTKNNPVLIGEPGVGKTAVVEGLALDIVNGKVPETLKDKQVYSLDLGSLVAGSRYRGDFEERLKKVLKEINQRGDIILFIDEIHTLVGAGAAEGAIDAASLLKPKLARGELQTIGATTLDEYRKHIEKDAALERRFQPVQVPEPSVDMTIEILKGLRDRYEAHHRVSITDGALAAAAQLSDRYINDRFLPDKAVDLIDEAGARMRIKRMTAPESIRKVDDQIAEVRREKEAAIDAQDFEKAAGLRDTERKLGEERAEKEKQWRSGDLEDIAEVGEEQIAEVLGNWTGIPVFKLTEEESSRLLHMEEELHKRIIGQDDAVKSVSRAIRRTRAGLKDPRRPSGSFIFAGPSGVGKTELSKSLANFLFGDDDALIQIDMGEFHDRFTASRLFGAPPGYVGYDEGGQLTEKVRRKPFSVVLFDEIEKAHKEIYNTLLQVLEEGRLTDGQGRVVDFKNTVLIFTSNLGTQDISKAVGMGFSSVGEHDADGQYDRMKQKVNDELKKHFRPEFLNRIDEIVVFHQLTQEQIVEMVDLLIGRVSKALAQKDMGIELTEKAKNLLAKRGFDPVLGARPLRRTIQREIEDVLSEKILFGEVGAGEIVTVDVEGWDGESKETDKASFTFTPRVKPLPDEFEEATPSEEAQEAVINAAETEVPEEEVNIEN

SEQ ID NO: 53836 - protein, 282 aa, Cornyebacterium diptheriae
MAHFLLLPCTYCVPYYLFMTMYWHHTSTTPVSTVLITHGYAEHQGRYSALVRSLLNYNFDVVTFDLPGHGYAPGPRACVDVDKLVDFHVALRHRAEQDCRLRTETMCLFGHSMGGLITALSVLEDSSNVSAVALSGPAFSPFPKTPRVVTRMLRCSARIAPRLKVLALPQDAISRDPEVVAAYANDPRNYTGRVPLLTGASMALAGQKALAQASQWDRSVPLLVMHGSADRLADIEGSRNFAASAGGTMRPVDGAFHEIFNEPEAPQLRAELCEWLHANCGA

SEQ ID NO: 53837 - protein, 171 aa, Cornyebacterium diptheriae
MAQGEVNVTIVGNLVADPELRFTPNGVAVTSFRVASTSKKYDSRSNQWVDGDAVFLQCNIWHQAAENVAESLTKGMRVIVTGRLRQRSYETREGEKCTVMELEADEVGPSLRYASASVMRNERNSGGNGVGSQPSTGGFGGQVSQPQSGGQSQGSDGWNNPAPLGDDNPPW

SEQ ID NO: 53838 - protein, 335 aa, Cornyebacterium diptheriae
MVSTDAKHSTGTSSNAGTGESSAKKKAQTAIAAIVMLLCGLLGLVILFYPVVSTQLNNYEQSKLARQFGADAAQADPAVVAAALDAAHAYNDSLENGPLQDPWTGGDSTKDPAYQAYEKLLGEYPAMAQISIPAISVNLPIYHGTSDATLLKGVGHLYGTALPVGGLGTRSVLTAHSGIQKSTFFDNLEKVKKGDAIYVRNIGETLKYQVRDIEIIRPAEIDRIQPIPDRDLITLVTCTPYGINTHRLLVTAERVPMEPGEADRAFAGDGIVWQWWMKLAIGVLVVILLLTGWLIIRILRARKFAKKTAGADAAKSVEPGDIEASLSASAAEESQ

SEQ ID NO: 53839 - protein, 520 aa, Cornyebacterium diptheriae
MSNAKNTQDVPEQLRIRREKRQKLIDAGVEPYPVIVDRTHSITELREKFAAVPEGEKGDKPGVTYLEPGEDSGVEVAITGRALFIRNTGKLCFAALQEGNGEYMQAMLSLAEVGEESLASWKADVDLGDIVSIRGTVVASKRGELSVMVNSWHMASKSLRPLPVAFADMSEDMRIRHRYTDLIMREQARTNAMTRIKVMRALRHYLEGQDFMEVETPMLQTLHGGAAARPFVTHSNALDIDLYLRIAPELYLKRCVVGGIERVFEVNRNFRNEGVDSSHSPEFAMLETYQAWGTYDDGAKMIQELIQSVAMEVFGSTTVTLVDGTEYDLGGEWKTIEMYPSLNEALTRKFPGQPEVTIDSTVDELKAIAAVIGLDVPAKGGWGHGKLVEEIWEHLCEDQLYGPIFVRDFPVETSPLTRQHRSKPGVTEKWDLYVRGFELATGYSELVDPVIQRERFEDQARLAAGGDDEAMVLDEDFLAAMEQGMPPTAGCGMGIDRLLMALTGLGIRETVLFPIVKPER

SEQ ID NO: 53840 - protein, 277 aa, Cornyebacterium diptheriae
MGLYPSTAAWFNAREQAKLVDLYDSKIENATPLSAEQLLELAHRYNDRLTVGAALDPWANVPRGAGKEDGDGMAYKDQLRVDRTDVMARIRIPSIKVDLPIYHGTSDNTLKKGAGHLEGTSLPVGGPRTHSVITAHRGLAEATMFTNLNKVGVGDRFTIEVMGEVLTYEVRETRVVSPEDTRFLQTQDDRDLVTLVTCTPLGINTHRILVTAERITPTPQSDIDAARQASQIGFPWWAVIFAVGFSFIALFFWRSGYMIPPKKKEEDIESEADGDEL

SEQ ID NO: 53841 - protein, 506 aa, Cornyebacterium diptheriae
MNQPQYVAAIDQGTTSTRCIIFDHNGQQVGVGQYEHEQIFPQKGWVEHNPMEIWANTRQAVGTALAESDVSREDIVAVGITNQRETTVVWNKTTGEPIYNAIVWQDTRTNSICSELAQGDPARWQKRTGLLINSYPAGPRLKWILDNVEGARELAENGDLLFGTIDTWLLWNLTGGAEGDNGQPAVHATDVTNASRTLLMDLESLQWDEELCAALDIPMQVLPEIRPSVGNFGQVRARGSLAGVPIRAILGDQQAAMFGQACFRPGDAKCTYGTGLFLLENTGKTPKHSENGLLTTVCFQLEGEKPVYALEGSVAMGGSLVQWLRDNLQIIPNSPAIENLAREVPDNGGVYIVPAFSGLFAPRWRPDARGVIVGLTRFANRKHLARAVLEATAYQVREVIDAMVADSGVELTEMRVDGGMVMNELLMQFQADVLRSDVTRPKNIETTATGVAYAAGLGVGYWDSLDVLRNMNEVDKTWHAKMDADKIDELLAEWNKAVERTYNWEN

SEQ ID NO: 53842 - protein, 159 aa, Cornyebacterium diptheriae
MRAVLSIGSNMDDRYALLRTVVEEFAGQIVAASSIYSTPPWGVEDQYEFLNAVVIVDVDSSPLELLRRGQRLEEAACRRRLRHWGPRTLDVDVVTIYNDDGTQMRSTDPELTLPHPYAHERAFVLVPWAEADPEAELLGQKVAQRAAALGETFPVVGSL

SEQ ID NO: 53843 - protein, 278 aa, Cornyebacterium diptheriae
MSAKDLIIPERTAVMGIVNVTEDSFSDGGRWLDIDAAIDHARDLVAAGADIIDVGGESTRPGATRVDPDVERSRVIPVIRALSEEGIATSIDTMRASVAAAAANAGVKLINDVSGGLADRAMYSVMADTQLPVCLMHWKTVRFGDAAGSADHGGDVVADVHQTLDKLVTSALNAGVKEDNITIDPGLGFAKTQEDNWALLRALPEFIAGPYPVLVGASRKRFLMAVRASRGLQSGPVDADPATAAVTAIAAHMGAWCVRVHEVAVSRDAVDVAALWNA

SEQ ID NO: 53844 - protein, 246 aa, Cornyebacterium diptheriae
MTALQAFGWEFLGTALLLLLGNGVCAVNSLRTSAGKGTGWVLIAFGWGMAVFVGASVASPSGGHLNPAVTIALAIKGSTPWNLVGGYVLGQFLGAMFGAILCWLTFKQLFDANNTDENGNVTGANRTTGGIFFTGPAHNQNGWNMVTEFIGTCVLLLFIFFGPTGGDLGPMTYFAVAFVIVAIGLSLGTPTGYAINPVRDLGPRLMYAFVLPIKDKGSANWGYAWVPIVGPMIAAVFCGVLATVVL

SEQ ID NO: 53845 - protein, 824 aa, Cornyebacterium diptheriae
MNNKKTLQYGVIAAIVLMAIYVFTFLGNDTRGYKPVETSVAVTQLDNKNVKEVEIDDREQRLRIKLKNPIEHEGQKEVSEILTKYPARASADIFSKVEKSEAEKFTTKVNQENFFVSMLSYILPMLLMFGIIMFIFSRMQGGQGGIGGMFGFGGSRAKELDKDMPTNTFADVAGADEAIDELHEIKDFLEDPTRYEALGAKIPRGVLLYGPPGTGKTLLARAVAGEAGVPFYSISGSDFVEMFVGVGASRVRDLFKQARENSPCIIFIDEIDAVGRQRGSGMGGGHDEREQTLNQMLVEMDGFGDREGVIIMAATNRPDILDPALLRPGRFDRQIPVTNPDLKGREQILRVHAKGKPFAKDADITALARRTAGMSGADLANVLNEAALLTARIGGNVITADALEEATDRVIGGPRRSSKVISEKEKKVTAYHEGGHTLSAWALKNIERVYKVTILARGRTGGHAMTAQEDDKGMYNRDELYARLVFAMGGRAAEELVFGEPTTGASADIEQATKIAKAMLTEYGMSPSLGMVKYGEEQGDPFSGRGGSGTLEYSPDVAAQIDREMQYLLDKAHAEAYSILAEHRDYLDKLAEKLLEKETLRRPDLEALFEGIEPREVGDVFPNENDRFPRQAGREPVKTPTELAIERGEEPPKPFSILEASKAARAKREAELAARNAGAAPVAPAQGPQEPARGLGHMDGTAQRVEKPATPATPATPANKEQRYGGTPPPQGWTAPGWPPAQPKNADTPASVHPGVKNYADDSTPAAPAEPQEEVGFQLPENERTENPWEKPNDESGRHRAPADSERPSSDPTQVIKRVEETDE

SEQ ID NO: 53846 - protein, 419 aa, Cornyebacterium diptheriae
MIDLKLLRENPDVVRESQRIRGEDPALVDQLLEADEKRREAIKSADDLRAEHKAFGKKISQASPEERPALLEGSNELKSRVKAAEEAEAEALAKVNEIQMLFGNVVTDAPAGGEDDYIVLEHVGTPRTFDFEPKDHLDLGESLGLIDVKRGTKVGGARFYYLTGDGAFLQLGMLNLAAQKARENGFQLMIPPVLVRPEVMSGTGFLGAHSDEIYYLERDDLYLVGTSEVALAGYHQDEIIDLSDGPIKYAGWSSCFRREAGSYGKDTRGILRVHQFDKLEMFVYCKPEEAVAQHQALLNMEREMLAAVEVPYRIIDVAGGDLGSSAARKFDTEAWIPTQNTYRELTSTSNCTTFQARRLRTRYRDESGKAHTAATLNGTLATTRWLVAILENNQQADGSVIVPEALRPFVGKEVLEPKK

SEQ ID NO: 53847 - protein, 248 aa, Cornyebacterium diptheriae
MVDTLLELPARTLTDGTSTPKHQQLREILEELCRTQLKPGDMLPGERALEEQYGVSRITVRRAIGDLVATGQLRRSRGKGTFVAQAPMITRLQLASFSDEMAARKIEASSKILASSWSSPSAVVHEFFGTEQGTPHTHLVRVRLGGGKPFCINDAWYNSAIAPDLLENDVYKSVYSILEQNYGASITGAEQITTAVAATPETARILGVDVGEPLLKVERHAHAGENPIEWCSSLYRTDRFALRTFITK

SEQ ID NO: 53848 - protein, 293 aa, Cornyebacterium diptheriae
MMHKFWPRHSPNFMACRVAVRTVQPRDITVGLSGGADSLALVAALCAEDYNVHALCVDHGLQPGSHEVAQQAAHHARTFGAHAEIISVTVAPGNLEANARTARYQALHSRNLPVVVGHTADDQAETLLLGALRGKATGMQIHTDNLWRPLLGVRRATTLAACTELGIEPWHDPHNANTDFLRVALRTQVVPLLSDIIGGDAVPALSQAATLIAEDTHALHVDTPDDRIAQLAGMPPALRRRHLVALLQAYGARVSAAHLRAVDALITNWHGQKAVPVGNGLEVTRKDGRLSVS

SEQ ID NO: 53849 - protein, 387 aa, Cornyebacterium diptheriae
  MISC_FEATURE (7)..(7): X=any amino acid
  MISC_FEATURE (25)..(25): X=any amino acid
YNTNTPXHTKPPINPSSLLAASPRXQTKGQPTTRRYAATVGALAQDPRLAGFAGKIVDATTGEVILEKDADKPLTPASATKMLTATAALYELGPEHRITTEVIKQDDHTVVIKAAGDVWLTDERLDQLARKIKEQMPSVNTVLVDTSAWSGDKILGGWDPDDVNAGYVAPLEPIMLYGGRLGAKEGDVPRSHNPGLDVAAALAQRLGAGTKGYTDSATGEVVATTESEALEKRISQMMQHSDNVMAEAIGREIDATQPVQATLRILSEHGITIGASEVADNSGLSLHNRITPALLTQVATKAVTDPEVHSLILALPVAGGSGTLADRYAELDGRGWVRAKTGTLTGVSALVGVVPSTSGHIYSFGLISNGSEILEARAALDTIASAL

SEQ ID NO: 53850 - protein, 289 aa, Cornyebacterium diptheriae
MRHRAGEHRNVFAILAFVIAIVSVGFLLYPVAATAWNNARQARVAQSYENSYEVDSPAVRDSVLEAARQYNTSVVGFPILDPWLNRASKNSGPYLDYLQQLNPQRAERPVIASISIPTIDAHLPIYHGTDTATLEHGLGHLYGSALPVGGTGTHPVITGHSGLANATLFDNLEDVKEHDPIYITVQGETLKYEVDAINVVLPEDTKLLAPDPNKDQITLITCTPYAVNSHRLLVRAHRVDLDPNDPNLTQTGTKIWQPWMLWTAALALTAIAIIITLVLRRKRTTTHEK

SEQ ID NO: 53851 - protein, 469 aa, Cornyebacterium diptheriae
MTEHYDVVVLGAGPGGYVAAIRAAQLGKKVAVVEKQYWGGVCLNVGCIPSKALLKNAEVAHIFNHEAKTFGISGDVSFDFGAAHKRSRQVSSGIVKGVHYLMKKNKITEIDGLGSFKDAKTIEITEGNDAGKVVTFDDCIIATGSVVRSLPGVTIGGNIVSFEEQILKEEAPKSMVIVGAGAIGMEFAYVLVNYGVDITIVEFMDRVLPNEDADVSKEIAKQYKKLGVKLLTGYKTTAITDNGDNVTVEVESKDGSKKDSLTVERCMVSIGFAPRVEGYGLENTGVKLTERGAIEIDDFMRTNVDHIYAIGDVTAKLQLAHVAEAQGVVAAEVIAGAETQELGDYMMMPRATFCNPQVASFGYTEEQAKAKFEGREIKTATFPFSANGKAAGLAETAGFVKIVADAEFGEIVGAHMVGANVSELLPELTLAQRFDLTCEEIGRNVHTHPTLSEAMKEAAEGIMGHMINL

SEQ ID NO: 53852 - protein, 298 aa, Cornyebacterium diptheriae
MATKNEELPIIDLAATEGYIVDDTDEDDPVLLAPDGTPIDTWRENYPYEERMTRDEYEKTKRALQIELLKWQNWTKDTGQRHIILFEGRDAAGKGGTIKRFNEHLNPRGARTVALEKPSPRESTSWYFQRYIEHFPCAGEIVFFDRSWYNRSGVERVMGFCTESQHAEFLREVPMLENMILGSGISLTKFWFSVTQKEQRTRFAIRQVDPVRQWKLSPMDLASLDRWDDYTRAKEEQFRYTDTDEAPWITIRSNDKKRARINAMRYILSKFEYSNKDHDLVGEPDPLIVMRGRDRIGD

SEQ ID NO: 53853 - protein, 431 aa, Cornyebacterium diptheriae
MDEQRNQGEFLLGSDGKPLLDRYGRPIRRRRSAPRRPKLDRTEPRRAAPSEATRVIRTETTQMPAQPGAVPQERPRQYIPTPEEQQRYRAQQYYQQQPVQPGQPVQPGFEPNRRYRRSQVTLPPEPKKRRRLRPGGCIAGLVWTLVIVMVLGIAGTLWLDTRLNRVQAAPPQHIAKTSGTNWLLVGSDSRAGLSEEDVQRLGTGGDIGSMRTDTIMVLHIPSSGKATLMSIPRDSYVEIPGYGMDKINASFTYGGAPLLTQTVENATGLRINHYAEIGMGGLANVVDAVGGIEVCPAEPIDDPLAGLNIAAGCQKVDGPTALGYVRTRHTALGDLDRVQRQREFFAALVNKVTSTSTLANPFRIMPTINTVAGSFTVGKKDHAWHLARVALAMREGVETVTVPYAGFADYDVGNVVLWDEVASEELFASLR

SEQ ID NO: 53854 - protein, 546 aa, Cornyebacterium diptheriae
MAKIIAFDEEARRGLEKGLNTLADAVKVTLGPKGRNVVLEKSWGAPTITNDGVSIAREIELEDPYEKIGAELVKEVAKKTDDVAGDGTTTATVLAQALVREGLRNVAAGSNPMGIKRGIELATAKVTEALLASAKEVETEEQIAATAGISAADPAIGEQIAKAMYAVGGGKLNKESVITVEESNTFGVDLEVTEGMRFDKGYISGYFATDMERLEAVLEDPYILLVSGKISNIKELLPLLEKVMQTGKPLLIIAEDVEGEALSTLVVNKIRGTFKSVAVKAPGFGDRRKAQLQDMAILTGSQVISEEVGLSLETADLPLLGRARKVVVTKDDTTIVEGAGDSAQIDGRVNQIRTEIENSDSEYDREKLQERLAKLSGGVAVIKVGAATEVELTERKHRIEDAVRNAKAAVEEGIVAGGGVALLQAAHVLANDLDLTGDEATGVKIVREALSAPLKQIALNAGLEAGVVADKVSHLPAGEGLNAATGEYVDLMAAGINDPVKVTRSALQNAASIAALFLTTEAVVADKPEPAAPAMPGADEMGGMGF

SEQ ID NO: 53855 - protein, 496 aa, Cornyebacterium diptheriae
MNTLIETLNSIIWSPFLVFLCLGAGLYFTIATKCVQVTGLPDMLRQLRAGEKSANGVSSFQSLMMSLAGRVGVGNIAGVATAIAFGGPGAVFWMWAVAFLGAATSFIECTLAQIYKERDQDTGEYRGGPAYYIEKSLKHTKAAPFMLFYAIAFAVVMIFSTSYFMPGVQANGVASAMHNAWNLDVRIVGAFLTVLLALIIFGGVKRIAWFASLVVPFMAMVYIIIALVVLFMHFDQIPHVFGTIFSSAFNANATFSGLLGSAIMWGVRRGIYSNEAGQGLNPQAAAAAEVSHPAKQGFAQAFAVYVDTLFVCSATAFIIISTDMYRVFEGGTEDSPVRYAGSLPSNTPVGPGFVQQGLDSVASGVGPSFIGVAILFFGFTTILSYYYISETNFTYLMRWISNATARRATIFGLRCLMLVSVWIGAVSTPGAAWALGDIGAGATAWLNVIAILILQVPAIKCLRDYNEQKKAGLDPQFDPAAVGIKNAEFWETYKAR

SEQ ID NO: 53856 - protein, 384 aa, Cornyebacterium diptheriae
SMRIRNVPGIDGLRGIAVLAVIVYHFYGAALPGGFLGVDIFFVLSGFLITSLLIREHAGSGRIDLKHFWVRRARRILPAAVTVLITVSVVTAAIGGDVARGVAFTIPWLVLFANNWVQIAQSQSYFSDAGVQVFAHYWSLAVEEQFYVVWPLIFVAVAALSKRIVPLILTFLLAIASAVWMALAYNPEVDPSRVYYGTDTHSFGLLIGAFLAFAITSRTEGDSWPASIRQSRISSIAGPLALAGLLVMLVVVNATHPTTYRGIIVLGSLLTSIVLWSVVNERGVVSKIMVNPVLHWLGRRSFSLYLWHWPVVSLLASVMESYSILIALLSAVFSAILAEWSYHAVENPLRRQGYQRYFGSWWNQTRLMRALSLPTVMTVLLLCV

SEQ ID NO: 53857 - protein, 454 aa, Cornyebacterium diptheriae
MELGVFWEEQADSSTDTPNAAAGSNVRFMQSSLDPEKPSGTSHLTGTGQLDVSHHTGRPGAALYYRSMNVLTSVLLLVSLAGVVSLDRRSAIVAVILSALFALFYAAAAVSHRRAMWTKAMLLVILTVLWVFMLPIIPVSIYMVFPLFFLYLRVLPDIRGIILVVGATAIAITSQLAQLTIGAVMGPVVSALVVIAIHFAFEAIWKGAREREELIDELLATRNQLAETERAAGIAAERQRIAHEIHDTLAQGLSSIQMLLRVAEQDIKKSGMPEAEQQAPLHRMELARSTAAENLREARAMIAALQPAALSKTSLEGALNRIAEHVVGPEISIEVDGEERQLPMRVEAALVRIAQGALGNVAKHSGATHCHLTLSYGEEEVRLDVVDNGHGFDPEQVAQRPAGLGHVGISAMQQRAAELGGELIVESEPGQGTAVSVALPIDIEEIHSKDQDQC

SEQ ID NO: 53858 - protein, 325 aa, Cornyebacterium diptheriae
MAAVRCRSQHSVVEVVRLLDAHQIPLLIVGGGSNLVIADGEIPLVAVILDCDDISVTLDTGRVVAEAGAVWDDVVRLCVDAGLGGIECLSGIPGSAGATPVQNVGAYGAEISDVLVSVTLLERATGAVMEVPAADLELAYRYSNLKFTGRGVVLGITLQLHTDGMSAPLRFGELARVLGHEGPHPAVQVREAVLGLRAGKGMVYNEADHDTWSAGSFFTNPIVPESVGDHVRSVVGDESMPCFAAGEGMVKLSAAWLIDRAGFAKGHQGPGGRVSLSTKHTLALTNRGNATTDDLVALAREVRGGVMDAFGVLLEPEPVWVGVSI

SEQ ID NO: 53859 - protein, 427 aa, Cornyebacterium diptheriae
MMTMRIAMISIHTSPLQQPGSGDAGGMNVYIISIARELARRGVDVDIYTRATRPSQGDVVEVESGLRVINIVAGPYEGLSKEELPTQLAAFAGGVVQFAKCHHMRYDVIHSHYWLSGQVGWLLRDLWNIPLVHTAHTLAAVKNAHRSAGDTEESEARRICEQQLVDNADILVVNTPEETNDLVRHYDANPDSVAVIAPGANVELFTPGTQRNTEQSRRCLGIPLHTKVMAFVGRLQQFKGPEVLLRAVAEMLERDPDRDMRVIMCGGPSGAAATVEHYIELTRSLGIAHRVRFLDPRPPEELVSVYQAADVVAVPSYNESFGLVAMEAQASGTPVVAARVGGLPIAVVDGETGVLVDGHDPIMWADALEQLLDDDPTRQQMGVAAVEHAANFTWAAAAEKLESVYGDAAMLDVAQCHDRYAAGSDRA

SEQ ID NO: 53860 - protein, 226 aa, Cornyebacterium diptheriae
MTSILLVEDEESLADPLAFLLRKEGFDVVIAGDGPSALVEFDRNAIDIVLLDLMLPGMSGTDVCKRLRAVSSVPVIMVTARDSEIDKVVGLELGADDYVTKPYSSRELIARIRAVLRRGGETIEESDEILGSGRIHMDVERHTVTVDGEEISMPLKEFDLLEYLMRNSGRVLTRGQLIDRVWGADYVGDTKTLDVHIKRLRSKIEPEPSAPCHVITVRGLGYKYED

SEQ ID NO: 53861 - protein, 300 aa, Cornyebacterium diptheriae
MTAENIVVVAVDGSEASQNAVRWAANTANKRGVPLRLAASYTMPQFLYAEGMVPPQELFDELQSETMDMIEAARVVAHEVAPDIKIGYVIAEGSPIDMLLDMSSDVTMIVMGSRGLGGLSGMVMGSVSAAVVSHADCPVVVVRSDNHVTETNKYGPVVVGVDGSDVSQRATEFAFEEAQARGAKLVAIHTWMDMQVQASLAGLAAAQQEWEIIEKEQTTLLKDRLQPLLERFPDVEVEMVITRDRPVRALEDCAHNAQLLVVGSHGRGGFRGMLLGSTSRALLQSAPCPMVVVRPNEKEN

SEQ ID NO: 53862 - protein, 122 aa, Cornyebacterium diptheriae; identical to SEQ ID NO: 53644
  MISC_FEATURE (19)..(19): X=any amino acid
  MISC_FEATURE (24)..(24): X=any amino acid
  MISC_FEATURE (118)..(118): X=any amino acid

SEQ ID NO: 53863 - protein, 138 aa, Cornyebacterium diptheriae; identical to SEQ ID NO: 53643
  MISC_FEATURE (27)..(27): X=any amino acid
  MISC_FEATURE (131)..(131): X=any amino acid

SEQ ID NO: 53864 - protein, 57 aa, Cornyebacterium diptheriae
MTSNHHAPYVQGFTHATMVGTTRCEPVRVSESLKAGLSSDWGLQLDPMKSESLVIAD

SEQ ID NO: 53865 - protein, 453 aa, Cornyebacterium diptheriae
MVDIVVRVSERKGERVSVLVVGMSHRSAPVALLEKLSMDDGVRTNTVSDLVARPSLAEAMIVSTCNRLEVYAMTSSFHTGVNDVVEVLHDMSGVDMEELRGYLYVRYADAAAEHMMEVTSGLDSMVVGEQQIIGQVRTAYHSATEAGTVGPALHGLVQASLHTGKRVHTETDIDDAGASMVSFACDEALAQMSATNFAGCRALVLGAGAMASLAATHLGRLGIEHITVANRTFERAQRLADHAVEAGVAASAIEFERRMDVLCDVDVVVSATGANTFTIEAANIPAAHGDLMMIDLSLPRDISDDVAEVPGVHLVNIEKLRDVASSGEAKDHAAQRIVAEELEAYTSAQRIRDVAPAVAALRRHASSLIDSELARLSTRVPSMDEDDFSEVQRTVRRVVDKLLHQPTVRVKELAAQSGTVSYDTAIQELFGLAVEATPVAVNVDELPERINKR

SEQ ID NO: 53866 - protein, 294 aa, Cornyebacterium diptheriae
MTLKIGTRGSLLATTQSGHVRDDLRPYEAELVIVTTHGDVNMAPVERIGVGVFTQALREELHTGGCDIAVHSFKDLPTELDPRFHLVVPKRADFRDCLIARDGLSLADLPAGALIGTGAPRRISQIKALRPDVECVPLRGNIDTRMGKVTSGELDAVVLAYAGLTRVGRGDEATQVFDPQDFLPAPAQGALAVECRADDAYAREAIDSICDEQAQVCAVTERVVLNRLEAGCTAPVAAHATLNDGTLTLTAAVIALDGSKVVRRELSAPVAENVALAEELTRALIADGAATILG

SEQ ID NO: 53867 - protein, 350 aa, Cornyebacterium diptheriae
MTHRYSKRSDDVFVLRARRRVMLFVVLVVLVLASVITSLALGQYYVPLRDLLTILTQPDSSSLMHNVIWEIRLPRIVLGLLVGACLGVAGTLMQAVFANPLAEPSIIGVTSGAGVGAAAVIVFNVGILGTFTVPAAAFLSAVVVTVIIYQLARHQGKVAIVNLILTGIAINAVCNALISFLVYLAPTSNREEIVFWQMGSLNGAQWKHVWVVAPIALVGIVISSQIGKQLDVLALGERAAGHTGINVGRLRIIAIAASTILTAAAVSFAGLIGFVGLIVPHLLRSISGPENRLLLPASALAGAVLIACADVAARTMIPFADLPIGIFTALVGGPTFFVLLRRMLKKGSVH

SEQ ID NO: 53868 - protein, 556 aa, Cornyebacterium diptheriae
MRLIMKPEHSTRGRVIFVGAGPGNPDLLTVRAREVLGSTANAVVDSTVGVGIRAVIAEHLEVPQAKLDAAEAEYERMCAAAKRRKPPRPDAPTAAEITEVSADASVDEVMAVLLPLLDEGDVIRLVQGNPLADSRALDEITAVTQVGADFQIVPGMSLPAAVPAFAGITLGDSYTKTTVSEDTNWDQLATAPLPLILQASKDDLLTIAMELKDRKLPASTPVTVTMNGTTRLQRSFDVTLKTMKSLVKQELDGTLVVTVGVSDRSTFSWWESRALFGWRVLVPRAKDQAGPMSSRIAAYGAIAQEVPTISVEPPRNPAQLERAIKGIVEGRYQWVVFTSVNAVKAVREKIVSFGLDSRAFAGVHIAAVGAKTAAAIREFGITPELIPPRKEHNAAGMVSVFPNYVEGLDPVGRVLLPRADIATDVLVDGLVNLGWEVDDVVAYRTVRAAPPSAEVRDMIKSGDFDAVCFTSASTVRNLVGIAGKPHARTIIACIGPMTAAEAEKQGLRVDVIPEVANVAALVDALAEHVEKLRAAGELPPPRKKRRARRKSKEGAV

SEQ ID NO: 53869 - protein, 330 aa, Cornyebacterium diptheriae
MNLDLIRRPRRLRSTPVMREFVAETTLRPADLILPMFIADGIDKPREIESMPGVYQHTMESLIEAVREAISVGIRCVDLFGVPLDSDKDATGSQAWDPEGILNRGVRALRQEFGDQVLIMADTCLDEFTDHGHCGILTTDRFGATIVDNDPTVELYQKMAVAQAEAGAHIVSPSGMMDGQILAIREALDAAGFHDVAIMAYSAKYASAFYGPFRDAVGSSLQGDRRAYQQDPANLRESILEVDLDIEEGADFVMVKPAMPYLDVLAEVASTSSVPVAAYQVSGEYAMLHAAAANGWLDLDRVMMESLISIKRAGADQILTYFAVEAARKL

SEQ ID NO: 53870 - protein, 254 aa, Cornyebacterium diptheriae
MPNPFSKGWKYLTASLDNKIEENADPVIQIKQAAEAAKKQHADIEQQAASVIGNRNQLQMKLNRLLKDQQSIQEKARQALSLSDSATDPAEQHKYLNAAEVYASQLVGVESEIEQTTTLHQQAEQAAEQATQQVKQSEARLHEQLSQINELTTQAQQAKMQEAAVAASDQINSIDPDRDVPTMDSIREKIERRYADALGSQELMQSSMNERIHEIEATTSERDMRANAKLDAIRAQMRGELPAGSEETEPPADK

SEQ ID NO: 53871 - protein, 743 aa, Cornyebacterium diptheriae
MTNAAVEIDFGVTGMTCTSCSARVERKLNKVAGVEATVNYATETASVRYDPASTTPAQLIDVIRGAGYDAFEVAEAEPATAEPSDTARDHHAEELKTRLIYSAILALPVFLMSMFGQLQFNNWQWLAFALASPVYFWGGWPFHRATLRNLRHGSFTMDTLISLGTSAAYLWSVWALFIGNAGDPAMRMHMSFTAHAHGGMDEIYLESAAMVIVFLLLGRWFETRAKGRSGEALRSLLNLGAKDAAIIRDNREVRIPIQSLQVGDVFVVRPGEKIATDGVVVEGTSAVDQSMITGESVPVEVAQGSHVTGATMNTSGRLLVTAQRVGADTTLAAMGRLVAEAQSNKAPVQKLVDKISQIFVPAVIVISLITLAVHLATGSATADAFAAAVAVLIIACPCALGLATPTALLVGTGRGAQMGLVIKGPEVLEQARNIDTVVLDKTGTITTGDMQVRNVYGHPSWQEQDVLRLAGAVEQASEHPIARAITAAAVAQTRTGTLPKVTDFNNQAGHGVAGTVEDHRVWVGRPADDEATQQVKTAENEGATCVVVRIDDHLAGVISVRDTVKEHSRLSVEKLTAMGLTPVLLTGDNAGAAAAVAREVGIPADRVISGVLPENKVQTVEQLQREGRVVAMVGDGVNDAAALTQADLGLAMGAGTDVAIEASDITVMNNDPRSIANAINLSRRSLRTIKGNLFWAFAYNVILIPVAALGLLNPMFAGAAMALSSVFVVTNSLRLRSVRSVFS

SEQ ID NO: 53872 - protein, 506 aa, Cornyebacterium diptheriae
MTTPSFDDDYVPPGDADVPSDTTDYAEAEYAEVEVYDPAPPASSDVPVQRERRGYKRREAAMASTEFRQPPHDAEAEQGVLGAMLLSPQTVIDTVELLVAEDFYRPAHQLIFEAIVGLFSDNKEIDPVIVAARLDRNNDLERVGGAPYLHTLISSVPTAANARYYAEIVAEKSLLRQLVNAGTRVVQLGYEGTEGAEVESVIDRAQQEVFKVSKKNQAEDYAVLADIVGPTMDEIDMISENGGLAQGVPTGFVDLDNLTNGLHGGQMIIVAARPGVGKSTIALDFVRSCAIKHDKAAVIFSLEMSKSEIVMRLLSAEAEVKLSDMRSGRLDDSGWAKLATRVGQIEQAPIYIDDSANLTMMEIRSKARRLKQKHDLQMIVVDYLQLMSSGKRVESRQQEVSEFSRQLKLLAKELDVPLIAISQLNRGPESRTDKRPQLADLRESGSLEQDADMVMLLYRPDSQDRENERAGEADIILAKHRGGPIDTIQVAHQLHYSRFVDMPHAG

SEQ ID NO: 53873 - protein, 150 aa, Cornyebacterium diptheriae
MKLILTADVENLGVAGDIVEVKDGYGRNLLLPRGLAIVATRGAEKQIEGIKRAQEAREIRDLDHAREVKAQLEALEGVSVAVRTSEKGKLFGSVKAEDVAAAVKKAGGPNLDKRSIELPKSLVKATGAYKVNVKLHSDIAATVNFEVVAA

SEQ ID NO: 53874 - protein, 193 aa, Cornyebacterium diptheriae
MAQGDVNITVVGNLVADPELRFTPSGAAVANFRIASTPRRYDSQTNQWVDGEALFLQCNIWRQAAENVAESLTKGMRVIVTGRLRQRSYETREGEKRSVMELEVDEVGPSLRYAAASVNRNPREGGNGGGNFGGSQGGFGGNTGGNSGGGFGAPQGGFGGGPQNSQSAAPANDPWSSAPQAGGFGGAEQDPPF

SEQ ID NO: 53875 - protein, 95 aa, Cornyebacterium diptheriae
MRHYEVMIILDPSQDERTVAPSLDKFLEIVRKENGTVEKVDIWGKRRLAYPIAKKEEGIYAVVNLTCESATVLELDRVLNLNDSVMRTKVLRGDK

SEQ ID NO: 53876 - protein, 726 aa, Cornyebacterium diptheriae
MADSGKGKPSPKRKKASAKSSAKSRPARAPQARRPKKKWVKPVIGGSIAAVLLAPFLAFMVAYIVTDVPEPSELVTKQVSQIFASDGKTQLARIVPPDGNRTEVPIDKIPEVTRNAVLAAEDREFYTNSGFSFTGFGRAILGQLTGDASAGGGSTITQQYVKNMVVGNDYSYMRKAKELVYSVKMANEWSKDEVLGAYLNTIYFGRNAYGIDAAAHAYFGVPASELNVGQSAMLAATIQRPSQLDPWSNRVEAEQRWNYVLDGMVGEGWLDPNDRAGVVFPEVTDPAQNQTYTEATGANGLIKNQVMNELTTLGITESDVQTLGLRITTTIDDATQKSMVEAVDRNMADEQSNTRVAAVSVDPKTGAVRAYYGGDDATGYDFANAPLQTGSTFKIFGLAAAVQQGIPTSTNYSSDPYQLRGGITVTNVDKGCGVCSLKEALKNSYNTSFLRLQDDLKHGSQDTADMAHSLGVARSLPGIEKTLTENGQQPYEGVILGQYLSRPLDMAHAMATLANYGVWHQEYFVEKIETAEGKLLYQHEGTQGERRVSEKVATNVLDAMAPIAAWSGGNGLAGGRPSASKTGTTQLGDTGANKDAWMIGATPQLATAVWAGTADNSPLLNSWGGPMYGSNLPAQLWKDISDSALSGKDWEQFKPAQNIGWAKYGYGTAPRATTEKIQTETSTSSAEATSPAASGTPGAPPVPSAPEPAPAPGGIEILPGVVLPVP

SEQ ID NO: 53877 - protein, 418 aa, Cornyebacterium diptheriae
MQTLLRYLVVLVNHLNKRKPVPRQTEITHRHRLIAMLALALGGFGIGVTEFVSMGLLSLIAEDFNVAESTAGHVITAYAMGVVVGAPVITAFTGMIPRRRLLILLMIAFTIGNALTVFTTSYPVLMAARFLAGLPHGAFFSVAGLAVASMAPEGQRGRALAFVGMGLPVATVVGVPAVQALGFATTWKAAYVVVTIIGAITLALLWTLMPHMSKMKPTSPLTELGALKNGQVWASLLIGSVGFGGMFAVYTYISWTMTQRAGLPEALMWIVLMAYGLGMIAGNFIGGRLSDWSVEYGILTALICIVLTLVSFYFTSAYAWIAIINFALVGLSGSMLIPSLQIRLMDVAGRAQTLAAALNHSALNIANACGALLGGVVISAGYSYSAPALAGAALGCAAIIIWIPAHITRSKQERKQHS

SEQ ID NO: 53878 - protein, 347 aa, Cornyebacterium diptheriae
MFTMTATVQENTQKKQRVLSGIQPTADSYHLGNYLGALKQWIELQDNYEAFYFIPDLHAITVDQDPRELRERTIAGAAQLLALGIDPHKSTLFVQSHVPEHAELGWVLTCLTGFGEASRMTQFKDKSAKRGADRTSAGLFTYPMLMAADILLYRPQFVPVGEDQRQHLELTRTLAERFNSRFKKTFVVPDGIIPEGAAKIYDLQDPTSKMSKSGSNPKGLINLLDDPKVSAKRIRSAVTDNDGEIRFDKENKPGVSNLLVIQSALTGKTIDSLVDAYQGQGYGALKVDTADALEAFVTPLKAQYDMYMSDRAELENVLALGAEKAREIASRTLADAYEHIGFLPPKR

SEQ ID NO: 53879 - protein, 263 aa, Cornyebacterium diptheriae
MNILASGLGESVADVASSGPLLLGILAAALAGFVSFASPCVIPLVPGYMSYLAGVVGAEVELSETGPRVRTRRWRVVGAALLFVLGFTVVFTLATATVFGAISALTLNAGTLMRIGGVVTIVMGLVFMGAVPMLQEEHRFSPRRWSTILGAPLLGGVFALGWTPCLGPTLAAIISVSAGTEGMTALRGVLLIIGYCVGLGIPFLIVALGSARVMMGLRKYSRIIQIIGGCALVLVGLALVSGQWAHFINWVRQWTVEYGATLI

SEQ ID NO: 53880 - protein, 299 aa, Cornyebacterium diptheriae
MNVNSNLAQLSDMAFASSFVIYFIALVLSIVYYMKVKGIVDQQREGLEPSTASADKFAGMTQMIVWLGVFVHIASVVLRGLSASRFPFGNLYEYILVISAFAVAVAAGFLQRHELRAMWPWVLTPVLALLFYGGTKLYADSAPVVPALQSFWFPIHVSTVSIGASIGLISGVASLLYLLRMSKNKRLAALTSPLPSAKTLDAIAYRTAIVTVPVFGLGIVLGAIWAESAWGRFWGWDPKETVAFITWILYAAYLHARATAGWRDTKAAWINIVALITMVFNLFFINIVVSGLHSYAGLN

SEQ ID NO: 53881 - protein, 312 aa, Cornyebacterium diptheriae
MAQSKILLYYKFTPIADPKAMMLWQRDMCELLGLKGRILISEHGINGTVGGDMDACKRYVRKMREYPGFRGTEFKWSDGGAEDFPKLSVKVRDEIVAFGAPGELKVDEKGVIGGGVHLKPEEVNKLVEERGDDVVFFDGRNAMEAQIGKFKNAVVPDVRTTHDFIRELESGKYDWMKDKPVVSYCTGGIRCEILSSLMKNRGFKEIYQIDGGIVRYGEKYGNDGLWEGSLYVFDRRMHMEFGNGVQDPGFIQLGHCVQCGAPTNKFEHCINEDECRELVLMCPDCYENPATRNCGREHCKEVAAEAAAAAAV

SEQ ID NO: 53882 - protein, 161 aa, Cornyebacterium diptheriae
MKNFTVPGIKEADAKQLIDHLQERLTDYNDLHLILKHAHWNVHGRNFIAVHEMIDPQVDLVRGYADEVAERIATLGGTPIGTPVGHVENRTPLEYNVNSGSTEDHLKELNKVYTKVLEGVREAMANAGDLDSVTEDIYIGQAAELEKFQWFIREHIVDDNL

SEQ ID NO: 53883 - protein, 211 aa, Cornyebacterium diptheriae
MEIRIVDHPLAASRLTIMRDKRTNNAGFRAALADLGAMLVYEASRDLAIEQFPVSTPVADTQGTRLQDPPIIVPIIRAGLGMVDPALSMIPDAQVGFIGMARDEATHQPVPYLEALPDDLSGRTVFCVDPMLATGGSLLHAIKLLADRGATDITAICMVSAQEGVDALAESGLPCRLVTATIDPELNDDAYIVPGLGDAGDRLYGPRNIDL

SEQ ID NO: 53884 - protein, 89 aa, Cornyebacterium diptheriae
MQTVKAAALFKVLSDPTRLQLLYLVAENPERLCCVDLSEALAVSAPTVTHHMKKLADANLVTRHKRGKWAYYEIVNDEFARVHELIRTL

SEQ ID NO: 53885 - protein, 1141 aa, Cornyebacterium diptheriae
MSQQSSERGTSTVNPLSKILVANRGEIAVRAFRAAFETGAATVAVYPNEDRNSFHRSFASEAVLIGEGGSAVKAYLDIDEIIRAAKQTGADAIYPGYGFLSENAQLARECAENGITFIGPPPSVLELTGDKAAAVTAAREAGLPTLTETEATDDPKKLAELTKGQTYPLFVKAVAGGGGRGMRFVDAPENLEKLAAEASREAAAAFGDGRVYAERAVINPQHIEVQILGDSAGNIIHLYERDCSLQRRHQKVVEIAPAQHLAPGLREKICADAVAFARHIGYQGAGTVEFLVDEEGNHVFIEMNPRIQVEHTVTEEVTQVDLVKSQIMIASGATLEDLGLRQEDIHTEGAALQCRITTEDPNNGFRPDTGTITAYRSPGGAGVRLDGAAMLGGEITPNFDSMLVKMTCRGADFATAVARAQRALAEFVVSGVATNIGFLRALLREEDFQHKRIATGFIADHPWLLQAPPADDEPGRILNYLADVTVNKPHGLRPAVINPVEKLPAEIKGELPRGSRDRLLQLGPEGFARALRKQDALAVTDTTFRDAHQSLLATRVRSNTLIDAARHVAKLTPELLSVEAWGGATYDVAMRFLHEDPWERLDHLREAMPNVNIQMLLRGRNTVGYTPYPDSVCKAFVDEAARSGVDIFRIFDALNDVSQMRPAIDAVLETNTTIAEVAMAYSGDLTNPSEKLYTLDYYLKLAEEIVKSGAHVLAIKDMAGLMKPAAATKLVTELRRNFDLPVHVHTHDTAGGQLATYWAAAAAGADAVDGASAPLSGTTSQPSLSAIVAAFANTYRDTGLSLDAVGSMEPYWEAVRKLYAPFESGTPGPTGRVYQHEIPGGQLSNLRAQATALGLADRFELIEDYYAAVNEMLGRPTKVTPSSKVVGDLALYLVGAGVNPADFAADPQKYDIPDSVIAFLRGELGTPPGGWPEELRAKALAGRKESKDTLAPLPAEDEALLADRATVRPTLDRLLFPKPAAEFAEHRRQFGDTTKLGDAEFLYGLKEGKETVIRTADSSVPMLVRLDAVGEPDEKGMRNVVCNVNGQIRPILVRDRSVESVTASVEKADPSNAGHVAAPFAGVVTVTIEEGATVKAGDPVAVIEAMKMEATISATTDGTVDRIVLTQATKVEGGDLLLVIK

SEQ ID NO: 53886 - protein, 594 aa, Cornyebacterium diptheriae
MSVEQKKITKVLIANRGEIAVRVIRAARDAGIASVAVYAEPDADAPFVSMADEAFALGGQTSAESYLVFDKILDAAKKSGADAIHPGYGFLSENGDFAEAVINAGLIWIGPSPQSIRDLGDKVTARHIALKAEAPMAPGTKEPVKDASEVVAFAEEHGLPIAIKAAFGGGGRGMKVAYTMDEVADLYESATREAVAAFGRGECFVERYLDKARHVECQVIADMHGNVVVAGTRDCSLQRRFQKLVEEAPAPFLTDDQRTRLHESAKAICKEAGYYGAGTVEYLVGSDGLISFLEVNTRLQVEHPVTEVTTGLDLVREQFRIAEGKELHIKQDPTPRGHAFEFRINGEDAGSNFMPAPGKVTKYIEPSGPGVRMDSGIVEGSVIGGQFDSMLAKLIVFGETRDEALQRASRALNEYVVEGMPTVLPFHRHIVENPAFIGDGEKFEVYTKWIEEEWNNPIEPYVDPTDVDDEEAALPSQKVVVEIDGRRVEIALPGDLALGGGAGAPKKKAKKRRAGGSKAAISGDAVAAPMQGTVIKINAEEGAEVAEGDTVVVLEAMKMENPVKAHKSGVVTGLAIAAGEGVTKGQVLLEIKDA

SEQ ID NO: 53887 - protein, 705 aa, Cornyebacterium diptheriae
MPQPKTQQSSRPSTTKYRYDLDGLRGIAIAFVVIFHVFVGRVSGGVDVFLLLSGYFFLGSQLRYAAKPNASLNPWWPLWRTIRRLLPALMVVLMSTVLIIESAIPELRTTNVADQALASVGYYQNWELSAQGSAYGAASSVVSPLQHLWSMSVQGQFYLAAIAFALFVSVVLKLRRRRGHEAERVRHLAGIPLIAVTVASFSYAVYLHPVDQPLNYYSTWSRVWELTLGAVLVLYSDKIRVSRAMGVVFTYLGLAMVLTTGLLFDGAQVFPGPGALYPLGGAALVILGQGHGAGWMKSRFMLWLGSIAYPLYLWHWPLLIMSTIYLGLDRPSTGLGISVIAVSVVLAHLTHKLIEEPFKQHAKRPERQARRVRSAAATLRKATGATRALAGVVVLALCGTALWIPSVWQKEVQALSKTQLDPVLYPGAMALVGGRVPQVKFAPDPYVLANSLSPAWTDGCMSELDDDPTKIANDNFGEEYCVYGDKNAKKVAYVIGGSHAEQWMAALDQIGRDHGLKIIPIVRQGCPAFAMEEDGVFSDDCATFNKVMLEKVRRDKPDLVISNSTRPLLEKLRGLDEVPESYRTLWVVLEKEKIPFIGLRDNPWFLDKDGQAWPLSQCIASGGSITECGKPREEIYSPVDPAARFLKSKTMISIDTADWFCPNGFCPGVIGNIYVYRDGNHISDAYALSLVPLLWEKMEPVVSQL

SEQ ID NO: 53888 - protein, 174 aa, Cornyebacterium diptheriae
MCPADVDEDALLDSLVGRSPADKVAALAQAKAEAIAGDYPDDVVIGGDSMLLLDGALQGKPHTVDKTIERWKQQRGKTAELITGHCVITPRGRHVETSTTTVTFAHADDADIEAYARTGEPLQCAGAFTLEAIGGWFIDSITGDPSSVIGLSLPVVRRALYAAGYNVSEFWNNN

SEQ ID NO: 53889 - protein, 237 aa, Cornyebacterium diptheriae
MMLLHWTTVAKASLDKKPLDVAKMFDGVGKNYDITNTVLSFGRDKKWREKTRERLQLKAGERVLDLAAGTAVSTVELTRSGAWVVACDFSQGMLAAGKDRNVPKVVGDGMKLPFADNSFDAVTISYGLRNVHDFRMALREMARVTKPGGRITIAEFSTPNLPGFKTIYKEYLTKLLPLIAKVVGTNPEAYEYLAESIRAWPEREELAAAINENGWHDAGWQNLSLGIVALHSAVKPS

SEQ ID NO: 53890 - protein, 330 aa, Cornyebacterium diptheriae
MGNGTRVDLGEQNLNEEIAAGMIRVEDLLREELSKGEDFLVEKVMHLAEAGGKRFRPMFALLASQYGSQPMSENVIKAAVVVEMTHLATLYHDDVMDEADKRRGVDSANFRWNNSVAILAGDILLAHVARLMADLGVETVAHFSETFAELVTGQMRETIGARDGDPIEHYLNVINEKTGVLIASAGFLGSMHAGASAEHVEALRAYGRAIGMVFQIVDDIIDIFSDTTDSGKTPGTDLREGVFTLPVLYALSEDTAVGEELRSILTGPLTDDATVAHALDLLARSTGRERALADVHRYLEEAERQLALLPQNSTTDALRSLAHYTVKRVG

SEQ ID NO: 53891 - protein, 101 aa, Cornyebacterium diptheriae
MSDQQPRPTGKRQLAGVSTTSTASYEAKKVAPTGGDDERNGNKVVSFVPEVASEMKKVIWPTAQQMMSYTLIVFAFLILVTALVAGVDFLAGLGVEKVLTK

SEQ ID NO: 53892 - protein, 263 aa, Cornyebacterium diptheriae
MSEENSFAEAFDEAVQNTISAEAEEFTADGELEVVEETAQEADLTGGEKNEDAEYKARLRKYTRELKKLPGAWYIIQCYSGYENKVKTNLDMRAQTLEVEDSIFDVVVPIEQAIELRDGKRKLVKRKLLPGYVLVRMDINDRSWSVVRDTPGVTSFVGNEGNATPVKHRDVAKFLMPQEATESEAVNAEGEKVVAMPTDSTKPKTAVDFEVGEAVTILSGAFASVSATISGIDHENAKIQALVSIFGRETPVELAFDQVEKIS

SEQ ID NO: 53893 - protein, 142 aa, Cornyebacterium diptheriae
MAPKKKVTGLIKLQIQAGQANPAPPVGPALGAHGVNIMEFCKAYNAATENQRGNVVPVEITVYEDRSFDFKLKTPPAAKLLLKAAGLQKGSGVPHTQKVGSVTMDQVKEIAQTKMEDLNANDIENAARIIAGTARSMGIEVK

SEQ ID NO: 53894 - protein, 235 aa, Cornyebacterium diptheriae
MGNKSKAYKAAAEKIDKGRLYTPLKAAELVKETSSKNCDATVDVAIRLGVDPRKADQLVRGTVSLPNGTGKSVRVAVFAEGEKATEAQAAGADIVGTTELIEQITAGTIEFDVAIATPDQMAKVGRVARVLGPRGLMPNPKTGTVTNDVAKAIAEVKGGKISFRVDKASNLHAIIGKASFDAEKLAENYGALLDEINRIKPSSAKGIYVKKVTLTSTFGPGVPVDPSIQKNYTQA

SEQ ID NO: 53895 - protein, 372 aa, Cornyebacterium diptheriae
MMKYVDEFRDPEAAKALLNRIEKDAAQLGEISLMEICGGHTHTIYRYGLENLLPDNIDLVHGPGCPVCVIPMGRVDDALWLASQPNVILTTFGDMMRVPGSTGSLLDARANGADVRFVYSPLDALKVAKDNPTKMVVFFAVGFETTAPSTAVTLEAAKRENVTNFAVFSNHVTIEPPLRVLVNDTKVDGFIGPGHVATIVGTDTFKFLPEEFNKPVVVAGFEPLDVLQTVDMLLQQFLRGTSEVGNQYARVVRPEGNTAALNLMSRVFRVRETFEWRGLGWIPNSGLGIADEYAQWDAEKLFDVPGRRIPDPVACECGSVLTGKIKPWQCRVFGTACTPQTPIGTCMVSPEGACAAYYNFGRINREEAAALR

SEQ ID NO: 53896 - protein, 203 aa, Cornyebacterium diptheriae
MRQLGLVSKIRRKKYNSYRGTVSHIADNVLDRRFTQDAPNKAWVSDVTEFRVAGTKVYLSPVMDLFDRTILAHTLSTSPNTQLTSRALADAIAMFSPGKGLIVHTDQGFQYQHASWRNLIESVGGVQSMSRKGNCYDNAVMENFFGHLKSEMYHDVYFTSVDELCQAIDEYILWYNTYRLQERFKGLAPMQYRNQTLAKTLTV

SEQ ID NO: 53897 - protein, 171 aa, Cornyebacterium diptheriae
MANPKNTESLAELKNRFADIDSVFVTEYRGLTVAQITELRRALGSDVQYSVAKNTLIKLAAKEAGIEGLDDILTGPTAVAFIKGEAVDAAKAMKKFASENKAFVIKGGYMDGNALSAAQVDAIAELDNRETTLAKLAGAMKGNLAKAAGLFNAPASQVARLGAALQEKKEA

SEQ ID NO: 53898 - protein, 484 aa, Cornyebacterium diptheriae
MSNPHSSAVIVLAAGAGTRMKSAKQKTLHSIGGRSLLAHSLHAAAGLSPQRIVAVIGHRREQVRPEVEAVAATVDCEISVAIQEQQNGTGHAVQCAMHELEGFEGTVVVTNGDVPLLRSETLRSLVDAHTAVPTAVTVLTMSLSDPTGYGRIVRNDEGEVTAIVEQKDGDEETLKITEVNSGVFAFDAAILRSSLGKLDSNNAQGELYLTDVLSIARTEGHPVRAYRAHDHRELAGVNDRVQLAQAGKILNQRLVEDAMRNGATIVDPDTTWIDSEVTIGRDVIIHPSTQLLGKTSIADNCVIGPDTTLTNMVIDEDAHVIRTHGFDSRIGAHANIGPFTYIRPGTVVGENGKLGGFVEAKNAQIGRGSKVPHLTYIGDATVGEESNIGASSVFVNYDGVNKHHTTIGSHVRTGSDTMFIAPVTVGDGAYSGAGTVIKEDVPAGALVVSGGKQRNIEGWVEKNRPGTPAADAARQAHAHETKEG

SEQ ID NO: 53899 - protein, 331 aa, Cornyebacterium diptheriae
MMGTGILANLLQIHAERLPGAHDLALAILIVAWALLLFLSVGFIVRVMRDPQVFTASVRAMAALPFWSTVSMGYLSVGSASTVVIPSYLPQWHDSIWVVNTWMWVFGTVVGVSTALVFAFRLIGVDRGDPTTVWGLAVVGPMVSSTTGANLAAHVPHGVVLWLQVASAACFFLSFYAGAVIFSCAYHHFWRVATIPVAASASAWIPLGMVGQSAAAAQAMALQAEHVLVQGFGQSVHQIAHTYGWIMVVVGIPMVAWACAVTLRGFRKRMPFSPGWWALTFPIGTLALGATLLGAGTQIQPLVWLGAVGTLCLVGTVTLCLVASARAVLRG

SEQ ID NO: 53900 - protein, 126 aa, Cornyebacterium diptheriae
MAKLTKDELIEAFKEMTLIELSEFVKEFEEVFEVTAAAPVAVAAAGAAPAAAEEEKTEFDVVLEDAGAKKIGVIKAVRELVSGLGLKEAKELVEGAPKAILEGANKDDAEAAKAKLEEAGAKVTLK

SEQ ID NO: 53901 - protein, 253 aa, Cornyebacterium diptheriae
MGRFHRHDDGTVHSHDHDHHGHSHDVGDHSGYETGRERIEVLEDIFHENDHCAADNKELFDAHQVRCINIMSSPGAGKTTVLQHVLRAAEGKVRVGVVEGDIETSLDADRLTGFGAQISLLNTGNGFGGECHLDAPMVSRALRGLDLDTLDVVLIENVGNLVCPAEFEVGEHSKAMIYSVTEGEDKPLKYPVMFRSVDAVVINKIDLLPYLDFDMELFMKNLRQVNPDAKVFEVSAKTGEGLDGWIEWLVGAK

SEQ ID NO: 53902 - protein, 1176 aa, Cornyebacterium diptheriae
MVVNIAGPPPREVLEGPILAVSRQTKANIPGAPERKSFAKITEPIEVPGLLDIQLNSFAWLIGTPEWRARQQEELGDSVRVTSGLEDILEELSPIQDYSGNMSLSLSEPRFEDMKNTIDECKDKDINYSAPLYVTAEFINNETQEIKSQTVFIGDFPMMTDKGTFIVNGTERVVVSQLVRSPGVYFDQTIDKSTERPLHSVKVIPSRGAWLEFDVDKRDTVGVRIDRKRRQPVTVLLKALGWTTEQITERFGFSEIMMSTLESDGVSNTDEALLEIYRKQRPGEQPTRDLAQSLLDNSFFRAKRYDLAKVGRYKVNRKLGLGGDNEGLMTLTEEDIATTLEYLVRLHAGETTMTSPTGEVIPVETDDIDHFGNRRLRTVGELIQNQVRVGLSRMERVVRERMTTQDAESITPTSLINVRPVSAAIREFFGTSQLSQFMDQNNSLSGLTHKRRLSALGPGGLSRERAGIEVRDVHASHYGRMCPIETPEGPNIGLIGSLASYARVNAFGFIETPYRKVENGVLTDQIDYLTADEEDRFVVAQANVEHDADGKITADSVTVRVKNGDIQVVAPESVDYLDVSPRQMVSVATAMIPFLEHDDANRALMGANMQRQAVPLVRSEAPFVGTGMERAAAYDAGDLIINKKGGVVENVSADIITVMADDGTRETYILRKFERTNQGTCYNQTPLVNIGDRVEAGQVLADGPGTHNGEMSLGRNLLVAFMPWEGHNYEDAIILNQRVVEEDILTSIHIEEHEIDARDTKLGPEEITREIPNVSEDVLKDLDERGIVRIGADVRDGDILVGKVTPKGETELTPEERLLRAIFGEKAREVRDTSMKVPHGETGKVIGVRRFSRDDDDDLAPGVNEMIRVYVAQKRKIQDGDKLAGRHGNKGVVGKILPQEDMPFMPDGTPVDIILNTHGVPRRMNIGQVLEVHLGWLAAAGWKIDTEDPANAELLKTLPEDLYDVPAGSLTATPVFDGATNEEIAGLLGNSRPNRDGDVMVDENGKATLFDGRSGEPFPYPVSVGYMYILKLHHLVDEKIHARSTGPYSMITQQPLGGKAQFGGQRFGEMEVWAMQAYGAAYTLQELLTIKSDDVVGRVKVYEAIVKGENIPDPGIPESFKVLLKELQSLCLNVEVLSADGTPMELSGSDDDEFDQAGASLGINLSRDERSDADIA

SEQ ID NO: 53903 - protein, 1266 aa, Cornyebacterium diptheriae
MFVPDKSVPAAQPPMLAGLLKVAATDPKIKGLLQHVGEPHLHITGIDQARPWAIAALAHRAPVLVVTATGREAEDLSAELRAMLGEKVAWFPAWETLPHERLSPGADIAGQRARILSHIADYSVVVTAARGFSQPIVSQVAGRDPLVLEVDSECSLEEATQQLVFRAYHHVDLVAKRGEFATRGGILDVFPTTAQHPVRVEFWGDEVSEIRGFQVADQRAIPDSDVSRVEVFPARELPITPEIAQRAAELAVKFQGNPTLQELLAKISDSIPSDGMEALIPALVDQPMVTLAELMPENTHIVVVGPEKIRTRVADLQATDAEFLAAGWEAAAMGADGPVATRGLDLDASSYRSYESLENTAQKHTMPWWTFAPPGMFEASDGDTLPLEFEPGPTPRGDLEQIDQMMALLLAHTRDGGAAAFIAPAQGAIKRMVERFKEQGIPTKVATPGWQPTLGEVTLYQAMSHAGLVFPKVRKQPGKPALPLVVITKTDLTGNRVGDIAGAKRRPAKRRHRVDPLALKTGDYVVHETHGIGRFLKMTERVIQSGDETSRREYIVLEYAASKRGQPADQLYVPMDSLDMLSKYVGGEKPTLSKMGGSDWKNTKKKARAAVREIAGELVELYAKRQSAPGHAFAPDSPWQHEMEDNFPYVETEDQMLAIDAVKADMEKPSPMDRVVVGDVGYGKTEVAVRAAFKAVQDGRQVVVLVPTTLLAQQHLSTFEERMAGFPVTIKGLSRFTSPSESKEILKGLADGSVDIVIGTHRLLQTGVQWKNLGLVIVDEEQRFGVEHKEHIKALRTHVDVLTMSATPIPRTLEMSMAGIREMSTILTPPEDRHPILTYVGAQEDKQVAAAIRRELLRDGQVFYVHNKVSDIEKKARELRELVPEARIVVAHGQMSEELLEQTVQGFWDREYDVLVCTTIVETGLDIANANTLIVENAHHMGLSQLHQLRGRVGRSRERGYAYFLYPKGATLTENSYDRLATIAQNNDLGAGMAVAMKDLEMRGAGNVLGAQQSGHIAGVGFDLYVRLVGEAVEAYRALADGKVADATEQGPKEIRIDLPVDAHIPEDYINSERLRLEVYRKLAASANDKDLALVVEEMKDRFGPVPHEVKRLLAVSRLRHLARATGLSDIGVQGTRIKLHPVELTDSKQVRLKRLAPSATYRAAAKAIQLPFPKEGAKVTDKQLRDVELLQWVADFIAEMFEHDRVSVTGEKLPDKVISVAQPMSPAAARAERVAQRAAVRRQARNDDEDYEDRREARRRKYRMR

SEQ ID NO: 53904 - protein, 1336 aa, Cornyebacterium diptheriae
MIDVNFFDELRIGLATADDIRRWSKGEVKKPETINYRTLKPEKDGLFCERIFGPTRDWECACGKYKRVRYKGIICERCGVEVTKSKVRRERMGHIELAAPVTHIWYFKGVPSRLGYLLDLAPKDLERIIYFAANIITSVDDEARHADQTTLEAEMLLEKKDVEADMESEIAERAAKLEEDLAELEAAGAKADARNKVKKAAEKEMQHIRERAEREIDRLEEIWQTFIKLAPKQMIIDETIYEELVDRYEDYFTGGMGAEAIQTLIRNFDLDSEAEELREIINNGKGQKKMRALKRLKVVAAFQRSGNDPAGMVLDCIPVIPPELRPMVQLDGGRFATSDLNDLYRRVINRNNRLKRMIELGAPEIIVNNEKRMLQESVDALFDNGRRGRPVTGPGNRPLKSLSDLLKGKQGRFRQNLLGKRVDYSGRSVIIVGPQLKLHECGLPKLMALELFKPFVMKRLVENDYAQNIKSAKRMVERQRPEVWDVLEEAISEHPVMLNRAPTLHRLGIQAFEPKLVEGKAIQLHPLACEAFNADFDGDQMAVHLPLSAEAQAEARILMLASNNILSPASGKPLAMPRLDMVTGLYYLTMDKNENEIGGQGAYASATEEGPAQGVYSSYAEAIMARDRGVLGLQAKIKVRISHLRPPVDIEAEQFPEGWNKGDVWLADTTLGRIMFNELLPWNYPYLEGVMVRKGGGTGKIMLGDVINDLAATYPMITVAQTMDKMKDAGFYWATRSGVTITMSDVLVLPNKEEILDRYEAEARKIERKYWEQGALTERERYDRLVELWKDATDEVGNAVEKLYPDDNPIPMIVKSGAAGNMRQIWTLAGMKGMVVNSKGDYITRPIKTSFREGLSVLEYFNNSHGSRKGLADTALRTADSGYLTRRLVDVAQDVIVREDDCGTKQGIRVPVAVEVKDAEGNVTGYTGHSLIETSVAGRVAATAVKDAEGNVMVEPGENLTDQLIDELIAAGVKEVKVRSVLTCQTPTGVCAKCYGKSMATGKLVDIGEAVGIVAAQSIGEPGTQLTMRTFHQGGVGGDITGGLPRVQELFEARVPKNRAPIASVAGTVHLDDEGNFYTLTINPDDGSDVVVYEKLSKRQGLATVRVPMESNPGAMIERTLAEGDHVEVGDRLLRGPADPHDVLEVLGRRGVEQHLVDEVQDVYRAQGVAIHDKHIEIIIRQMLRRGTVIESGSTEFLPGTLVDLSEAKAANAEALANGGQPAELRSEIMGITKASLATESWLSAASFQETTRVLTDAAINKRSDKLIGLKENVIIGKLIPAGTGISRYRNISVKPTEAARNAAYSIPTYGDSIYGDDGYGEFTGASVPLDEAYDL

SEQ ID NO: 53905 - protein, 498 aa, Cornyebacterium diptheriae
MTTPATIVEATSAKSHSVRIWTLIGLIIGSTVGSGIFSLPQNIASVAAPGAMFIGWLIAGIGMLAVAFVFQILAHRKPHLDSGVYSYVRAGLGDYIGFTSGWGYWLGSVIAQVGYATLFFSTLGHYVPLFNSDNRVASVIGVSLLTWVIFGILSMGVKQAAFMNAITTVAKLLPIFAFIILVAFLGFSWDKLTLDFWGESTGSSVFEQIQGIMLFTVWVFIGVEGASVYSKQARTRRDVGRATVIGFFTVLVLLVSVSTLSYGVLTQAELAALPDNSMANVLEAVIGTWGAALVSIGLCLSVLGAYVSWQMLCAEPVAMMAFDGLLPRKLGTINATGSPVIAQLISTIVIQLWVFVFFLNETTYISMVQLATVLYLLPYVFSSLYLILLATRGKGISHPAAGTRFDDSGPDVSAADNRRHLFVGAVAFVYSLWLFYAADLKYVLFGALAVLPGLIPYVWTRLYTKERVFNAFEWFVVALIIIAAGYGLSGIMTGSMSL

SEQ ID NO: 53906 - protein, 1655 aa, Cornyebacterium diptheriae
FSEVLDQLRENQSKAKYGIAFEKLMVNYFRTDPTLRNEFDEVVRWSDWRYNGGKVDTGIDLVAHRIEDDSWTAIQCKFYKPTTRIEKSNLDSFFEASGRAFQTEKGSEHFKNRLIISTTDLWSSHAEEALANQLIATNRIGIASIAESPINWDVVFPGSEIQINLSRREIFKPRPHQQTAIEKTLQGFATHDRGKLIMACGTGKTFTSLRLAEKVAENNGGKARILFLVPSISLLSQALREWTAQAGVDLRSFAVCSDSKVSKKKTEDISSYDLEVPVSTNGADIAERFSVGKRAKGLNVVFSTYQSLPAVHEAQAHGLEDFDLVICDEAHRTTGVTLAGEEASNFTKIHDANYIKASKRLYMTATPRLFDEAVKGKAAEHSAELASMDDEAIYGPEFHRLGFGEAVEKGLLTDYKVLIMTVDESVAAEAMARGAGQEINLTLASAMIGAWNGLAKRSGALQGKKGGFDEGSEPMRRAVAFARDIKTSKQIAESYPLLISNYQQSLKKKAALNDVSLHNIDLRIALKHVDGGMNAMERNNRLFWIESPIAEDETRILTNARCLSEGVDVPALDAVVFFNPRNSMVDVVQSVGRVMRKSKGKDYGYIILPVAVPPNVSPSQALNDNARFKVVWQILNALRAHDDRFNAQVNSIALNEGSLEQLPIQVDHTSDPKKKLDAVDGGAAEPYADPHEMSQQIALFSLEQWQEAMFVKLVDKVGTRTYWEDWADDVADIAQAQITRIEALVDGADDTLRAEFEAFVTGLRGNLNDSITESETISMLSQHLITAPVFSALFDAYDFAEHNPVAQVMQRMVDALSDAKLESETESLNKFYESVRVRASEVTSASGKQQVIKELYERFFRKAFKKQSEALGIVYTPVEIVDFILRAADDVSKKHFDRGLSDEGVCILDPFAGTSTFTVRLLQSGLIKPEDLARKYANELFATEITLLAYYVSAVNIETTYNALMAEAALRDGKPAPEYVPFNNIALADTFQIHEEGDVADLFMFKDNNATIDRQMKAPINVVIGNPPYSAGQTSANDLNANLKYPSLDARIAETYAAKSTATNKNSLYDSYLRAFRWATDRIGDQGVVAFVSNGGWLDGNTGDGVRLSMQDDFTDLYVFNLRGNQRTAGELSRKEGGKVFGSGSRSTIAITIGVKDPEKTGFDLHYRDIGDYLSAEEKLNIVNKNSLETLEWQEIVPNQWGDWLNQRSADFETWPVVGEKKGNSTKFFEAFSAGLQTNRDAWAYSFSETVLKESICKLGATYEQARNAFHETAFSSSGKGEARVNEFLKENPQYADSREISWSRSLRNSAFKNQEFAFAQDRVILSVYRPFTQQHAYFEKLLNHEQYQLPSMFPTPKHHNMGYYIPAASSAAREFNIQATNLLPDLCLSGSGSGQFFPRFTWRPVEAADGGLFAEGSVVKQSSEASAYGEIGEVVDGYVRVDNITGEIKALYREALGADISGDDIFHFVYGKLHDPVYRETYAADLKKMLPHIETPGSRAEFDKFAAAGAELMALHVGYEDVEPWPLDVEVKSSANPEDRETWRVLKMRWAKRKDPETGKSVNDVTKLIYNKDVTISGIPAEADEYMLGSRSALAWIIDRYQVKKDKASGIVNDPNDWADEVGNPRYIVELIGRVTRVAMETVRVVEGIKDGNI

SEQ ID NO: 53907 - protein, 210 aa, Cornyebacterium diptheriae
MITMSVMTVLLLDARWPSMIPFNLVGKLEGQLRFTDEVPVKVRWNLDDIVRFATDDLLVSTNELDPQVIAAINNGASVIEVPSRHDALGQAREVMRRAVARGEWEQTQTHESLLEYLDEETEEFAQAVAHGTTDHIVSELGDVLLQVLFHAEIGARHGEFNLDDVAASFVTKMQQRSPYLFDGSDGVVPIEEQERLWEAGKHRSAHAQTN

SEQ ID NO: 53908 - protein, 425 aa, Cornyebacterium diptheriae
MADIMHVFAREILDSRGNPTVEAEVFLDDGSHGVAGVPSGASTGVHEAHELRDGGERYLGKGVLNAVNNVNEEIADAIAGAEADDQRLIDQAMIALDGTENKSRLGANAILGVSIAVAKAAAESAGLPLYRYIGGPNAHVLPVPMMNIVNGGAHADSGVDVQEFMIAPIGAESFSEALRMGAEVYHSLKSVIKSKGLSTGLGDEGGFAPSVESTKAALDLIVEAIEKAGFKPGADIALALDVASSEFYKDGKYHFEGGEHTAEEMAKVYEQLIAEYPIVSIEDPLQEDDWEGYTALTAAIGDKVQIVGDDFFVTNPARLKEGIEKKAANALLVKVNQIGTLTETFDAVDLAHRNGYRTMMSHRSGETEDTTIADLAVALGCGQIKTGAPARSERVAKYNQLLRIEQQLDDAAVYAGRSAFPRFQG

SEQ ID NO: 53909 - protein, 276 aa, Cornyebacterium diptheriae
MRSSNPVLNSLTGTRQNYAQAGYQQQAFNPMSQYDQYGQSVTSAGAAERPMTVDDVVTKTGITVGVIIAFAVVNFALATVNPGLALILTGVGAIGGLITVLISTFGRKYGSAAVTLTYAAFEGLFVGGISLVLSGAMVGGQNAGALIGQAVLGTIGVFLGMLYVYKTGAVKVTPKFNRILTGSLIGVLVLALGNMVLGFFGINLGLYSGGPIAIIFSLFCIGLAAMSFLQDFDIADRLIRQGAPAKNAWGVALGLAVTLVWLYTEILRLLSYFNQR

SEQ ID NO: 53910 - protein, 136 aa, Cornyebacterium diptheriae
MELWKSYRNRKTVMPTIQQLVRKGRHDKTAKVATAALKGSPQRRGVCTRVYTTTPKKPNSALRKVARVRLTSGIEVSAYIPGEGHNLQEHSMVLVRGGRVKDLPGVRYKIIRGALDTQGVKDRKQARSRYGAKKEK

SEQ ID NO: 53911 - protein, 155 aa, Cornyebacterium diptheriae
MRKNAAPKRPIVKDPVYGSEVVTQLVNKVLLDGKKSTAERIVYGALDKCKEKTGIDPVLTLEKALGNIKPDLEVRSRRVGGATYQVPVEVRPARANTLALRWLVTFTRQRRENTMIERLANEILDAANGLGASVKRREDTHKMAEANRAFAHYRW

SEQ ID NO: 53912 - protein, 726 aa, Cornyebacterium diptheriae
MSEETKVCSLRLHKLGTTVAQEVLKDLNKVRNIGIMAHIDAGKTTTTERILFYTGINRKVGETHDGASTTDWMEQEKERGITITSAAVTCFWNGNQVNIIDTPGHVDFTVEVERSLRVLDGAVAVFDGKEGVEPQSEQVWRQAAKYDVPRICFVNKMDKLGADFYFTVQTIIDRLGAKPLVMQLPIGAEDDFDGVVDLLEMKAITWRGKVETGAEPVIEEIPADLADKAAEYREKLVETVAESDEALMEKYFGGEELTIEELKAGIRKLTVNSEVYPVLCGTAYRNKGVQPLLDAVIDYLPTPLDIGEVHGHKVGDETVDLVRKPSVDEPFSALAFKIAAHPFFGKLTFVRVYSGIVEPGAQVANSTKGKNERIGKLFQMHANKENPVDEARAGNIYAFIGLKDTTTGDTLCDKNDQIILESMDFPDPVIKVSIEPKTKSDQEKLGTAIQKLSEEDPTFTVELDEESGQTVIGGMGELHLDVLVDRMKREFKVEANVGNPQVAYRETIRKPVEKLEYTHKKQTGGSGQFAKVIIGIEPYAPEAETLEEGESATYKFENAVTGGRVPKEYIPSVDAGIQDAMQYGYLAGFPLVNIKATLIDGAYHEVDSSEMAFKLAGSQALKEAVAKAKPVLLEPLMAVEVITPEEYMGDVIGDINSRRGQVSAMDDRAGAKVVKAKVPLSEMFGYVGDLRSRTQGRANYTMIFDSYAEVPTNVAAEIVAERNGTA

SEQ ID NO: 53913 - protein, 396 aa, Cornyebacterium diptheriae
MAKAKFERTKPHVNIGTIGHVDHGKTTTTAAITKVLADAYPELNEAFAFDAIDKAPEEKERGITINISHVEYQTEKRHYAHVDAPGHADYIKNMITGAAQMDGAILVVAATDGPMPQTREHVLLARQVGVPYILVALNKCDMVDDEEIIELVEMEIRELLAEQDYDEEAPIIHISALKALEGDEKWTQSIIDLMQACDDSIPDPERETDKPFLMPIEDIFTITGRGTVVTGRVERGSLKVNEDVEIIGIREKATTTTVTGIEMFRKLLDYTEAGDNCGLLLRGVKREDVERGQVVVKPGAYTPHTEFEGSVYVLSKDEGGRHTPFFDNYRPQFYFRTTDVTGVVKLPEGTEMVMPGDNVDMSVTLIQPVAMDEGLRFAIREGSRTVGAGRVTKIIK

SEQ ID NO: 53914 - protein, 389 aa, Cornyebacterium diptheriae
MQLLAPATQAYAWGSRTLIQQLRGDAADSRPIAELWYGAHPSGPSVIDGERTLADVIAQDPATQLGHRVVTEHGNRLPFLLKLLAADQPLSLQAHPSKQQAEEGFSRENDLGIALGASNRNYKDDNHKPELLVALTEFHAMAGFRPLDKTRELFQALQCEKLNRYVGMLDSSPEHEGENLRALFTTWITIPVASRQQLIAAIIEAIDGLSTTSPEWIQVAARNVAQLNDRYPNDIGVLGALLLNYVVLQPGEAIYLSAGNLHAYVKGLGVEIMANSDNVLRGGLTPKYVDVPELVRVLRFESLEDPIVRSVAGRYEVPINEFALQRLHIDSEAEHNARLEHDGPMIAVCTSGELTINDVVLAPTQALWISADDPAVEVTGSGELFVASV

SEQ ID NO: 53915 - protein, 101 aa, Cornyebacterium diptheriae
MAGQKIRIRLKAYDHEAIDASAKKIVETVTRTGARVVGPVPLPTEKNVYAVIRSPHKYKDSREHFEMRTHKRLIDILDPTPKTVDALMRIDLPASVDVNIQ

SEQ ID NO: 53916 - protein, 218 aa, Cornyebacterium diptheriae
MSETEIKGILGTKLGMTQIFDEDNRVIPVTVVEAGPCVVTQIRTVETDGYNAIQIAYGEIDPRKANKPAAGHFKKAGVTPRRHVAEIRMDDVSGYELGQDVTVEIFEGINFVDVTGTTKGKGYAGAMKRHGFAGQGAAHGNQAAHRRVGGIGACATPGRVFKGTRMAGRMGSDRVTTQNLKVQKIDADANLILIKGAIPGVRGGIVTVKTAVKGGAHA

SEQ ID NO: 53917 - protein, 205 aa, Cornyebacterium diptheriae
MIIAIEGIDGAGKNTLVSAIKERFDADVIGFPRYEQSIHAKLAQRALYGSMGDLTDSAYAMATLFALDRYDAKAVLGRYVGTSKVVLLDRYVASNAAYSAARTRNDAMVQWVQELEFEELGLPVPDIHILLHTSPELAAQRAQRREATDASRKLDRYEEDAGLQERTFQAYESLAQQKWMSPWLLVHPDESPDTVTQRIIQALSA

SEQ ID NO: 53918 - protein, 429 aa, Cornyebacterium diptheriae
MTDDIRYQSLTELDPEVAAAITGELDRQRSTLEMIASENFVPRAVLQAQGSVFTNKYAEGYPGRRYYGGCENADIVEDLARNRAKEVFGAEFANVQPHAGAQANAAVLMALANPGDKIMGLSLAHGGHLTHGMHLNFSGKLYEVAAYEVEPDNFRLDMDKIREQALKEKPQVLIAGWSAYPRHQDFAAFRSIADEVDAKLWVDMAHFAGLVAAGLHPSPVPYADVVSTTVHKTLGGPRSGMILSKQEYAKKLNSAVFPGQQGGPLMHAIVAKAVAMKIAATEEFKDRQQRTLDGAQIIAERLTGADCKAAGVDVLTGGTDVHLVLVDLRNSQMDGQQAEDLLHEVGITVNRNAVPFDPRPPMVTSGLRIGTPALATRGFDAAGFTEVADIIATALAQGAGADTEQLRARVAKLAEQYPLYEGLEDWKLL

SEQ ID NO: 53919 - protein, 853 aa, Cornyebacterium diptheriae
MFGLSKMLRVGEGRAVKRLKKIADDVIALEADYTDLTDEELKAKTHEFQERIAQGESVDDLLLEAFAVAREASWRVLGQKHYPVQIMGGAALHFGNVAEMRTGEGKTLTCVLPAYLNALEGKGVHVVTVNDYLAKRDAEWMGRVHRWLGLNVGVILANMQPAERREAYNADITYGTNNELGFDYLRDNMVRSLDELVQRGHHYAIVDEVDSILIDEARTPLIISGPVDGSSQWYSVFAQIVPRMTRDIHYEVDNRKRTVGVREEGVAFVEDQLGIDNLYAPEHSQLVSYLNNAIKAKELFNRDKDYIVRNGEVLIVDDFTGRVLDGRRYNEGMHQAIEAKENVEIKNENQTLATITLQNYFRLYDKLSGMTGTAETEASELHQIYKLDVIPIPTNRPNQREDMTDLVYKTQEAKFAAVVDDISERVTKGQPVLVGTTSVERSEYLSQLLQRRGIKHSVLNAKFHEQEAQIVAKAGLPGAVTVATNMAGRGTDIVLGGNADIIADINLRERGLNPVDTPEEYEAAWDAELARVKEKGAELAEKVREAGGLYVLGTERHESRRIDNQLRGRAGRQGDPGTTRFYLSMRDDLMVRFVGQTMENMMNRLNVPDDVPIEAKMVTNSIKSAQTSVENQNFEMRKNVLKYDEVMNEQRKVIYTERREILESADIAADIQKMIDDTIGAYVDAATATGYVEDWDLETLWNALESLYGPSFSAQELIDGDSYGESGELSASDLRKAVLEDAHKQYAELEENVTAIGGEAQMRNIERMVILPVIDTKWREHLYEMDYLKEGIGLRAMAQRDPLVEYQKEGGDMFNAMKDAVKEETVRQLFLLRKQFAVANEQPAETEEGTVEA

SEQ ID NO: 53920 - protein, 338 aa, Cornyebacterium diptheriae
MTNLNPEIPDRNLALELVRVTEAAALASGRWVGRGMKNEGDGAAVDAMRKLINSVQMNGVVVIGEGEKDEAPMLFNGEQVGTGEGAAVDIAVDPVDGTTLMAEGRPNAISVLAAAERGSMYDPSAVFYMRKIAVGPEAAGTIDINAPVEYNIKAVAKAKGIAPDQVTVVVLDRPRHETLIKDIREAGAKVRLIRDGDVAGAVAAAQATNSVDIMMGTGGTPEGIITACAMKCMGGEIQGVLAPKDDAEAAKARNAGHELNRVLGTHDLVSSDNCFFVATGVTNGDMLRGVSYRADGATTRSLVMRSKSGTVRFIESTHKLHKLQEYSVVDYSQISPRK

SEQ ID NO: 53921 - protein, 375 aa, Cornyebacterium diptheriae
MHTHFGYLTVGYVWEGKNVMARTSKDRLSKVRKILGRFTTPLLPDDYSVLINPRWSTRELRGTIAAVRREADVVHLDIVPGWGVPTQFEPGQFIGIGVEVDGRYIWRSYSLTCTPTTSASLLSITVRAVEHGKLSNHLVGHATPGTTVRLSAPAGSFHLPTPLPPKLALIAAGTGITPIISMLRTMAERQQFAETDVVLVYSIRDRAHGLFLEALARMSTQHPQLRVVVQETSSQGRVTPETVASIVPDITSRTVFACGPSTMLDAYESWANKNHVNLTTERFLLDRKATTAQGGTVSFGQRASVLVDGATTVLEAGEQAGVQLPFGCRMGLCHTCVRPLTHGHATNLVTGETHEPGSRIRTCVCVAAGDITIEA

SEQ ID NO: 53922 - protein, 413 aa, Cornyebacterium diptheriae
MAAQPNAPESAWPVRELNSKVKSWIERLGHLWVEGQITQLNMKPSWKFSYITLRDPEAEASVQLTCATSLLHSLPSRLQDGDRVVVYGKPAFYEGRGSFSLWVTDIRPVGVGELLARIERLRQQLASEGLFDPALKKPLPFLPHTIGLITGRGSAAERDVLAVAHSRWPEVKFNVINTAVQGARAVPEIIEALQRLDADPSVDVIIIARGGGSVEDLLPFSEEALQRAVVAAHTPVVSAIGHEPDNPVLDNVADLRAATPTDAAKKVVPDVAAERQLIAELRSRSAAALRGWVHKERQQLAAVRSRPALADPVRAITLHREEIARSISSIRRDMRYMLSTERATVASLRQQVAALGPSATLARGYAVVQVVPRDGSAPEVVTTIGMSPPGSQLRIRVADGSITAAAMQTTPAD

SEQ ID NO: 53923 - protein, 426 aa, Cornyebacterium diptheriae
MAIDNIKAYVHLSDADIEEIGRRLDQIKAEVTQSLGARDVAYIKRLIRTQRSLEAAGRFALLFAGNKKCWWLGTGLLSTAKILENLEIGHNVLHGQWDWMNDPEIHSTTWEWDIVCPSSQWMHSHNFVHHTYTNVLGMDNDVGYGILRVTRDRKWTPLHAFQPAVNTVLAAMFQWAVGYYDVELGRYLTKRADWNDTKDKFWETTNKAGRQLARDYVFYPALARKAFPQAVKANAVANLVRSVWAYSVIFCGHFPDEAETFTKEQFKNEDHNQWYLRQMLGSANFYGGKLLTIMSGNLNYQIEHHLFPDMPSNRLAEVGEKVRALCDEYDLPYNVDSFPAQLFKVQKTLLKLTLPNKYLVASPDNAPEVRSNRAFSQNPEIENQLAGGSNGSGLRTGLKLLKRLRPSIKDAILIYSGRKPRGNQQR

SEQ ID NO: 53924 - protein, 361 aa, Cornyebacterium diptheriae
MSLTLGIVGLPNVGKSTLFNALTRNDVLAANYPFATIEPNVGLVELPDARLNRLAEIFQSERILPATVSFVDIAGIVKGASEGEGMGNAFLANIREADAICQVVRAFADDNVIHVDGRVDPSSDISVINTELILADLQTVEKALPRLEKEARKNKDLAETVEATKKAQAILEDDRTLFAASKNGEIDLALVRELHLMTAKPFLYVFNSDEEVLTDDARKQQLRDLVAPAEAVFLDAKTETELLELDEDEALELLESVGQTEPGLATLAKAGFATLGLQTYLTAGPKESRAWTIKQGSLAPQAAGVIHTDFEKKFIKAEIVSFDDLDAAGSIAEAKAQGKMRMEGKDYVMHDGDVCDFKIGG

SEQ ID NO: 53925 - protein, 281 aa, Cornyebacterium diptheriae
MIRKFARPMLASVYVADGVDVVLNSQAHVEGTQTVINRLRTVVPRKYMKKLPEDPQVITQAVGATKVLAGSSLALGKAPRTSAAVLAAISVPTIIARHAFWETQDREEKIARRQGFLTSIALLGGLAITSADTAGKPSLKWRADKAVQKASTQIQQALPTKTETEKFGDQASAVASQAASTAKDLWNDATDSVSQYGQTALEYVEDNKDDWLALAQKNAVLAKKKAVKVAARAQERAAQAYESAEKSTGRNAKRASKKANQLQRKAEKSLNKAMKRFDSAF

SEQ ID NO: 53926 - protein, 308 aa, Cornyebacterium diptheriae
MLRYIGRRLLQMIPVFFGATLLLYALVFLMPGDPVAALGGDRGLTEAARARISAEYNLDKPFLVQYLLYIKGIFQLDFGTTFSGRPVAEAMAHAFPVTIKLAVMALIFEAVFGVIFGVIAGMRRGGIFDSTVLVLSLLVIAVPSFVIGFVFQFFVGVKWGLLPVTVGSNVSVKSLLMPAIVLGALSFAYVVRLTRQSVSENLTADYVRTARAKGLKGSTVTMRHVLRNSLIPVATYLGADLGALMAGAIVTEGIFGINGVGGTMYHAILKGEPTTVVSFTTVLVIVYIIANLVVDLIYALLDPRIRYA

SEQ ID NO: 53927 - protein, 960 aa, Cornyebacterium diptheriae
MRKEESLVVDRLVVRGAREHNLKGVDIDIPRDAMVVFTGLSGSGKSSLAFDTIFAEGQRRYVESLSSYARMFLGQMDKPDVDFIDGLSPAVSIDQKSTNRNPRSTVGTITEVYDYLRLLFSRAGTAHCPVCDAKVERQTPQQIVDQVMDMEQGLKFQVLAPVVRTRKGEFVDLFADLATQGYSRVRVDGSIYSLSEPPTLKKQVKHDIDVVVDRLQVKASQQQRLTDSVETALKLADGVVVLEFVGLSEDDPQRFVRFSEKMSCPNGHALSVDELEPRAFSFNSPYGACSACDGLGTRTVVDTELLIPDTHAPALKAIQPWNSSPNHRYFEKLIEALAKAKGFDPATPFDELSEDQRDALIHGCQEEVTVRYKNRYGRVRTWTAPFEGVLGYIERKLDQADTESQKDRLLQYTREVACPTCHGSRLKPEILAVRLASSSHGELSIAGLSELSIQDASDFLQDLVLGKREEIIAGAVLKEINARLRFLLDVGLTYLTLNRAAGTLSGGEAQRIRLATQIGSGLAGVLYVLDEPSIGLHQRDNQRLISTLERLRDIGNTLIVVEHDEDTIRAADWLIDVGPKAGEYGGEIVYQGEPAGIVDCKESITGAYLSGKKVLGVPEKRRAIDPDRALKIVGAKENNLKGINVTIPLGVLACVTGVSGSGKSTLVNQILAKVLANELNRARTVPGRAQRVEGIDNLDKLVQVDQSPIGRTPRSNPATYTGVFDKVRNLFAETTEAKVRGYKPGRFSFNVKGGRCEACQGDGTLKIEMNFLPDVYVPCEVCHGARYNRETLEVKYKGKNIAEVLDMPISEAAEFFEPITSIHRYLKTLTEVGLGYVRLGQSATTLSGGEAQRVKLAAELQKRSNGRTVYILDEPTTGLHFEDIRKLMLVIQGLVDKGNSVIIIEHNLDVIKTADWVIDMGPEGGSGGGTVVAEGTPEQVAEVSGSYTGGFLKEVLSASK

SEQ ID NO: 53928 - protein, 560 aa, Cornyebacterium diptheriae
MSEKKQQPLLEMRDVRIAFTSTTGTVEAVRGIDLTIYPGQSVAIVGESGSGKSTTAMSIIGLLPGTGKVTDGQIIFDGQDITKYSEKQMQELRGSHIGLVPQDPMSNLNPVWRIGTQVKESLKANNVVPGSQMDERVTQLLEEAGLPDAARRAKQYPHEFSGGMRQRALIGIGLAARPKLLIADEPTSALDVTVQKRILDHLENLTHELGTAVLFITHDLGLAAERAEHLVVMHRGRIVESGPSLDILRNPQHPYTRRLVKAAPSLASARIQSAQEKGVESSEILATEKKTDEEIIRVENLTKIFNVRGQRGDKAELKAVDDVSFSLKKGTTLALVGESGSGKSTVANMVLNLIDPTTGKVYYKGTDLSTLGKKELFDMRRKLQVVFQNPYGSLDPMYSIFRCIEEPLLVHKVGSRKEREKRVAQLLDMVAMPRSAMRRYPNELSGGQRQRIAVARALALNPEVIVLDEAVSALDVLVQNQILQLLADLQQELDLSYLFITHDLAVVRQTADQVVVMQKGRVVEQGTTDELFLNAREDYTRDLINSVPGLGVELGTGENL

SEQ ID NO: 53929 - protein, 148 aa, Cornyebacterium diptheriae
MGIVRIDDARKLAYEADLDLVEVAPNAKPPVCKIMDYGKFKYEQAQKAREARKNQQQTVVKEQKFRPKIDDHDYETKKNNVIRFLEKGSKVKVTIMFRGREQSRPELGFRLLERLAGDVAEYGIVESKPKQDGRNMTMVFGPARKGKK

SEQ ID NO: 53930 - protein, 362 aa, Cornyebacterium diptheriae
MSAKPLPNRETYRFRGNDELTELPEHTLLNIIRIPGNPLVSPIRLIARRFGYALALIIIVALVVYLDEGGYSEHLTFIDALYYSAVSLSTTGYGDITPITQSARLLNIIIITPLRLAFVILLVGTTLSVLTEESRRAWKIQRWRKRMRNHTVVIGYGTKGRSAIAALLADGVAPKDIVVVDTDSVALEAANNAGLVTVNGSATKSEVLKLAGVPKAKAVVVAPNIDDTAVLVTLSVRELSPSAWIVASVRESENQHLLEQSGADSVVISSETAGRMLGLATVTPSVVEMMEDLLSPDEGFSVAERPIGEDEVGANPRHLADIVLGVVRSGELYRIDSPEAETVEPGDRLLYVRRVFSEDVRD

SEQ ID NO: 53931 - protein, 64 aa, Cornyebacterium diptheriae
MKQKTHKGTAKRVKITGSGKLRREQANRRHLLEGKPSKRTRRLKGTEDVAKADTKRIKRLLGKA

SEQ ID NO: 53932 - protein, 127 aa, Cornyebacterium diptheriae
MARVKRSLNAKKKRREILKSAKGYRGQRSRLYRKAKEQWLHSMTYAYRDRRARKSEFRKLWITRINAAARMNDITYNRLIQGLRLAEIEVDRKVLADLAVNDFAAFSAICEAAKAALPADVNAPKAA

SEQ ID NO: 53933 - protein, 272 aa, Cornyebacterium diptheriae
MPIDFSSPFTERTPRVVNAAKLLRSAGRKKVDRFLAEGENSVEAAVATGAATDLFVTEKAAERFEAIVTAAGHMGVFVHPITDRAAKSLSDTMTTTGIFAVCLPVLWSAREALKGNPSLVCVAVETGEPGNAGTLVRVADAMGADCVIFAGTTVDPQSPKAVRASAGSLFHIPVVREPDMQKVWQILRARNVQMLATAAQGEINLDTAGELLEKPTAWLMGNEAHGLNDEALSAADHSVRIPIRGRAESLNLATAASICMYESSKSQAHKDN

SEQ ID NO: 53934 - protein, 428 aa, Cornyebacterium diptheriae
MLNQFGQMLSGMGSSMNSPEGQGAVNYALAERIARQQIESAKAPAATEADTKAVTEAVNLVELWLDDATILPTASNKVEAWSANDWLTNTLPMWKRMVTPVAEHMAQAQLDSLPEEAREMVGPMMQMMNQMSGMNFGMQLGHALGDLATQTLSGTDFGVPIAPAGVTALMINNVRKETQGLKIEQREVLVYLAAREAARQRLLRHVPWLAEQIVASVEEYAAGLVIDTSHIEEAMREMNLESGDPAAIHEAMERMQNLDMSPRITSRNANAVSRLETLLALIEGWVEHVVTEAMGSRVPSTAALNEAWRRRRATGGSAEKAFAQVVGIEFGAPKVAEAQELWRRVDVAVGVEKRDHVWDHPDFLPVAEDLDNSAEFIDGLLDTASADEFDPIAEITKLEEMLSQQSEEQQKEQRENPSDPDEDSPKND

SEQ ID NO: 53935 - protein, 368 aa, Cornyebacterium diptheriae
MMSWLSITSANYDEEHRVSEQPDYPAVELTEEGLAQAADAAIRAFGVASNLDELNIARRDHLGDAAPIPQARRSLGTLPKDQRKDAGRLVNMARGRLEKHFAQVKEVLEAKHLEEMLKAERVDVTVPTTRHQTGALHPITTLSEKIADIFVAMGYEVADGPEIEAEYFNFDSLNFIPDHPARTLQDTFHVGEPGSSQVLRTHTSPVQMRTMLSREVPIYVVCPGRVFRTDELDATHTPVFHQVEGLAVDKGLTMAHLRGTLDHLAKTLFGPETKTRMRANYFPFTEPSAEVDVWFPNKKGGAGWIEWGGCGMVNPNVLKAAGIDPEVYSGFAFGMGLERTLQFRNGLTDMRDMVEGDVRFTLPFGVQA

SEQ ID NO: 53936 - protein, 836 aa, Cornyebacterium diptheriae
MLISQNWVTELLGRSNPDWKVSPAELDSGYVRVGFETEGYSAIPETTGPLVIGRVETIEELEGFKKPIRHCFVNVGDANGTGELQSIVCGARNFQEGSYVVVSLPGAVLPGNFAISARETYGRMSAGMICSAAELGLSDKQNSGIITLPNEIAEPGTDARSIVGLDDTVFDVNITPDRGYALSARGLTRELASAFNLKFVDPAVDLNVAGVDTSDVPESSGELIKVDLRPETQARRFGVRKVSGIDPKAPTPFWMQRELMLSGQRCVNAATDVTNFVMLLLGQPMHAFDANLIKGGLVVRNALEGESFETLDHVKRTLSAEDVVISDDTGIQSLAGVMGGTTSEISDETTDVFFEAANWHPITTARTSRRHKLSTEASRRFERGVDPEIIEVALDVACALLVSIAGGSVESARTLIGSAPSMPQIRMKTSRPAELAGVAYSDATVIARLKEVGCAVEVDGDDLLVTPPTWRPDMTMSADLVEEVLRLEGLEDIPTIVPLAPVGSGLSPAQLRRRAIGHALAYSGYAEILPTPFIRNDTFDVWGLAADDERRSVVTVQNPLDAEYGVLATTLLPSMLEAVTRNVSRGQTSVNLFGLQQVSFKRGSGISPMLDVRQRPSDNEVAELLNSLPVQPLHVATVGAGFMELEGPWGHGRTYSFADAIESARVVARAAGVELNVENVEMLPWHPGRCAALKAGDHIVGYAGELHPQIVEALNLPARTCAMELDVSALPLKESFPAPVLSAFPVLHQDLALVVDESVPAESVRKVIEDAAGELLEKVELFDVYRSEALGAEKKSLAFSLEFRAQDRTLTDDECSEGRLAAAGRAAELFGATMRA

SEQ ID NO: 53937 - protein, 636 aa, Cornyebacterium diptheriae
MTRPEFRNVAIVAHVDHGKTTLVDAMLRQSGAFDEHAELVDRVMDSGDLEKEKGITILAKNTAVRRRGAGKDGNDVVINVIDTPGHADFGGEVERALSMVDGVVLLVDASEGPLPQTRFVLGKALAAKMPVVILVNKTDRPDARIDEVVEESQDLLLELASALDDPEAAEAAEQLLDLPVLYASGREGKASTVNPGNGNVPDAEDLQALFDVIYEVMPEPTVNVDGPLQAHVTNLDSSSFLGRIGLIRVHSGSLKKGQQVAWIHYDEEGNQHTKTAKIAELLRTVGVTRVPADEVVAGDIAAISGIDSIMIGDTLADLEHPVALPRITVDEPAISMTIGVNTSPLAGRGGGDKLTARVVKARLEQELIGNVSLRVLPTERPDAWEVQGRGEMALSVLVETMRREGFELTVGKPQVVTQTVDGKLFEPYEHMVIDIPSEYQGNVTQLMAARKGQMLSMDNISDEWVRMEYKVPARGLISFRTMFMTETRGTGIANSYSEGLDEWAGEIKGRATGSLVADRSGQITAYALQQLADRGNFFVEPGTEAYEGMVVGANNRDEDMDVNITREKKLTNMRSATADATVTLAKARSLSLDEAMEFCGQDECVEVTPDVLRVRKVILNATERGRARAREKARNK

SEQ ID NO: 53938 - protein, 105 aa, Cornyebacterium diptheriae
MTYTIAQPCVDVMDRACVEECPVDCIYEGKRSLYIHPDECVDCGACEPACPVEAIFYEDDVPDEWIDYNDANAAFFDSLGSPGGAAKLGPQDFDADLVASLPPQV

SEQ ID NO: 53939 - protein, 422 aa, Cornyebacterium diptheriae
MGQCTERIIMSKNAANTDSQSSETQWADVIMNTYGTPPLTITGGNGATLTDSVGKTYIDLLAGIAVNSLGHAHPAIVEAVTEQISNFAHVSNLFGSRPVIDTAARLIRRFAEETTDSTQTAHDTRVFFCNSGTEANEAAFKLARMTGKNRILAAQHGFHGRTMGALAMTGQPDKQMPFYPLPAGVEFYPYGDIDYLRKLVQINSTDVAAIILEPIQGETGVIPAPDGFLSAVRGLCNEFDILMIVDEVQTGIGRTGDFFAFQHETGVIPDVVTMAKGLGGGLPIGACLATGKAKDLLGPGKHGTTFGGNPVSCAAAGAVLRTIDDDFLENVQRKSHKLVKRMSRLPLVESIRGRGLMLGVLLSEPVAKECVKLALEHGLIVNAPSASVLRLTPPLVISDAEIHESIERLSIVLTKIKKKECH

SEQ ID NO: 53940 - protein, 493 aa, Cornyebacterium diptheriae
MSPRKIGVTEVALRDAHQSLFATRMAMEDMVASCEDIDNAGFWSVECWGGATYDACIRFLNEDPWERLRTFRKLMPNSKLQMLLRGQNLLGYRHYEDTVVDKFVEKSKENGMDVFRVFDALNDPRNMERAMQAVKKVGGHAQGTICYTVSPLHTVEGYIEQAGRLLDMGADSIALKDMAALLKPQPAYDVIRGIKETYGEDTQINVHCHSTTGVTLVTLMKAIEAGADVVDTAISSLSLGPGHNPTESLVEMLEGTEYTTDLDMDRLIKIRDHFKTIRPKYKEFESKTLVDTNIFLSQIPGGMLSNMESQLTAQGAGDRIDEVMREVPIVRKDAGYPPLVTPSSQIVGTQAVFNVLMGRYKVMTAEFADLMLGYYGECIGERNAELVEQAKAQTKKEQITVRPADLLEPEWDHLVEEASKLEGFDGTDEDVLTNALFPGVAPGFFKTRPEGPKNVGKDPSKIKTRDNQAVLEPITYKVTVGGRSQTVKVEPAE

SEQ ID NO: 53941 - protein, 518 aa, Cornyebacterium diptheriae
MAKELSMAERLEKLAAAKAEVSLGGGQAKIDKQHEKGKLTARERIDALVDDGTFFETGMFAKHRTTHFGMDKANAPADGVVTGSGAVFGRPVHIASQDFTVMGGSAGETQSNKVAAMMEASATTGTPFIFINDSGGARVQEGIDSLSGYGKVFYQNVLLSGLVPQVSIIAGPCAGGAAYSPALTDFIIQTRKANMFITGPGVIKSVTGEEVTSDALGGADAHMTKAGNIHFIADDDEQAVLIAQKLLSFLPQNNTEEPPVVDPDPVVEPDPELRDIVPVEGKKGYDVRDIISRVVDRGDFLEVQAGYATNIVVGFARIVGRTVGIIANQPNVMSGVLDINSSDKGSQFIRFCNAFNIPLVTFVDVPGFMPGVAQEHGGIIRHGAKMLYAYSAASVPKVTIELRKSYGGAHLAMCSKDLGADRVFAWPTAEIAVMGAEGAVNVVFRKEIEAAEDKDAKREELIQLYKDTFSTPFMAASRGLVDDIIDPAETRLHIANALEVLTNKRVTRPAKKHGLGPV

SEQ ID NO: 53942 - protein, 470 aa, Cornyebacterium diptheriae
MTEHTAPTLTKGLKVRHLTMMGLGSTIGAGLFLGTGVGIKAAGPAVLIAYIIAGFIAVMIMRMLGEMGSVVPASGSFSEYADAGIGHWAGFIQGWVYWLATVAVLGAEITGASGFVASWLGVSPWIPALVFVAFFGLVNLMRVRAFGEFEFWFAFIKVAVLVVFLIIGSLLVLGLLPNHDFVGLSNVRAEGFAPTGLGGIAAALLAVAFGFGGIEVVAIASAESEDPQKSLVNAVRTTITRISIFYLGSVAIIVLLLPYSSLGKAKSAAESPFSQVLAMANIPGVVGVIEVVIVLALLSAFNAQIYASSRMMMSLAERRQAPNIFARVDNRGVPLPAIVLSVVLSVIMVILNYVDTGWLLTFLLNAAGASLLTVWTFIAVSQLKLRRRLEALQGNLAVRMWAFPGLTIATLAILFGLAILMLSDAGARIELLSAIAMVAILFAISLIAVKQPFDKALLPREASYPQNSPS

SEQ ID NO: 53943 - protein, 477 aa, Cornyebacterium diptheriae
MQKHGTNEGALWGGRFSGGPSEAMFALSVSTHFDWVLAPYDVLASKAHARVLNKAKLLSDSDLETMLGGLDKLGKAVASGEFKPLPTDEDVHGAMERGLIDIVGPEVGGRLRAGRSRNDQVATLFRMWVRDAVRSVALQVTELVDALAYQATQHPRAIMPGKTHSQAAQPVLLAHQLLAHAQPLLRDIDRIRDLDKRLAISPYGSGALAGSSLHLDPEAIAQELGFDSACDNSIDGTSSRDFAAETAYVLAQIAIDMSRLAEEIIYWCTPEYGYVTLSDAWSTGSSIMPQKKNPDVAELTRGKTGRLIGNLSGLLATLKAQPLAYNRDLQEDKEPIVDSFAQLNLLLPAMTGLVSTLTFHEDRLLSLAPAGFTLATDLAEWMVRQGVPFREAHEASGACVRIAESRGVGLDELTDDELASVDVRLTPEVRTVLTVEGAVASRATRGGTAGVRVEEQRSRVESTSQSFKEWALTPVRK

SEQ ID NO: 53944 - protein, 363 aa, Cornyebacterium diptheriae
MRHLCFSRLYRPLLFAAATTGAAFFAGPLAYADEVQSTPLPVTQPQPAPTLTQTVTSMVNSWGIPTPAIDPQIAAAVDTLAQQVQAFVAPVMPYADPQVAAPAPERHAVAQRPVDGPNYHWTNDPVSQVMAQKPGPVLHRVQGSWFNAPDIPEESLQAQAQGASLYGPGTPIYVGKDRLCTVGASGYDADGRKIAITAGHCGNVGDAVSSADSWQVGPSGTVVAKGSNLDYAVVELGSNAQVTQNYNNIRVNSVGGPMPVTGNTACKQGIATGFSCGLVWNHDHRTTASQVCAMQGDSGAPMLVGDRVVGIINGGMIPNVNYPCTTPWQGPFFVPTISTNMDAIVSDLNSKKSVGHGFRLANS

SEQ ID NO: 53945 - protein, 454 aa, Cornyebacterium diptheriae
MTQATTETELGTGLKTRHLTMMGLGSAIGAGLFLGTGVGIAAAGPAVLIAYVLAGIFVVFVMQMLGELAAARPASGSFSVYAEQAFGHWAGFSLGWLYWFMLTMVLGAEMTGAAAIMGQWFGIAPWIPALICVIFFAVVNLARVSGFGEFEFWFAFIKVAVIILFLVIGVLLIFGLLPNYDFVGTQHFLGDGFMPNGISGVATGLLAVAFAFGGIEIVTIAAAESEDPKTAIATAVRSVIWRISLFYLGSVLVICFLIPFSSIGGAKSAADSPFTIILGMANIPGVVGFMEAVIVLALLSAFNAQIYATSRIVHSFAERGDAPKIFAATNPSGVPMPAVLLSMFFAFVSVGLQYWNPAGLLNFLLNAVGGCLIVIWVIIAFAYLKLHPELVRNGEITTVRMWGFPWLGWVTIAGFLGLTVLMLTDDASRSQITSVTVVFLLLIVVSFFTKKKSK

SEQ ID NO: 53946 - protein, 420 aa, Cornyebacterium diptheriae
MNIIDELQWRGLINQSTDIDALREACEKPITLYCGFDPTGDSLHAGHLVPMIMLRRFQEAGHRPITLAGGATGFIGDPRDVGERSMLSQDTIEHNLESIKKQLRSFVRFDGDSPAIMVNNADWTMSMSVVDFLRDVGKNFSLNTMLDRETVKRRLETDGISYTEFSYMLLQANDFVQLNREYDCVLQIGGGDQWGNIVSGVDLNRRVSGTKTHALTVPLVTDAQGQKFGKSTGGGKLWLDPEKTSAYSWYQYFLNAGDSVVIDYLRWFTFLTQEEIAELETEVRERPHLRAAQRRLAQEMTDLVHGHDATVSVELAAQALFGRASLQDLDEATLDGALSETVIFEVPAGESPTIIDLLIGAGLVDSKGAARRTIKEGGAYVNNERIESEDWQPTDDVLLHGAWLVLRKGKKNFAGVKYSA

SEQ ID NO: 53947 - protein, 57 aa, Cornyebacterium diptheriae; identical to SEQ ID NO: 53864

SEQ ID NO: 53948 - protein, 138 aa, Cornyebacterium diptheriae; identical to SEQ ID NO: 53643
  MISC_FEATURE (27)..(27): X=any amino acid
  MISC_FEATURE (131)..(131): X=any amino acid

SEQ ID NO: 53949 - protein, 122 aa, Cornyebacterium diptheriae; identical to SEQ ID NO: 53644
  MISC_FEATURE (19)..(19): X=any amino acid
  MISC_FEATURE (24)..(24): X=any amino acid
  MISC_FEATURE (118)..(118): X=any amino acid

SEQ ID NO: 53950 - protein, 249 aa, Cornyebacterium diptheriae
MNVSVVIPALNEEATVADVVALSRRGSDEVIVIDSDSTDATAARAKAAGASVVNWRDVVSLPPIPGKGEALWRGVAAARGDVVVFLDADLTEISPTIVEDLARPFIDDSVMLAKAAYTRGDASGGGGRVTELTARPLLEAFFPELGFVRQPLGGEYAIRRSAALDLPFVGGYGVEVGLLIDVFRCFGAASIVEVEAGHRGHRHRPLRELAPMARVVASTILQRAGVASGLDGVGQRPAISSLESGVGKV

SEQ ID NO: 53951 - protein, 317 aa, Cornyebacterium diptheriae
MTIDCHEDRRVLLVPHTGRPQNVASAALAAELLDDSGVGVRVLVPAEDTTVATHPVLGQFERVSHSPQATQSVDLVLVLGGDGTFLRAADLAHGADLPVLGINLGHVGFLAEWEKDSLDEAVRRVTKGSFRIEERMTLDVSVYDSNGTAIGRGWALNEVSIENSNRSGVLDATLEIDSRPVSSFGCDGIIVSTPTGSTAYAFSAGGPVLWPELDAILVVPNNAHALFTKPLVVSPRSSVAVESHPSAFPATAVMDGFRSISVPPGARVEVKRGSRSIKWVRLDDIPFTDRLVTKLRLPVEGWRGPKNMIPQINPHSA

SEQ ID NO: 53952 - protein, 246 aa, Cornyebacterium diptheriae
MDDHNALLAERHTIFQSSLMTALLDGIYDGEISIGELLGHGNFGIGTFDALDGEMVILDGVCYQLRGDGSASEAALTQRSPFAIATNFVPRLKARVPRGMHRSELSDFITSLLPSENYMYAVRISGMFSSVSVRTVTKQERPYRPMTQATGDDAELEFTNVSGVVAGFRTPIYEKGIGVPGCHVHFIDTDRTSGGHVLDFTMSEGTIEVCPGTDLQLRLPLTQDFSKASLAPDDLDAQIHATEVKG

SEQ ID NO: 53953 - protein, 286 aa, Cornyebacterium diptheriae
MSNYRRDLERYTRWLQVQGITDIENISAQDIERYVQELRKGDSDTGKKPLAASSAARALIVARGLHRFALLENLVENDVSADVSPPAMGRHLPDTLSVEEVNRLIEAIPIDDAASPENLRDCALLEFLYATGARISEAVGLVVDDVAAIVENEGIVRITGKGNKQRIVPVGDQCLSALERYVVRSRPAMSKGKSHALFLNKRGGQLSRQSAWQILKNSAQRAGIEKDISPHTLRHSFATHLLEGGADVRVVQELLGHSSVTTTQIYTHVTADNLRFVWSRSHPRAH

SEQ ID NO: 53954 - protein, 441 aa, Cornyebacterium diptheriae
MVHRLEARRLAVMSQVTRVYAGRLAGMIVRGPDTDAIGRVRDVIVNVRPNGQPSRVLGLVVEMMNNRKIFLPMLRVAAIEPQEITLVSGSVSLRAYKPRNGEVAIIADIVGSKVHIDDPELDHLHGRPVEVADIELERTRTRDWAISRVAVIGERPKFGRRPELFTCPWSHVHGISAGGVGITDAAAELIAEFEDMRPADIATVLYELPDAQRANVAKELDDDRLADVLQEMSEDRQAELIETLDIERAADVLEEMDPDDAADLLGELDDDKADVLLELMDPEESAPVRRLMSFSPDTVGALMTPEPLILSPQTTVAEALALARNPDLPTSLASIVFVVRPPTATPTGKYLGCVHLQKLLREPPSELVSGILDPDLPPLWASDSQETAARYFATYNLVCGPVVDNDNHLLGAVAVDDLLDHMLPDDWRDTGIRPDETPKEV

SEQ ID NO: 53955 - protein, 437 aa, Cornyebacterium diptheriae
MFNTDELENNSFAQFDRDHIWHPYGPMPATVAPYVVAATNNTDIILDNGTRLIDGMSSWWAAAFGHGNERLKAAAHRQIDVMSHVMFGGLTHVPAIKLARQLCELTDEPLTKVFFSDSGSVAVEVALKMVYQYQLGQGHPERRRMLTWRGGYHGDTFATMSLCDPEGGMHAMWEGRVMDNVFASRPPLWGAASNEISAYIDHLDSLIDSTIAGIIVEPVVQGAGGMRFHAPEILKGIRQLCDQHGILFIADEIATGFGRTGNLFATQAAKVTPDILCVGKSLTGGFMSLAATITTDAVAESISSAAGGGALMHGPTFMGNPLACAVASEALSIIAEGDWKQQVAEIESELKKGLVPLASNPAVRDVRVLGAIGVVEMKEPVDMKRATHAAVNAGVWLRPFGRLVYTMPPFVCTHKQIQKISCAIASIVHTEQERFER

SEQ ID NO: 53956 - protein, 920 aa, Cornyebacterium diptheriae
  MISC_FEATURE (26)..(26): X=any amino acid
AWSPSPLRTITASFRVRNPVNSCAPXASYLSMMPSGMRSSNPSGIPYAPMRWASDLSNTGIDKNTRVMQLIEAYRSRGHLIADTNPLRWHQPGMPVPDHRDLDIATHGLTLWDLDRSFNVGGFGGKETMTLREVLGRLRAAYTLKVGSEYTHILDRDERLWLQDRIEAGMPKPSYAEQKYILQKLNAAQAFEDFLQTKYVGQKRFSLEGAEALIPLMDSAIDTAAGQGLDEVVIGMPHRGRLNVLVNIVGKPLATVFTEFEGHIEPKAAGGSGDVKYHLGAEGTHIQMFGDNEIKVSLAANPSHLEAVDPVMEGIARAKQDLLNKGDSTDGYSVVPMMLHGDAAFAGLGIVQETLNLAQLRGYTVGGTIHIIVNNQIGFTTTPDSGRSSHYATDLAKAYGCPVFHVNGDDPEAVVWVGRLATEYRRQFGKDVFIDMISYRRRGHNEADDPSMTQPEMYKLIDARNTVREQYKEDLLGRGELTTEDAEKVQRDFHDQMESIFNDVKETEKKPFEAQAGITSSQEVPHGLETNITREELVEIGQAYATAPENFEFHQRVAPVAKKRLEAAQNGGIDWGWGELIAFGSLAAGGKFVRLAGEDSRRGTFTQRHAVVYDPRTGEEFNGLNDLAERKGNGGKFLVYNSALTEYAGMGFEYGYSVGNEDAVVAWEAQFGDFANGAQTIIDEYISSGEAKWGQTSSVILLLPHGYEGQGPDHSSARIERYLQLCAEGTMTVAQPTTPANYFHLLRRHVLGGLKRPLVVFTPKSMLRMKAATSSVEDFTQMKKFQSVINDPRFVNGGLDKNKVKKIMLVSGKLYYDLAKRAQKDKRDDVAIVRIEMLHPIPFNRLKEAFDFYPNAEEIRFCQDEPANQGPWPFMHEHLPELIPGMLPMKRVSRRAQASTATGLSKVHAVEQQHLLDEAF

SEQ ID NO: 53957 - protein, 524 aa, Cornyebacterium diptheriae
MEILIGLLALLFATVIMVAVGDRTGLPWPVLLTLVAAGGIFLPWLPEVAIPEEMILPIFIPPLLWALARHSSWASIKRQWRTVVLLSVLLVIVTAVTVGLVAYLLVPTLSFAAAVVIGAAISPPDPVAVDAVAEPAGVPRRLSNTLQVEGLFNDAASIVVFNLALSVVQSGHDITWWSALSTLVYSAAVAVVIGFVLGTGCAKLHSWMTSSVARNAFTWVIPFATFIAAEELHASGVIAIVIAAIQFNSKSQAGAEDRLSGSAFWQVVELLFTGVAFGLIGISVRDAIHSAGANLWHGVWFGLVLALTAIAVRALWLYLLYVGNKKAGRRTGAPLRLQEVLLLTWGGMRGLVTLALVLSIPMTTGFAIYRELSIVALTVLLVTMVIPGLTLPALMRVLNLEEGPDAFGDYAREKLFVRARFAARQVLDSYSHDIPEEFMASLRRRFEHDINADEDDDDAMTPEERRKIQERRFALFNKVRLEALYASQAELLRARSERDVDPMIVDEVLFEIDSQIIAAEKSTR

SEQ ID NO: 53958 - protein, 321 aa, Cornyebacterium diptheriae
MNRTARRDGTPEKPRRGSQGGSRGDYGKPKRSHAKPQSANSGRPIKQRKQRDSEMLISNARPARHQHVGRREAGDGSTEGIRLQKVLAQAGVASRRHAEILIDAGRVEVNGKIVMTQGMRVNPNVDVIRVDGVRVNVNENLQYFVLNKPRGLQSTMSDDMGRPCVGDIVGERISAGQRLFHVGRLDAATEGLLLLTNDGELANRLMHPRYEVSKTYLATVLGEADKRLVKQLRDGIELDDGPAKADLVQIIDTFQGKSLIRIELHEGRKHIVRRMLKTAGFPVQRLVRTKIHTIQLGEQTPGAIRALNSSELASLYKAVGM

SEQ ID NO: 53959 - protein, 241 aa, Cornyebacterium diptheriae
MSTADSTALSNMPEGGLIVAVDGPSGAGKSTVCRRIASMLGAKYLDTGAMYRVATLHVLRQGINPSDTTAVVQATRELPLSVNDDPASREVILDGEDVSNEIRGRLVTQNVSAVAAILEVRENLVALQRELAATAHRCVVDGRDIGSTVLVDAPVKIFLTASAEVRAQRRYDQDVAAGRLTDLATVLADVKRRDELDSNRSVSPLAPASDATVVDTSTLTLDQVVDTLMTLIEKSAERTAR

SEQ ID NO: 53960 - protein, 305 aa, Cornyebacterium diptheriae
MDSLGEQPSNRAPVITISSGRYLAQIATYGGGIKSLTYDGRPLVETYPDDAFPPLNAGVVLAPWPNRTDAGAYDFQGQSYQLPITEPDRNNAIHGFVANAVWNIDLIRPARVILSTTIEPQQGWPWAIELAADYLLTDSGLRAQFTATTPHEAVPFGFGWHTYLSAQGAEVDKTTLRVGVDKQWMLDDRNLPTGELVQPTNDVSGGLPMAGKLLDDCFLAERTPVTTVLESQGVGVSMHCSEQFPWFQIFTPDPAWEMPYPGRGRSVAVEPMTTSPNGLNLGIDTIGAASPWHGTITISAYNKHS

SEQ ID NO: 53961 - protein, 547 aa, Cornyebacterium diptheriae
MSNAHNAPLGGNNSSDEDQETVFVYHTAHGEVDAQEAFVEEDVVVDGAGYASDGFDENDFDFDFEHDSEGNVVFDEADFGEADFGEDYTDEDWEELERAFGVGSRAIESENLCTVAIVGRPNVGKSSLVNRFLGRREAVVEDFPGVTRDRISYLADWGGRRFWVQDTGGWDPNVKGIHAVIARQAETAMATADVIVMVVDTKVGITETDSVMARKLQKSEVPVILVANKFDSDSQYADMAEFYALGLGDPWPVSAQHGRGGADVLEQILAAFPETPRATSIVEGPRRVALVGKPNVGKSSLLNKMSGEDRSVVDNVSGTTVDPVDSIVKLDKHLWKFIDTAGLRKKVKNAQGHEYYASLRTRGVIDAAEICIFMIDSSEPVSEQDQRVLAMILDAGKALVLVFNKWDLMEEDRRWELEREIDLQLAHIPWVKRINISAKTGRALQRLEPYMLEALESWDKRVTTGQLNNWLRATIAQNPPPMKGGRVPRVLFATQASTQPPTIVLFTTGFLDAGYRRYLERKFRESFGFEGSPVKIAVRVRERRSKK

SEQ ID NO: 53962 - protein, 564 aa, Cornyebacterium diptheriae
  MISC_FEATURE (561)..(561): X=any amino acid
FEALGLPDAILKAVAKVGFETPSPIQAQTIPVLMQGHDVMGLAQTGTGKTAAFALPILSRIDVKKRHPQALILAPTRELALQVADSFQSFADHLGDIHVLPIYGGQAYGIQLSGLRRGAQIIVGTPGRVIDHLEKGSLDISNLRFLVLDEADEMLNMGFQEDVERILEDTPEDKQVALFSATMPNGIRRLSRDYMKDPHEIQVKSQTRTNTNITQRYLNVAHRNKLDALTRILEVTEFEAMIMFVRTKHETEEVAEKLRARGFSAAAINGDIAQAQRERTVDQLKDGRLDILVATDVAARGLDVERITHVFNYDIPNDTESYVHRIGRTGRAGRSGEAILFVTPRERRMLRSIERATNAKLIEMDLPTVDEVNESRKAKFADSITESLEDDQVAIFRSLIKSYAEEHDVPLEDIAAALATQARAGSEFLMKEPPPEKRRERRDRDDRRGGRDRFDRDDRRGGRDRGSRFERNDDMQLYRLAVGKRQHVRPGAIVGALANEGGLSNKDFGRINIFVDHTLVELPKNMDPSVIDRLSDTRISGQLIHIEKDNGRPPRRNDDGXPRR

SEQ ID NO: 53963 - protein, 373 aa, Cornyebacterium diptheriae
MTVRFLHTSDLQIGMIRRFLDSDAQARFDAHRIAAITKLGEIAAQHDCEFIVMAGDIFEHNSLKPATFGRAMEALKKVPVPVYLLPGNHDPLTADSQLARTEVLDHVHVISHSEPIVIRPGVELVGAPLTAKTATRDLVRLALEPLSPAGTTTRIAVGHGQTLARDNEMKPDVIDLAFVEQRISEGVIDYLALGDTHSTESLGSTGQVWYSGAPETTDFVEFPSGGGEIDSGNALMVAIEDHQVFVEKVPVGKWTFEAVTWDINSFDDAQAFISHLTAYSEKENTVVKYALRGTVSMRTMQYLETECEKLRPIFAALYERRRLMDLHLEPREDELDQLGLSGFAQQTLHELVDRDDPVAHDALKLLFRLAKED

SEQ ID NO: 53964 - protein, 176 aa, Cornyebacterium diptheriae
MHNLNGTYVLDPAHSVIGFIARHAMVTKVRGNFGDFDATFTINDEDVQASATIKSASITTGNADRDAHVRGDDFFSTEAFPELTFTATDAIIKDEDSAKVTGDLTIKGVTKTVVLDVDIEGIAEDPFGNVRLGFEAKTKINRRDFGINFNAPLNTGGMLVSDEIKIEIEGSAIKQA

SEQ ID NO: 53965 - protein, 350 aa, Cornyebacterium diptheriae
MSLSSTVLLIVLLLLANAYFVASEFALVSSRKDRIENLIAQGQPRAQKVLLSMEHLSIMLAACQFGITICSLILGKVAEPAIAHFIEQPFHSLGLPAHLLHPVSFIIALGIITFLHILAGEMVPKNIALAGPETLALWLIPSLLWFMRLTRPIIAVMNWLARISLRAVGIEQKDELDSAVDPDQLVTMLSESRSEGYLDAEEHARLNKALRVEDRSLQEVMIPLNKVRSLNFGMRGPLLQELETAVAETGFSRFPVTGKDGSYLGYVHIKDVLDRFDHSSPDTIIHRSEIRPLIIVDAAGTMDEALQSMHSKSAHMAQVRDRGLLLGVITLEDLIEEYVGTFSDWTHEQS

SEQ ID NO: 53966 - protein, 136 aa, Cornyebacterium diptheriae
MTRGIDEELQSSQGLTTPEFSVLVSLSERPGHEIRLRDLCESLQWDRSRTSHQITRMQRRGLVTKTKCSDDARGVFVELTPEGEKRLREAAPGHVDVVRKLIFDVMTEEEAAVLRGYFQKVIDVQCGASTGNPLDD

SEQ ID NO: 53967 - protein, 261 aa, Cornyebacterium diptheriae
MRVALFSTCIGDAMFPDASKATALVLSRLGYEVVFPKGQTCCGQMHVNTGYQKEAIPLIKNYVDAFADDSIDYVVAPSGSCVGAVREQHEHIADRYGNAALKDGAHIAAKKSLDLSEFLIDVAGVEDVGAFFPHKVTYHPSCHGLRFIGLGDRPYRLLQNVAGMELIELPNKEECCGFGGTFSLKNAETSAAMVSDKTRNIELTGAEYITGGDSSCLMNIAGNLSRKHVGIRAIHMAEILASTKENPWTPTTAAYSREVML

SEQ ID NO: 53968 - protein, 484 aa, Cornyebacterium diptheriae
MTDQTQLAQIGIVGLAVMGSNLARNFAHKGHTVAVFNRSFEKTQALMDQHGDEGNFIPSATIEEFVASLEKPRRAIIMVQAGPATDAVINQLADAMDEGDIIIDGGNALYTDTIRRESEIAQRGLNFVGAGISGGEEGALNGPSIMPGGPDKSWEALGPLLESIAAQVGGTPCVTHIGPDGAGHFVKMVHNGIEYADMQVIGEAYQLLRYATEMQPSEIADVFKTWNQGDLDSYLIEITSEVLAQVDSETGTPLIDLIVDEAGQKGTGRWTVKAALDLGIATTGIGEAVFARALSGATTQRKAAQGNLPAGTLESLASLNIDKDQFVEDVRRALYASKLVAYAQGFDEIIAGSAEHNWDVDPRDLATIWRGGCIIRAKFLNRIVEAYDANPELPSLLLDPYFKTELESLIDSWRRVVVAATQLGLPVPVFASSLSYYDSLRAERLPAALIQGQRDFFGAHTYRRTDKDGSFHTLWSGDRSEVEA

SEQ ID NO: 53969 - protein, 391 aa, Cornyebacterium diptheriae
MSTPTGQPIGLGLPDAPLPVLAPRRKTRQLMVGNVGVGSDYPVSVQSMTTTKTHDVNATLQQIAQLTASGCDIVRVACPKTVDAEALPAIAKKSPIPVIADIHFQPKYIFSAIDAGCAAVRVNPGNIKEFDGRVKEVAKAAGDAGIPIRIGVNAGSLDKRIMEKYGKATPEALVESALWEAGLFEDCGFGDIAISVKHNDPVIMVEAYRQLAAQSDYPLHLGVTEAGPAFQGTIKSSVAFGSLLSQGIGDTIRVSLSADPVEEIKVGDQILQSLNLRKRGLEIVSCPSCGRAQVDVYSLAEEVTAALDGMSIPLRVAVMGCVVNGPGEARDADLGVASGNGKGQIFVRGEVIKTVPESQIVETLIEEAVRLAEAEGLEIEEGAGPQVKITR

SEQ ID NO: 53970 - protein, 292 aa, Cornyebacterium diptheriae
MPHSSTAFEHLPKPKNSAGRNLKAAISVGIGLGALVLLAIFVIPFGWYPLVAIAIAVATWEVERRLIEAGYLLQRWVMLIGGQVMLWLSWPFGPKGLVAGFVGVVLATMFGRLFHHGRSMPPKNYLRDTAVAIFVLTWIPLFGSFAAMLSLFETETAPGKYFIVTFMLCVIASDVGGYIAGVMFGSHPMAPAVSPKKSWEGFIGSVVFGMIVGAFTVSYLLGHQWWWGLVLGFGLVICATLGDLVESQFKRELGIKDMSAILPGHGGLMDRLDGMLPSAMVTWLVLSVISSV

SEQ ID NO: 53971 - protein, 185 aa, Cornyebacterium diptheriae
MIDEILFEAEEHMNTSVERTRDELVNIRTGRANPAMFNGVIADYYGVPTPITQMATISVPEARMLLIKPYEMSMMNEIENAIRNSDLGVNPTNDGQVLRVTIPQLTEERRRDMAKLAKSKGEDGKIAIRNVRRKGMDQLKKIQKDGDAGEDEVQAAEKELDKVTAKYVAQVDEVVAKKEAELMEV

SEQ ID NO: 53972 - protein, 243 aa, Cornyebacterium diptheriae
MTEGVQNERTGYKRVMLKLGGEMFGGGAVGIDPDVVQNVARQIASVARTGAEIAVVIGGGNFFRGAQLQQRGLDRNRSDYMGMLGTVMNCLALQDFLEQEGIDCRVQTAINMAQVAEPYLPLRAKRHLEKGRVVIFGAGMGMPYFSTDTTAAQRALEIDCEVLLMAKAVDGVYDDDPRTNPDAQLFHQITPREVIEKGLKVADATAFSLCMDNKMPILVFNLLTEGNIARAVAGEQIGTLVQS

SEQ ID NO: 53973 - protein, 275 aa, Cornyebacterium diptheriae
MANYTAADVKKLREITGSGMLDCKKALEETNGDFDKAVEVLRIKGAKDVGKRAERNATEGLIAVSGNTMVEINSETDFVAKNAEFKEFAQKVADAAAAVKANTPEELAAADLDGKTAADAIQELSAKIGEKLELRRAITLEGEKLSVYLHQRSADLPPAVGVLVAYTGEGEAAQAAAHAAAMQVAALKAQYLTREDVPAEVIEKERSIAEQITREEGKPEKAIPKIVEGRLNGFYKDVCLVEQASVADSKKTVKQVMDEAGVTLTGFARYEVGQH

SEQ ID NO: 53974 - protein, 458 aa, Cornyebacterium diptheriae
MSTLIAIVHSATLFLLLLPWIGEFVGAMPYIALSIFLSLYSILWGAPLAKLLSTRKGWITAPFVLLAVEWLRSNYPFGGFAWVRLAWGQIGGPLAPLAAWGGPALVSFATVLVGALIFALLQRTNTRLALTISAIMSIVTASAWFNLSSSESQESTGQHQVTVAAVQGNVPRLGLDFNAQRRAVLANHVQETRKLTEQVDFIVWPENSSDVDPFADVRARNLINSAVASVQAPIVVGTVTTDEVGARNAMVVFDPETGEGDWHVKKFLQPFGEWMPWRDFFRKFSSLVDLAGDFKPGEGSGVVRVHAAQLGETVKLGISTCYEVAFDQAGRDAVLAGAQILATPTNNATFGFTDMTYQQLAMSRMRAIELDRAVVVAATSGVSAIVTPRGEVLQHSKIFESATLVQSLPLKETITFSARYGTLLEKVLVIIGTLCAVSALAIRRKMPQASSRAPRKKN

SEQ ID NO: 53975 - protein, 266 aa, Cornyebacterium diptheriae
MAVVTMRELLDAGVHFGHQTRRWNPKMRRFIFTDRNGIYIIDLQQTLTYIDEAYEFVKETVAHGGTILYVGTKKQAQESVKNEAERVGMPYVNHRWLGGMLTNFQTVSKRLHRMKELQAMDAAENGYEGRTKKEVLMLTRERTKLERVLGGIADMTKTPSAMWVVDTNKEHIAVSEAHKLNIPVVAILDTNCDPDVVNFPVPGNDDAIRSIDVLTKVISHAVIEGKKAREERALAAAKEAAGDANKTEVAAKVEATEEVAAEAEAK

SEQ ID NO: 53976 - protein, 257 aa, Cornyebacterium diptheriae
MTVYFIGAGPGAADLLTLRAHNIIKSAQVCMYAGSIVPPEVLESVPQNAEVINTARMPLDQIMEKIVAAHKNGHDVARLQSGDPSIYSAVAEQARRLTALGIDYQIVPGVPAFAAVAAALGHELTVPTVGQTVILTRVSGRASAMPQGEDLPTLGKSGATLCIHLAAHDIDRVVSELLPQYGEYCPAAVVAYASRPEEAIVRGTLADIAEKTRSAEITRTAIIVVGKVLGAEGFPDSFLYSNDRPRDEHGRTIPCAH

SEQ ID NO: 53977 - protein, 172 aa, Cornyebacterium diptheriae
MPQRPIAQLQALTDSKKLSAAKRAELYPLIKKYALAWSIIHISAAEIDREGIQHANIFGMRRAIEKLDVAPGYVLTDAMKVPGLRCPSLPIIGGDAAVRCIAAASVLAKHSRDLIMDDLGGKYPEYGLEDHKGYGTKSHMDAVRHHGATPEHRYSYSNVKAAHDQWLQEKTQ

SEQ ID NO: 53978 - protein, 264 aa, Cornyebacterium diptheriae
MAETAARVLKVSSANNETVSPTEGVETHDKEKKQLPWFVEIPVVVVVTLLVITLLQTFVGRVYMIPSQSMEPTLHGCAGCTGDRIYVDKLAYRFGEPEAGDVVVFAGTESWNTGFTTSRSENPLVRGIQNAGAFVGLVAPDENDLVKRIVATGGQTVQCLEGDEGVKVDGKVIDSSYTLMPPAYPVDQTTGSEACGGFYFGPIKVPEGNYFMMGDNRTNSADSRYHIGDQYQGTIPKENLKGKVQFKIFPFNRIGAVEDYDIQQ

SEQ ID NO: 53979 - protein, 270 aa, Cornyebacterium diptheriae
MLAVSGLARSTFFDHQRRLDKPDKYADLKEQITTIFHDSNATFGYRRIWRALRNNNTIVNKKVVQRLMREQGLVSKIRRKKYNSYRGTVSHIADNVLGRRFIQDAPNKVWVSDVTEFRVAGTKVYLSPVMDLFDRTILAHTLSTSPNTQLTSRSLADAIAMFSPGKGLIVHTDQGFQYQHASWRTLIKSVGGVQSMSRKGNCYDNAVMENFFGHLKSEMYYGASFTSVDELCQAIDEYILWYNTYRLQERFKGLAPMQYRNQTLAKTLTV

SEQ ID NO: 53980 - protein, 160 aa, Cornyebacterium diptheriae
MHPRSKLSQAQRELAVDLFEEGYGSRAVANRLGVRREQVRHLEDRFRLHGRLCLVSKRTKRQYSFDTKMEILRRHKAGELKSDLAKEYGLSSPALINHWVWQVNKGGPDALRPKPKGRPKSSARPAPVTEEDKLRRENELLKAEVAYLKKLRDLRDQRRG

SEQ ID NO: 53981 - protein, 156 aa, Cornyebacterium diptheriae
MSKLHIVFDNPVIPNNTGNAIRTSAVTGASLHLIEPLGFNFEDKNLKRAGLDYHDLADVHIHSNFDACMNALPHSRVFAFSSHATTWYTDIEYKDGDVLLFGTEPTGLPTEHLEHPRITQQVRIPMLPARRSMNLSNCASIAIYEAWRQLGFEGAQ

SEQ ID NO: 53982 - protein, 160 aa, Cornyebacterium diptheriae; identical to SEQ ID NO: 53980

SEQ ID NO: 53983 - protein, 203 aa, Cornyebacterium diptheriae
MREQGLVSKIRRKKYNSYRGTVSHIADNVLGRRFIQDAPNKVWVSDVTEFRVAGTKVYLSPVMDLFDRTILAHTLSTSPNTQLTSRSLADAIAMFSPGKGLIVHTDQGFQYQHASWRTLIKSVGGVQSMSRKGNCYDNAVMENFFGHLKSEMYYGASFTSVDELCQAIDEYILWYNTYRLQERFKGLAPMQYRNQTLAKTLTV

SEQ ID NO: 53984 - protein, 113 aa, Cornyebacterium diptheriae
MNLLDKVDAASLRDDIPAFRPGDTLNVHVKVIEGSKSRIQVFKGVVIRRQGAGVRETFTIRKVSFGIGVERTFPVHTPNIDKIEVVTRGDVRRAKLYYLRDLRGKAAKIKEKR

SEQ ID NO: 53985 - protein, 758 aa, Cornyebacterium diptheriae
MIAATIAKELGVKQSQIETALTLLAEGNTVPFIARYRKEATGGLDDSQLRIIEERASYLRELEERKHSIAEAIEEQGKLTDELRRKIFECDTKARLEDLYLPYKKRRKTKADNAREAGLEALVDELIAHPSADSEQRAQPYITAGFEDSKKVLEGARAILVDRFATDADLVGDVRERMYSTGTMRAGVVAGKETEGAKFKDYFEFSEAFDSLPSHRILALLRGENEGVLQLDLDAGDDEIYQGMIADRFKLDTNSAWLAQAIRWGWRTKLQVSAALDVRMRLKEKAEAGALEVFARNLRDVLLAAPAGQRATLGLDPGYRNGVKCAVVDATGKVLDTVIVYPHQPQNQWTQAVQTLASACATHHVDLMAIGNGTASRETEKLAHEVADLLKKAGGARPTPVVVSEAGASVYSASEAAAREFPDMDVSLRGAVSIARRLQDPLAELVKIDPKAIGVGQYQHDVNQTALAKTLDAVVEDAVNAVGVDLNTASVPLLARVAGVSPTIAENIVHYRDEHGAFVNRTALKKVPRLGPKAFEQCAGFLRISGGKDPLDASAVHPEAYPVVRKMSEATGLSVEKLIGNSHVLSSLRPSDFADERFGIPTITDIVAELDKPGRDPRPEFKTATFKEGIENISDLKPGMVLEGTVTNVAAFGAFVDVGVHQDGLVHVSALSDSFVSDPHQFVHSGQVVRVKVVDVDTQRKRIGLTMRLNDDPAKPRQRSETRERSGAKQKRSGSKTKNSPAANGSLADALKRAGFGH

SEQ ID NO: 53986 - protein, 292 aa, Cornyebacterium diptheriae
MRLDVITIFPEYLDPLRHALLGKAIEKDLLSVGVHDLRLWAEDAHKSVDDSPFGGGPGMVMKPTVWGPALDDVATMSGKAHMGAQLDSARVHVDKPRHDELEGIQFAGYDAAEVAEADKPLLLVPTPAGAPFTQEDARAWSNEEHIVFACGRYEGIDQRVIEDAKKTYRVREVSIGDYVLIGGEVAVLVIAEAVVRLIPGVLGNTQSHQDDSFSDGLLEGPSYTKPREWRGLEVPEVLTSGNHAKIERWRREQSLKRTWEVRPELLDGMELDRHDQAYVEGLRRGNTSDNLN

SEQ ID NO: 53987 - protein, 166 aa, Cornyebacterium diptheriae
MELMIGRVVKSHGIRGEVAIEVTTEEPEIRFAQGEVLNGRQGGKEHSLTIASVRPHQNRLLVKFKEIADRTAADSLRGTRFFAAPLDDDVDDGFYDHELEGLAVIHGEEKIGEVSGVIHGPAQSLLEVTLESGKEVLIPFVHDIVPEVDLDAGTCVITPPEGLLEL

SEQ ID NO: 53988 - protein, 157 aa, Cornyebacterium diptheriae
MAVKIKLQRLGKIRTPHYRVVVADARTRRDGKVIENIGIYEPKQDPSVIKIDSERAQYWLGVGAQPTEPVLALLKVTGDWQKFKGLEGAEGTLKVAEPKPSKLELFNQALAEANEGPTAEAITEKKKKAKEEAAAKAAAEAEAAAKAEEAPAEEAAE

SEQ ID NO: 53989 - protein, 531 aa, Cornyebacterium diptheriae
  MISC_FEATURE (33)..(33): X=any amino acid
VSIGTLKDNGSGCCCAASPISTCHMVAGEIKFXRRVRLVFESLSDRLGNALSGLRSKGKVTEADINTVAREIRLALLEADVSLPVVRGFISRIKDRALGVEVSKALNPAEQVIKIVDEELTGILGGETRRLNLAKNPPTVIMLAGLQGAGKTTLAGKLAKHLVEQGHTPMLVACDLQRPGAVQQLTIVGERAGVPTFAPDPGTSIDSSDHEMGTSHGDPVAVAQQGIAEAKRTQHDIVIVDTAGRLGIDEALMTQARNIRDAINPDEVLFVIDAMIGQDAVNTAEAFRDGVDFTGVVLTKLDGDARGGAALSIREVTGKPIMFASTGEKLEDFDIFHPERMSSRILGMGDMLTLIEQAEKKLDQQQALETAQKLGTGELTLDDFLNQMLMVRRMGPLGNILKMLPGGKAMSDMADMVDEKQLDRIQAIIRGMTPAERNDPKILNASRRKRIALGSGVSVAEVNQLVERFFEAKKMMNKMAGQFGMGGGSRSATKKKPKGRKGKNGKRKPAKNRQWRNAEYGRYAGYAEHGG

SEQ ID NO: 53990 - protein, 625 aa, Cornyebacterium diptheriae
MISAEPTAALALLDISHCSGDPQLTATTRCVVLEQWRRELKKNFNDVTDTAIARWNRSGSVVDMTHPDLKHGRGGLRDIELIRALALGNLCDKRPLGEERQLLLNIRTMLHQHAGRARDVLDPEFAVDVALDLGCEDRYDLSRSLAKAARTIDDATNAALSTARNLLPRRSSVRKAVRRPVDIDVVEVDGTLALSRTPNLEDPSLVLRVAAASARTGMTISESAWKQLETVPSMPPTWPSAAASNFFALLSSSVHSQRVIRELDEHGFWSAMIPQWEHIRGRMPRESVHIHTIDVHSMVVTANCATQSIRVARPDLLFLAALFHDIGKGYGRRHEEVGAEFVVDMATTLRLNPSDTQIVETLVAQHTIIPHIVGRYNPTSTEAIDKLLDAVNYDLLTLDLLEALVEADAQGTAPGVWSAVLRYGTRELCAQARQRLTAIVPNPPSLSAVSPLSLTVVKDTLPTGKNYAAEVEWSGDYVREIVRVLALIAAKEWNIESAEIVVVSSDDEPASENGSVGVSARMRVYNRLGTRFDSAEFEQAYKSGVHSSLPPLDRGKCASFWVGNILEVRTTDRRAALGHLLGVLPDLKWARMSNPGATMIVQCELKDGFDRSKVERDVTRVLTNG

SEQ ID NO: 53991 - protein, 281 aa, Cornyebacterium diptheriae
MLKIAIPNKGSLSEAAVEILAEAGYAGRGESKTLNVYDKTNDVEFFFLRPKDIAIYVAGGQLDLGITGRDLATDSHANVEEVMSLGFGNSSFRYAAPADQKWTVEMLEGKRIATSYPNLVRDDLQARGINATVIRLDGAVEISIKLGVADAIADVVSTGRTLRKQGLATFGEVICQSEAVIVGQQGNVVDNEQKVFLRRIEGILHAQNYLMLDYNIDRVNLAASEKITPGISGPTVSPLARENWVAVRAMVPRKEANHIMDQLSELGAQAILASEIRIARL

SEQ ID NO: 53992 - protein, 516 aa, Cornyebacterium diptheriae
MNLIPIVVIIAVVVIFAVVIGVIIAQRNKKAKTVSFESAADSEQKQLTQQQRSGNYQAQGEFSFAPAQAPMAVKDAVPATPPVGSIQEPELPHEEAPIVDSEQPLDHQVESESDADKAAEEAQAVVEEAAQLREEEQLRVETEQAARDNFDALEEFDKPQPDTNNAAETEAQEAALAADVVAEAAAEAREVSEPSDVEEAPVAEAVTDSIDPAVGRIGRLRGRLARSHNVFGKSVLGMLSAGDLDEEAWEDIEALLIQADLGVGITTAVIDQLRQLIAERGVENEAQARAMLRECLINACKPELDRSIKAMPYDGKPAVVLVVGVNGTGKTTTTGKLARVLVSLGHSVVLGAADTFRAAAADQLETWGRRVNAHTVRGAEGADPASVAFDAVAYGVDSHADVVLIDTAGRLHNSSNLMDQLGKVKRVVEKKAVVDEVLLVLDATTGQNGLAQARTFSEVVNITGVVLTKLDGTAKGGIVFQVQEELGVPVKLVGLGEGSDDLAPFEVEGFVDALLG

SEQ ID NO: 53993 - protein, 1200 aa, Cornyebacterium diptheriae
MNTATPQFKTAFLDAMKNRVLIGDGAMGTQLQGFDLDVDSDFLGLEGCNEILNHTRPDVVSAIHRAYFEAGADLVETNTFGCNLPNLADYDIADRCKELAFKGVKIAREVADELGPSADGTPRFVLGSMGPGTKLPSLGHAPYEALKNHYTEASLGMIEGGADAILVETAQDLLQVKAAVHGCQTAFETSGIQLPIVCHVTVETTGTMLLGSEIGAALTAIEPLNVDMIGLNCATGPDEMSEHLRYLSRNAHIPVSVMPNAGLPVLGKNGAEYPLTEQELASALRGFVEEYGLSMVGGCCGTTPTHIREVRKAVLGDSEHQPALQAERNPDVGDAVSSLYTSVNLTQDTGITMIGERTNANGSKAFREAMLVGDLEKCVDIAKQQTRDGAHMLDLCVDYVGRDGTADMAQLASLLATSSTLPIMIDSTEPDVIQVGLEHLGGRCAVNSVNFEDGDGPDSRYQRIMRLVKRHGAAVVALTIDEEGQARTAEKKIEIAERLIADITSTWGLDESDIIVDTLTFPISTGQEETRRDGIETIEAIRELKKRHPKIHTTLGLSNISFGLNPAARQVLNSVFLNECIEAGLDSAIAHSSKIVPMNRIDEEQRRVALDLVYDRRSEGYDPLQTFMRLFEGVSAASASDARAEALAAMPLFKRIAQRIIDGEKAGFEDDLDAGMKEKEPLQIINEDLLEGMKTVGDLFGSGQMQLPFVLQSAETMKHAVAYLEQFIEADEDAGDGNGTIVIATVKGDVHDIGKNLVDIILSNNGFNVVNIGIKQPIANILEAAEKHKADAIGMSGLLVKSTVIMKENLQEMNQAQKSDYPVILGGAALTRAYVEDDLTEVYEGNVHYAKDAFESLRLMQEFMAEARGERLDPQSPEALAAAKKKAERKARRERSKQIVAQRKAKEIPIEVPERSEVAADVPIATPPFWGTRIVKGINLSEYLPLLDERALFVGRWGLKATRGGEGPSYEELVETEGRPRLRYWIDRLKAEKILDHAAVVYGYFPAVSEGDTVILLESPDPTSAEVARFNFPRQQRGKFLCVADFIRSREHAIKTKTVDVFPLQLVTMGQPIADFANVLFADNNYRDYLEVHGIGVQLTEALAEYWHARIRHELSLSDGSHAGDEDSADLQEFFNLKYRGARYSFGYGSCPNLEDRETLVDLLDSRRIGVDISEEFQLHPEQSTDAFVLYHPEAKYFNV

SEQ ID NO: 53994 - protein, 1161 aa, Cornyebacterium diptheriae
MYLKSLTLKGFKSFASATTLKFEPGICAVVGPNGSGKSNVVDALSWVMGEQGAKNLRGGKMEDVIFAGAGDRKPLGRAEVTLTIDNSDGALPIEYTEVSVTRRMFRDGGGEYEINGHKARLMDIQELLSDSGIGREMHVIVGQGRLSQILESRPEDRRAFIEEAAGVLKHRRRKEKAQRKLVGMQANLDRLSDLTAELGKQLKPLARQAEAARKAATIQSEVRDARLRIAGYQIHSLASSLKDAQSHHDSIAEKLEEVTEQLEEATGVQLEAEDALGKISPEAEKSQQLWFELSSLAERVSATQRIATDRAKNFSEVRYSGPDPDELAEKAARADAEYAEAEETVDILSERLESIQDNVAELEEQAQRADREHLAQVRAIADRREGIVRLLTLESQQREHIVAAEAELERLREAESDIAAQARSKDAEHKDCQTQAQEARSRIEPLSQSRDAALNESRAADSRLEQLREQQSDIDKSISRLESKIETLESHRMTRNAVKQWEKLQSFYGVDRYIIPQRGMEKAIAAALGPVAEALVGETTTAELQALDIESLARHIVITPGEDHDWRLATDLPHYASWLLDYVELAPEVSSTIVQILADVVLVDSYEHGREVVNHDPRLRAVCVDGTMWGHGWVAVGSAERSAVEIAAEIDQAEKDLEVARLQRVELAGTLNGAHQAADEARVRSAQAQAVCREQEIVVENFSRRVEAVSHEAEARKQELRRHALRVQEAQDRLNQLRQLWEETSDRLSRVEEDNSEEEPSTSERDKAAAALSHMRSMEVEARLSLRTAQDKAEHIRGRGDGLRRQAEYERQARARHDQAVARQRRKAEIASVVAQQCLVVAERVDDALARATQWKENAIAQRGVISARVSAAKDTVSALRTNANRLTEKSHAAELSLGQAQVRLEEAHEKIVEQLGIAISDLMRDYTPHEGFDIGAQRVRLKNAEKDLNALGKVNPLALEEFKALEERYEFLSTQLADVEQARRDLHGVINDVDTKILQLFTDAWKDVEAEFPQVFATLFPGGEGRLVLTEPHDMLTTGIEVEARPPGKRVKRLSLLSGGEKSLTALAMLVAIFRARPSPFYVMDEVEAALDDVNLRRLIALFQELRDDSQLIVITHQKPTMDVANVLYGVTMRGDGITRVISQRMTPDVTKLPEPQPAE

SEQ ID NO: 53995 - protein, 296 aa, Cornyebacterium diptheriae
MPELPEVEVVRRGLTPYVLGATITDVAVEHPRSIRTIEGGAAELIGSLQGREVTRIGRRGKFLWFELTGHGDYACGFPQQGLLVHLGMSGQMLIKTQNSALHPHRRIRTTIVRSDAQECFELWFVDQRTFGYWAPTTFVETAHGCVPEQITHIARDLLDPQLKRENLARLIRKKNSEIKRVLLNQEIVSGIGNIYADEMLWAARIHPQTPASHLSVAQLSNLLEHGQRVMNAALDQGGTSFDSLYVNVNGQSGYFDVSLHAYGQQGQACDRCGSNIIREKFANRSSHFCPRCQLMH

SEQ ID NO: 53996 - protein, 495 aa, Cornyebacterium diptheriae
MPPLIGFLAAGFIMSALGLEQIPFIDYIAELGVTTLLFTIGLKLNPHDIASPRVVGTATAHAVVNTIVFAGLFALFAIVGWTGLLYIGIAASFSSTVFVMSQLEVHSRSGSAVGRISIGVLVLQDIIAVGVLVVSAGTTPQLWALFLPLILCLRPLVTRMPDRMFRTELLVLTGVGIAVGAYSFFELAGVSGSLGSLVAGIVLSGHPVSQRLSHALISVRELLLVAFFIHIGLGGIPNAAGLGIAAILVAFLAVKAAVFFAILPLMGMGVRTTILAGLTLANYSEFGLIVTAVAVSHGALPDQWLPIMAIAVGASFIVGSIVSAQEEKLVRILARFVPKVSEHRKAPNERPVIVAGADAIVLGMGRVGVGVYDRLTEEYGMHVYGIEFDEDRIIELRDRGYRIVAGDVTDPELWRRIELLDIPQLFAMSLPRYTDSDKVLARIHHDYPGATVATITQTRGREQALLTAGADVAVYLYEGVGDELADQAVAHLRQG

SEQ ID NO: 53997 - protein, 312 aa, Cornyebacterium diptheriae
MTRKIILDCDPGHDDAVAMLLAAANPNIELLGITTIGGNQTLPKVTHNAQVVATIAGITAPIHAGCSRPLVRDVEVAESIHGDTGMEIHNYTLPEPAVGVSDTHAVDFIIDTIMSHEPGTVTLVPTGPLTNIAMAARKEPRIVERVQEVVLMGGGYHVGNWSPVAEFNIKIDPEAAHIVFNEKWPLTMVGLDLTHQALATPEVEARLSAIGSDVADFVVALFGAFRKNYQDAQGFDNPPVHDPCAVAYVIDPTVFTTVKVPIDVELTGALTTGMTVADFRAPAPADCHTQAAVALDFDKFWGLVESAVKELS

SEQ ID NO: 53998 - protein, 448 aa, Cornyebacterium diptheriae
MSPIDEKVQGYYELLLKRNPAEPEFHQAVNEVLDSLKIVLEKDPHYADYGLIQRLCEPERQLMFRVPWVDDNGVVQVNRGFRVQFNSAIGPYKGGLRFHPSVNLGIIKFLGFEQIFKNSLTGLPIGGGKGGSDFDPKGKSDVEIMRFCQSFMTELYRHIGEYRDVPAGDIGVGGREIGYLFGQYRRLANQHESGVLTGKGLTWGGSLVRTEATGYGLVYFTAEMLAHHGQSFEGKKVIVSGSGNVAIYAIEKAQELGATVIGFSDSSAWVETPNGVDVAKLKEIKEVRRERVSSYVDEVEGAILHTEGSIWDLTCDVALPCATQNELDGEHAKKLADNGCAFVAEGANMPSTADAIEVYRERGIHFGPGKAANAGGVATSALEMQQNASRDSWSFEYADQRLREIMKGIFKNCESTAREYGHEGDYVVGANIAGFKKVADAMLAQGVI

SEQ ID NO: 53999 - protein, 473 aa, Cornyebacterium diptheriae
MERRTKIVCTLGPAVASREGILGLVKAGMNVARMNMSHGDHADHEKNYQWVREATDETGRAVGILADLQGPKIRLGRFIDGATVWENGEIVRITVDDIEGTHDRVSTTYKNLAKDAKPGDRLLVDDGKVALRCVEVDGNDVVCEVVEGGPVSNNKGVSLPGMDISVPALSEKDIADLRFALNLGVDIIALSFVRSPADVELVHAIMDEEGRRCPVIAKLEKPEAMDALESIVLAFDGIMIARGDLGVECPLEQVPLFQKRAIQIARENAKPVIVATQMLDSMIENLRPTRAEASDVANAVLDGADAVMLSGETSVGIDPANVVRTMSRIVSYAEIDGRVPNLAHIPRTKRGVISYSARDIAERLNAKALVAFTSSGDTAKRVARLHSQLPLLVFTPHQEVRSQLALTWGVETFLTDEVKDTDEMMRTIDEQLLALDTYSEDDMIVLVAGTPPGVQGNTNMIHVHHLGEDLNGL

SEQ ID NO: 54000 - protein, 87 aa, Cornyebacterium diptheriae
MANIKSQKKRILTNEKARQRNQAIRSAVRTEIRKFRAAVAAGDKAAAEAQLRVASRALDKSVTKGVFHRNNAANKKSNMAHALNKMA

SEQ ID NO: 54001 - protein, 428 aa, Cornyebacterium diptheriae
MNNADVRSQERKQVMVCARAAHRVAPIVAQLTSADKNAVLLDAAAALEAAGAEIIAANQRDIDQGRARGLSEALIDRLSLDSARIAGIAGGLRQVAALSDPVGEVVGGSVMPNGMQMRKVRVPLGVMGMVYEARPNVTIDAFGLALKSGNVALLRGSKSAQHSNAALVAVVHRVLESHGLPHEVVQLLPCETHESVQDLITARGLVDVVIPRGGAGLIEAVVTNATVPTIETGTGNCHFYIDRDVSDLDQAIAMLLNGKTRRCSVCNATETVLIDSALDSAYQLAIITALQEAGVTVHGDVAQLEAVGASGIVPADEHDWAEEYLSLDIACALVDGVDAAMEHIRTYSTKHTEAIATGNIVTAQRFADRVDAAAVMINASTAFTDGEQFGMGAEIGISTQKLHARGPMALPELTTTKWIVQGTGQTRP

SEQ ID NO: 54002 - protein, 508 aa, Cornyebacterium diptheriae
MARFVDRVVLHLEAGDGGNGCASVHREKFKPLGGPDGGNGGHGGDIILTVSPQAHTLLDLHYRPHLKAQRGANGAGDHRNGARGQDLVLEVPAGTVVMSESGETLADLTSPGMTFIAAKGGFGGLGNAALASAARKAPGFALKGEPGEQHDVILELKSMADIGLVGFPSAGKSSLISVMSAAKPKIGDYPFTTLQPNLGVVDMGNDAFTIADVPGLIPGASQGKGLGLDFLRHIERTAVLAHVVDAATLEPGRDPISDIEALEEELAAYQSALDEDTSLGDLRERARIVILNKADIPDALELAEFLKEDIEEKFGWPVFIISAVARKGLDPLKYAMLDLVQQSRKKRPKQKVEERIVVRPQAVDARKKNKDFEILADPQVENGYLVVGEKPERWIIQTDFENDEAVGYLADRLARMGVEDALWKKGARAGCTVTIGEVSFEWEPTTAAGVEVQMSGRGTDMRLERNTRVSAQERKRASQVRRGLIDEYDFGDDQKVTRESANRDRWQG

SEQ ID NO: 54003 - protein, 88 aa, Cornyebacterium diptheriae
MAHKKGASSSSNGRDSEAKRLGVKRFGGQQVNAGEILVRQRGTKFHPGENVGRGGDDTLFALKAGAVEFITKRNRRLVNIVENETVDA

SEQ ID NO: 54004 - protein, 101 aa, Cornyebacterium diptheriae
MYAIVKTGGKQYKVAEGDFVKVEKIEGEPGSSVALTPILLVDGADVTTKAADLAKVSVTAEIVEAVKGPKIKILKYKNKTGYKKRQGHRQQLTVLKITGIK

SEQ ID NO: 54005 - protein, 339 aa, Cornyebacterium diptheriae
MPQSLISELHTQYAQFVRKHPHAERDFSDALEDVLTDAGLTYDRVSARIKDWHSLKTKARKKNAQGAFIYPHPWDDVHDIIGVRITTLHSTEIPQIIEALADVFTVERSVDKTALTRISGSFGYGSHHLILKIDDRVKDLNNYVGMVFEVQIRTVLQHAWAEFEHDIRYKRSGDLDPQIDRAFTLAAGLIELADQQFDLIAAIQEPQKHSPNLEVDITAETLPGVIAMLVGSRFPQSRSEHYRWLEELLFAHSITTAAQLKELLNDRDIEAVRKALNYKFKPGQVRIIDDLLLYRYGTKHIEATGETGKNPRLRLPRLNERLRILNKHAPRNRSDLQQS

SEQ ID NO: 54006 - protein, 902 aa, Cornyebacterium diptheriae
MTNRADKLPKSWDPQAVEKDLYEGWVEKGYFTADPSSSKPAFSIVLPPPNVTGQLHMGHALDHTLMDGIARRKRMQGYEVLWLPGMDHAGIATQTKVEAMLKETEGKSRWDYSREEFIEHVWEWKRKFGGTIGTQMRAIGDSVDWSRERFTLDEGLSRAVQTIFKQMYDRGMIYQANRLVNWSPILETAVSDIEVVYKDVEGELVSIRYGSLNDDEPHVIVATTRVETMLGDVAVAVHPDDERYADLVGTTLPHPFLPDRQMIVVADDYVDPEFGTGAVKITPAHDPNDYALGLRHNLDMPNIMDATGHIAGTGTQFDGMDRFEARVKIREALAEQGRIVKEVRPYVHSVGHSERSGEPIEPRLSLQWWVKVEKLATMAGDAIREGDTVIHPKSSEPRYFDWVDDMHDWCISRQLWWGHRIPIWYGPEDAEGNRDIVCVGPDEQPPAGYEQDPDVLDTWFSSALWPFSTMGWPDKTPELDKFYPTSVLVTAYDILFFWVARMMMFGTLAGETTPEILGQGTDGRPQIPFNDLFLHGLVRDEQGRKMSKSLGNGIDPMDWVERFGADALRFTLARGANPGVDLPVGEDSAQSSRNFATKLFNATKFALMNGAEVGTLPERSELTDADRWILDRLEEVRVSVDDYFDRYQFAKGNEALYQFAWGEFCDWYLEIAKVQIPRDMEAASAQEQARGRNTQIVLGQVLDALLRMLHPAMPFVTEVLWKALTDGESLNVAEWPTAAMTNGGVATDEVAARRMADVEKLVTEIRRFRSDQGVKPSQKVPGAVDFAAADLAAQEDLVRSLARLDQPAEDFAASASIEVRLSQATIEISVDTSGTVDKEAERKRLDKDLAAATKELETTAKKLGNESFLAKAPEAVVAKIRERQQIAQEEVARISARLEELK

SEQ ID NO: 54007 - protein, 1186 aa, Cornyebacterium diptheriae
MAKKSSFVHLHNHTEYSMLDGMAKVDMLAEEVVRQGMPAVGMTDHGNMFGSDAFYRAMKAAGVKPIIGIEAYMAPGSRLHKERVRWGEPHQKSDDVSASGAYLHQTMLAENVEGLHNLFYLSSMASYEGQLGKWPRMDAELIAEHATGIIATTGCPSGDVQTRLRLGQFDQALEAAAMWQDIYGKENYFLELMDHGLEIENRVRSELLEIGRKLDLPPLVTNDCHYVLESQAPAHEAMLCVQTGKTLSDPDRFKFDGSGYYIKTAEQMRETWDSLVPQACDNTLWIAERVQDYGEIWEPHPHDRMPIADVPEGHTPTSWLRHEVHEGLRMRFNGGAVPQNYLERAEFEIDVIDMKGYPSYFLIVAELIKHARSIGIRVGPGRGSAAGALVAYALTITNIDPMEHGLLFERFLNPERPSAPDIDIDFDDRRRGEMIRYAAQRWGEDKIAQVITFGTVKTKQALKDSARVQYGQEGYKMADRITKELPPAIMAKDIPLSGIMDPEHPRYGEAGEVRHLIETDPDVRKIYDTARGLEGVVRQAGVHACAVIMASVPLLEHIPMWKRANDGALITGWPYPACEAIGLLKMDFLGLRNLTVIGDCLENIKINRNEELDLEALQTDDPNVYKLLSSGDTLGVFQLDSGGMQELLKRMQPTGFNDIVASLALYRPGPMGVNAHWDYADRKNGRKPIEPIHPELEEPLKEILEETYGLIVYQEQIMEISRKLANYTAGEADGFRKAMGKKKPEVLAKEYKKFSEGMFSNGYSKAAVDALWGTIEPFASYAFNKSHAAGYGLVSYWTAYLKANYTAEYMAALLTSVADKKDKSAIYLSNCRHLDISVLSPDVNESHLNFMPVGEDIRFGLGAVRNVGEDVVAAIIKAREEKGAFTDFSDYLDKIDITACNKRVTESLIKAGAFDSMDHPRKGLLLIHEDAVDAVTSTKKAADKGQFDLFAGLGADAEEVNNVFAVQIPDAQWDKKHQLALEREMLGLYVSGHPLDGYEEALEAQTDTPLTTILSGELRNGAEVTIGGIISGVDRRYSKKDGSPWAIVTVEDHHGAQVDLLVFNKIYAIVGPQIVEDNIILAKAHVSIRDDRMSLFCDDLKVPELGPGNGAGLPLRLTLRTDQCTMENIAKLKQVLSNNKGDSDVYLNVVHGEEKTVMILGEHLRVNRSGNLMGDLKATMGPGILG

SEQ ID NO: 54008 - protein, 430 aa, Cornyebacterium diptheriae
MTRMQESADLLKCSFCGKSQKQVKKLIAGGGVYICDECIELCNEIIEEELNSSAAEAKDNGDRLPRPSQISAFLDKYVIGQDDAKRILSVAVYNHYKRVRAEESRTTHKRASEEETELQKSNILMLGPTGSGKTYLAQTLARLLDVPFAIADATSLTEAGYVGEDVENILLKLLQAADFDVQRAQRGIIYVDEVDKISRKSDNPSITRDVSGEGVQQALLKILEGTVASIPPQGGRKHPNQDFIQLDTSNILFIVAGAFAGLEKVIEERRGKKGIGFGAELTTKADTDAVDVFRDVLPEDLVKFGLIPEFIGRLPIVATVNNLDQASLVKVLTEPRNSLVKQYQRLFDMDRVDLEFDPEALQAIADLAIDRGTGARGLRAIMEELLVPVMYDIPDREDVAVVRINEAAVRGLQEPEMILHSQKDEEEKTA

SEQ ID NO: 54009 - protein, 841 aa, Cornyebacterium diptheriae
MQRAHILVVDNFDSFTYNIVDYLHRCGARTHVVTNNVSPEDIDLDRYHGIVISPGPGHPSVAEDVGISAWVLQTAQCPVLGVCLGMQLMVTSEGGCVDRAPEAVHGRVDTLNIVAADELFAGLPRTFSIVRYHSLAAITVPPSMEVTSSNPEGIVMSIRHRSSPWWGVQFHPESIAGDFGVEIIDRFVDLCTPQYRTDEVELCCSPVELFHALGGRGALLEFEGTAIIAIPSGQVAHHIEELEVSGISVAPEAWAPPGWYGYIGYEANDATFGTAVHAPKPAEFPTTAMMYCTEVIAIRGDRAQITAPSSRWGRLRDAVVAASKSVPTVPSFNPTGIGRLHVRDSRERYMATIERIQEAIRAGETYEVCLTTELFAEVHGEVHPAAMYQALSTAVPAPMRSLVVTDDVAVISASPERFITMNDRMVSSSPIKGTRKRSADREEDRALADDLRTNPKDRAENLMIVDLVRNDLARVCESGSVRVPELCALHSFTTVHQLISTVEGQLRPTSMPIDVLRATFPGGSMTGAPKHRTMHLITELEGKQRGVYSGCIGYIGDDLRTDLAMVIRTVVLTPTTLSYGVGGAIIALSDPAEEWAEITTKSRVLLDLLGQDFPQSLIIDSFLVNDGKTRGLNLHLDRFRTACLEHGYAHHEQLDAFFAEALRSIPATGQWFPRLEATPTELRIALRPAPQLRGTTTLTSVAAVRPTPKYKGLDLDYLAELRCSSTTDDALLVTPAGVIAETTTAAIIAWDGTKWMSMAPARLESVTESLLINSARAQGEMVVTAALTVPEAQKLNLWAVNSLHGVTPVTHIDEVALPSNPQRSALLRGWLSQSEENIAQV

SEQ ID NO: 54010 - protein, 144 aa, Cornyebacterium diptheriae
MKNIIADHLKAKGHEVIDCGAHTYDALDDYPAYCIEAASRVVNDPGSLGIVLGGSGNGEQIAANKVKGARCALAWSVETARLAREHNNAQLIGLGGRMHSEEEALAIVDAFLDQEWSKEERHQRRIDILCEYERTGIAPVIPES

SEQ ID NO: 54011 - protein, 1052 aa, Cornyebacterium diptheriae
MSDAVGGVYPRVDMSGGTNVFPDMERQVLEYWKDDETFKASLTNREENPEYVFYDGPPFANGLPHYGHLLTGYVKDIVPRYQTMKGKLVNRVFGWDCHGLPAELEAEKQLGIKDKGEIEAMGLESFNNYCAKSVLEYTQEWKDYVTRQARWVDFDNGYKTMDMDFMESVMWAFKTLYDKGLIYQGFRVLPYSWAEHTPLSNQETRLDDSYKMRQDPTLTVTFPITGVKDDSAADASLVGAYALAWTTTPWTLPSNLALAVNPQVNYVEVKVGDQGAEAIRGQRVLLAEALVGAYAKELGEDHEVLTVRPGSELVGLTYQPIFSYFADHENAFQILAAEYVTTEDGTGIVHQAPAFGEDDMNTCKEYGIEVVIPVDMDGKFTSLVPEYQGQLVFDANKSIIADLKAAGRVVRHQTIEHSYPHSWRSGEPLIYMALPSWFVEVTKIRDRMVELNKEIDWMPSHIRDGQFGKWLEGARDWNISRNRYWGSPIPVWVSDDENYPRVDVYGSLEELERDFGVRPESLHRPHIDELTRPNPDDPTGKSTMRRVPEVLDCWFESGSMPFAQKHYPFENKDWFDTHSPADFIVEYSGQTRGWFYTLHVLATALFDRPAFKKVVAHGIVLGDDGTKMSKSRRNYPDVNEVFNRDGSDAMRWFLMSSPILRGGNLIVTEQGIREGVRQALLPMWNAYSFLQLYSSKPAQWSVDSSDVLDRYILAKLHDVVAAVGDALDNTDIARACDEVRTFCDALTNWYVRRSRDRFWAGDTEHPEAFYTLYTVLETLTRVTAPLLPMVSEVIWRGLTGERSVHLADFPQADQFPADDDLVRAMDEVRGVCSATSSVRKAHKLRNRLPLPKVTVALPESARLADFADIIRDEVNVKEVALTSDVDSVGRFDVVVNAKVAGPRLCKDVQRAIKAVKSGNYERRGDTVVADGIELVAGEFTERLVAADPDSTTQIDGVDGLVVLDMTLTEELEAEGWAADVIRGLQDARKASGFEVSDRIEVKLVVPEEKKEWALRHTDMIAGEVLATSFEVVTGEPAEHDIVAGVTATVQKV

SEQ ID NO: 54012 - protein, 872 aa, Cornyebacterium diptheriae
MSSINLTQLEAEHRAHVLSVGHYDVALDLTADERTFPSTTTVSFEVLNAGSTFIDLRAESVTRVELDGRDITESAVPLQDGRYDESRGITLDNLTVGAHTLIIDATCVYSHTGQGLHRFVDPADGKVYLYTQFETADAKRMFACFDQPDLKATYGFKIVAPKAWKVITNAYSEITVDGDTATHVSSVDYKLSTYLIALCAGPYHEVTDTWHGELKHHPETPPDQPHELEIPMAIYCRESLAEHLDAETLFTETKQGFDFYHANFGVAYPFGKYDQIFVPEFNMGAMENAGAVTFRDEYVFSSKVTRYRYERRCDTVLHEMAHMWFGDLVTMKWWGDLWLNESFATWSAALSQAEATQYSTAWVTFANVEKSWAYQQDQLPSTHPITTDASDIEIVEQNFDGITYAKGSSVLKQLQAYVGREAFLAGVRMHFANHAFGNATFDDLLGAFEKASGRDLSQWAQQWLKTTGVNKLSPRFEINEGTYSSFAVAQEGAAPGAGEVRTHRIAVGLYSLIDGSVTRTHRVELDVDSELTEVPELVGVPAADLVIVNDDDLTYCLMQLDPASLAFVVENIDKIADPMARTLCWSAAWEMTRDGSMRARDFVRLIARGAQAETEIAVLERVLMQASRALSSYVDPQWAEQEGSALLADAMLQAARELEPGSDAQLAFVQALAKVKLTDEAAAEFALIAKGSTSLPGVVVDSDLRWWALTALIARGDVPAAEVEQRIAQLLALDKSSAGELAALRAYAAQPSQDVKAKIFAQITDPANSLSNLYLRHKLEGLQFAGSAPYLEQFSESVFELVEPLWKALSSEVAAVTVTGIYPSWDVSAESVERAHAFLDAHPDLPGAARRIISEGAAGQERAVRLRAIDAA

SEQ ID NO: 54013 - protein, 149 aa, Cornyebacterium diptheriae
MSFVKKTKNFFGLDGEADPYMEHSDAYYDEPRYEPAPAYSAPRYEEPIYASARPRAARPMPTHIVPVRLLTYSDAAIKVGDPFRDGDAVVFDMSDMHKGEAKRIIDFAAGLCFALRGQMRKLDGRIFALVPESASVDENDLKHAAGLIH

SEQ ID NO: 54014 - protein, 353 aa, Cornyebacterium diptheriae
MVTPACWCSTIRWKPMNIFGFSGGGPLQVLAQNKLSDETESAINSTESWLHSPMAQDWLIERPIRIALTLVVAIVLNWALRKAITKAADANIRKPRLAISNPIIKRKRNNAASEALTATQEQRRQARIRTLAAVGRSAVSIFVWVWAALGTLKLIGVDVTPLIASAGVVGVALGFGAQSLVKDFLSGVFMLIEDQYGVGDTIDVGDVVGTVEDVSLRLTTLRDINGTQWFVRNGEILRVGNFSQEYAVAIINVPIALDEKASDAIALIEKSVADEAQLQEVADVLLDDPVVDGVNSVGLDHMVIRTRVTTLPDQQWFIERKMRARILTDLQRNGIDTPYPEGIGAYRRLDDEE

SEQ ID NO: 54015 - protein, 411 aa, Cornyebacterium diptheriae
MTSPDNYLAVIKVVGVGGGGVNAVNRMIEEGLKGVEFIAVNTDSQALMFSDADVKLDIGREATRGLGAGANPEVGRASAEDHKNEIEETLKGADMVFVTAGEGGGTGTGAAPVVAGIAKRLGALTVGVVTRPFKFEGPRRTRQAMEGIDALREVCDTLIVIPNDRLLQLGDANITMVDAFHEADRVLHNGVQGITDLITIPGLINVDFADVRSVMHDAGSALMGVGSASGENRVLTAAEQAINSPLLESTMEGAKGVLLSVAGGSDLGLQEVNEAASMVQEKADEDVNLIFGTIFDDNLGDEVRITVIATGFDGEKNSLDRQREAAQPAASQSASAMEANPTPAPDRSTSTSLFGDSDSAPRHRLNEEPAARRTSHDSEGMYTRRSVPRESYRDQRSDDFDDDLDIPDFLR

SEQ ID NO: 54016 - protein, 218 aa, Cornyebacterium diptheriae
MKKRIAIVSSIVLLIVAIAGGCLWAFPVMTVQKIEIDGAVRSSAEEVETASGIAKGTNIVRVAAHDAAGSVTQLPWVRSATVTRSFPNTVRIEVVERTDVGFVDRSDGQHLFDEKGRAFVIDSPSEGSVKVTGPSQDDPEVLSAVAESISAIDPGIRSTIDHIEAPDRYSLNLVLHDGRQIFWGSSESAHDKAATLMIALSRAEQRLDISGAPVIAVR

SEQ ID NO: 54017 - protein, 359 aa, Cornyebacterium diptheriae
MIFPPSPPTLGVEWEVALADPHSRDLVPRGHEVIEKATTHLEREFLANTVELVTSVCTTVPEAIEELREGIEEVKAIAADMGLKVWAAGSHPFSDFRKQPVNEKGHYNEIIERTQYWGNQMLIWGIHVHVGISSKDRVWPIINAMLTYYPHLLALTASSPGWDGIDTGYASNRTMLYQQLPTAGLPYQFQSWDEWEAYMADQNKSGVINHTGSMHFDIRPTRYGTVEVRICDSTNLRELSAAVALTHCLIVDLERKLDRGEELPTLQDWHVAENKWRAARYGMDAEIIISRDTDEAWVTDELRSLVERLSPLARELGCYDELQGVLTICQTGASYQRQRAIYKETGSWLPVVDAVLAEM

SEQ ID NO: 54018 - protein, 130 aa, Cornyebacterium diptheriae
MNTPASFYESVGGEETFHLIVHRFYERMRNDDLIGPMYPDDDWEGAEDRLRWFLAQYWGGPQTFSENRGHPRLRMRHAHFPIGMNEAQRWLDIMSDTLDSIDEATLPPAHRAAMWDHMQRVAQMLINQAP

SEQ ID NO: 54019 - protein, 477 aa, Cornyebacterium diptheriae
MNSIDLSRVHMIGIGGAGMSGVARILLSCGSVVSGSDVKESRPVAALRAMGATIAVGHKAENLAISGSMPTVVVTSFAAIPQDNPELQEARANNIPVIRRSDLLGELMEDHQQVLIAGTHGKTSTTSMAVVALQAAGKDPSFAIGGQLNKAGTNAHDGTGKAFVAEADESDASLLRYKPDIAVVTNIEPDHLDFFKTSEAYFKVFDDFAERVQPGGTLVVCLDDPHAAALGEKFKDRMTVRGYGSPAAAQQYPDVAFTVVEHMEVGPAGTRARITVGDDTVDVIMRIPGHHMVLNACAALTAGVTAGAELERLAAGISDFSGVRRRFEFHGRVSGGAFHDAEVYDDYAHHPTEVTAVLKAARQQQEARGIGRVVVAFQPHLYSRTMEFAAEFAEALSLADHAVILDIFGAREQPVEGVDSRIISDKMTIPVVFEPNFSAVAAQVKKIAQPNDIIVTMGAGSVTLLADEILTALRESE

SEQ ID NO: 54020 - protein, 556 aa, Cornyebacterium diptheriae
MGEFIYTMKNVRKAIGEKLILDNVTMAFYPGAKIGVVGPNGAGKSSILKIMAGLDQPSNGEAFLDPGATVGILLQEPPLNEEKTVRGNVEEGLGGIFEKKQRFEQIAEEMATNYTDELMEEMGRLQEELDHADAWEIDSKIDQALEALRCPPSDEPVTHLSGGERRRVALAKLLLSEPDLLLLDEPTNHLDAESVQWLEKHLADYKGAVLAVTHDRYFLDHVAGWICEVDRGKLYPYEGNYSTYLETKAARLEVAGKKDQKLQKRLKEELAWVRSGAKARQAKNKARLQRYEEMAAEAEQYKKLDFEEIQIPTPPRLGNQVVEVEHLDKGFDGRVLIKDLSFTLPRNGIVGVIGPNGVGKSTLFKTIVGLEQPDGGEVKVGQTVKLSYVDQNRENIDPEKTVWEVVSDGLDYIHVGQNEMPSRAYLSAFGFKGPDQQKPSKVLSGGERNRLNLALTLKQGGNLILLDEPTNDLDVETLGSLENALQKFPGCAVVISHDRWFLDRTCTHILAWEGNVAEGQWFWFEGNFEDYERNKVERLGADAARPSRVTHRKLTR

SEQ ID NO: 54021 - protein, 359 aa, Cornyebacterium diptheriae
MNTPRVVVAGGGTAGHIEPALAVAESLRHRGAEVVALGTTKGLETSIVPERGFELRLINPVPVPRKINADLFKLPFRLLATISQTRKILKEFDTDVVIGFGGYVAAPAYIAAKLQKIPFIVHEANARSGMANKLGVRLGGMGLNAVANSGMPGTVVGIPIRSSLSGDNTALDRAQQLWGLDPEKKTILITGGSQGARSINAAVAEGIDAVLADPDVQVLHAYGRKNSAPEAQERYVPVAYIDDMAAAYAIADLVIGRSGAMTVAENTAAGIPAIYVPLPHGNGEQGLNAQPLVEEGAAVLVADSEFNGEAFSSLAAKILGDQETYNTMVIAAKESGTANAAETIADIIYSIVKNHDRNK

SEQ ID NO: 54022 - protein, 285 aa, Cornyebacterium diptheriae
MRAVDDLTFNVSPGIVTGFLGPNGAGKSTTMRMILGLDTPTSGTATIGGVEYRRLKKPLTHVGALLDAKAVHPNRSARNHLLWLAQSNGIPASRVDEVLALVGLSSVAKKKAGGFSLGMGQRLGLAAALLGDPEVIILDEPVNGLDPEGIRWVRDFLRRLAAEGRTILVSSHLLAEMAQTADHLVVIGRGKLVASCSTAEFIQAHSRNTTVVKPAAPQLAAALNAEGLQVTENNGALEVNASPERVGKLAFEAGVALQLLTQQQASLEDAFMEMTSEVVQYGSKN

SEQ ID NO: 54023 - protein, 502 aa, Cornyebacterium diptheriae
MSTNTSNRGSRVRDRIASFLGEMMRRPLTDYYIVMFVIALLVLTGVLMVVTSSMATSVSETGSAWTYATKQILLIVIGFIAMIGVMQMPPRKVRKYAVWLMRISILLLIVVLIPGIGTGKEQVGSQSWIPLGPVNIQPSEIARVALAIWGASFLTRKPKVYFRFYGIDFDRRAMFAVIAGFTCALVMAEGDLGMTAMLGFLTLIMLVFAGLPRGLIVAALTISGVAFVLAVTMHGYRGHRITVFIDALFGRFDDIDGVAYQSYQGILSLADGSFTGLGIGQSRAKWFYLPEAKNDFIFAIVGEELGFVGAAIIIGLFTALLLIALRIALRIKDSFLSLAVATLAAGISLQAFINMAYVIGLLPVTGIQLPLISAGGSSAVITLAALGLIANCARYEPEAISAMQSYGRPALDRVLFLREPDVSDIRTRRSTRRSSQGTRQSGAPKRQPPKIERNERVSYRQSSTGTWGSSDRDRTGSVDKQRGAQRQPRRRNYPQDNKRRRR

SEQ ID NO: 54024 - protein, 480 aa, Cornyebacterium diptheriae
MSAAKMTVSVEELKVLLPELAGRVLVAGAGVSGVGITQLLREMGCAVTVADSNSAQLDKLAQQTGCQTISPADVVSDGFQDYTVVVTSPGWRPDSPLLVAAQSAGLEVIGDVELVYRLDRAEVFGPKRTWMVVTGTNGKTTTTAMLAEIMQHSGARAAAVGNIGVSVADAVRTQPRIDVLVAELSSFQLHWSSTLVPDVGILLNLADDHIDWHGSFAQYAQDKAKVLAAPTAIAGFDNGHVMTETTRIQRAEDADPIIGFTLGEPAKGMVGVRDGQLIDCAFGDNVVLRSAEGIEPAGPAGLNDALAAAAAARSMGVSAVCIEEALSKFEVAGHRGQCVGRHREVVAIDNSKATNPHAADSALAGFSSVVWVAGGQLKGAEIDELIVRHAGRIKAVALLGVDRDVIEDSVRTHIPGIPVLSVSETDPRRAMDEAVAWSVSQAEAGDAIVLAPAAASLDMYTGMGQRGDMFATAIAQHLHD

SEQ ID NO: 54025 - protein, 366 aa, Cornyebacterium diptheriae
MTQIIIAGAVGLLVSIFVTPVLIRRFSAEGLGQEIREDGPKSHLRKRGTPTMGGIAILIGITVAYAVTGIVGQVTGTGGLTASGLLVLGLTLALGGLGFADDFIKLYMGRNLGLNKKAKLIGQLAISLIFGALILLFPNADGLTPGSSHLSFLRDLPTVDLAIGPKAVGIAIFLLFIYILISAWSNAVNLTDGLDGLAAGSTAIVMGTYTVITFWQFRNSCSAGAQPGCYDVRDPLDLAILAAAGLGACLGFLWWNAAPAKIFMGDTGSLALGGLVAGLSVASRTELLMIIVGALFVLEAASVVIQVAGYRTKKIRIFRMAPFHHHFENGGWAETTVVIRFWLIAAVAALIGASIFYGEWLSLTGV

SEQ ID NO: 54026 - protein, 203 aa, Cornyebacterium diptheriae; identical to SEQ ID NO: 53983

SEQ ID NO: 54027 - protein, 496 aa, Cornyebacterium diptheriae
MIDLTVEQIARIVGGTLTQGTDPETVVTGPVEFDSRKVSEGSLFVALAGARVDGHDFVPAALESGAAAALVAHPVKIDSGLAPAIVVPPATGQQQSANSYATEHDEDGSVAAVLQGMGLIARRVIDTLTAQGLTVMGVTGSAGKTSTKDMLASILSNQAPTVAPPGSFNNEIGHPYTALRCTEQTRYLVAEMSARGIGHIAHLAQIAPPKIGVVLNVGTAHLGEFGSREVIAQAKGELVEALPHDGVAVLNADDDLVAGMRTRTDAKVITFSANSQDADVYATDIELDDYARARFTLHIGEAENVVTLRVAGQHQVSNALAATAAAYAAGIAIDDIAEALSNHLGASAHRMALMHRSDGATIIDDAYNANTESMRAGLTALSTTAHNKSHKGEASHAWAVLGPMSELGEESVAAHEEIGRLLGELNVHGLIVVGDSADSLALADGARRSNVTTLMARDTAEAADLLDQNMGSADVALVKASNAYRLWETAEILASK

SEQ ID NO: 54028 - protein, 491 aa, Cornyebacterium diptheriae
MGETTAGATEISAIGLDSSQLPADAIFAALPGTKTHGAHYASQGKAAAALAVLSDHEGTQILVDSGEKRPIIEVDDVRRVLGILSAEIYGHPSHEMTIIGVTGTSGKTTTSYILERGLMAAGLHVGLIGTTGTRINGRKVPTKLTTPEAPTLQQLFSQMKAEGVSHVVMEVSSHALALGRVTGTRFSAAGFTNLSQDHLDFHPTMQEYFEAKALFFDPASPIHAEKSVVCVNDLWGKNMAERAGADAITVCTEQEAAAHQADYWVSNIDVNPVGAQSFIVHHGAQSTDVHLPLPGGFNIANTVVALALAESVGVDTDAFIRGIADVAVPGRMERIDRGQEFLAVVDYAHKPAAVAVVIDTVRDQVPGRIAVVVGAGGDRDSGKRPIMGAEAARRADLVIVTDDNPRSEDPAKIREAVLEGAHGVAGSADIREIGDRREAIRIAVQWAQPGDAVIVAGKGHEVGQLINGVDHHFDDREEVAAALHDQGFDLD

SEQ ID NO: 54029 - protein, 282 aa, Cornyebacterium diptheriae
MGEFYLSYILDFFGGIMTLPSPSVHAFAVVTGASQGIGRAMARDLARMGHNVLLVARREDVLRELADQLMTDHSVVAEVYPCDLADADDLRGLVAELQGREVNIIVNSAGIASFGPFMDQDWQYESKQFDLNARAVFELTHAVLPGMVARKSGAICNVGSAAGNVPIPNNATYVLTKAGVNAFTEALHYELRKSGVACTLLAPGPVREAVIPDAEKSIVDRVVPDFLWTTYESCSRETLEAMASNRRRVVPGPLSKIMNAVSLVAPTAVLAPVMGWFYAKMA

SEQ ID NO: 54030 - protein, 609 aa, Cornyebacterium diptheriae
MLVAAILIARLGWVQLVWGPDLSEKASAQRTRVFVDAARRGEIYDNTGQLLAYTMQARSLTASPKQLRKEIEYTAKIELQDEKEYSSWDENQRKKKIEDKVDSYLEEYSNEIPKIIKDSEASANDIKSKDILKKLKADTSYEVLVRNVDPDVAENIAQKFHGIAADLQQIRQYPNGAVAENVIGKISQDGQGQFGFESSNNSVLSGIDGRKTLDVAASGEVIPGSLRDEVPATNGANVTLTLDLDMQTYVQQQLEQAVSNSGAQSASAVVLDVKTGKVLTMANSGTINPNGDIEKQLKDNKSFENTTISSPFEPGSVAKIITAAGVIEDGKSTPDEVLQVPGSIEMSGVNVRDAWEHGTVGYTTTGIFGKSSNVGTLMLAQRLGEQRFNDLLHRFGIGQNTGIELPVESQGLLPDISQWSGGTFANLPIGQGMSVTLLQMAGIYQALANDGQRIEPRIIEKVVDSSGNEVEQQPPAETRVVSAQTARTVVDMFRGVVQKDPTGINSGTGAGAAVDGYQVSGKTGTAQQVDPNTGAYSNSNYWITFAGIAPADNPRFVVALMLDKPHRGVHGEGGQSAAPLFHDIASWILDRDNVPLSPPMEGQLVLQAQ

SEQ ID NO: 54031 - protein, 339 aa, Cornyebacterium diptheriae
MTHGEPQEFSFDVEENHGHVPVLRARMAELIAPKVTAMGSDAVIIDGTLGAGGHSKYFLESFPEARVIGLDRDTNSLASARERLKEFGDRFLGIHTRFDRFAPKLEELAQSGNPIAATALEQGISGALFDLGVSSMQLDQAERGFAYRVDAPLDMRMDNTIGITAADVLNTYSHGELARILKTYGDERFAGKIASAIVREREKEPFDTSARLVELLYATIPAATRRTGGHPAKRTFQALRIEVNRELESLENVLPEITQRLTTGGRAVFMSYQSLEDKIVKRYFVDISTSKTPPGLPMELPEYAPKFKVVTRGAEKATDAEIEENPRAASVRVRAIEAL

SEQ ID NO: 54032 - protein, 143 aa, Cornyebacterium diptheriae
MFLGTYTPKLDDKGRLTLPAKFREELAGGLMVTKGQDHSLAVYPREEFAARARKAAAVSRTNPEARAFIRNLAASADEQRPDGQGRITLSAAHRTYAGLSKECVVIGSVDFLEIWDAAAWAAYQEETEAAFSSAEGEFLGDFL

SEQ ID NO: 54033 - protein, 343 aa, Cornyebacterium diptheriae
MSSVSADDRLRRRTGFSALIRRPELASLLGAIAIFVLFMVLAPSFRSLESFSTVLYASSTIGIVAVAVGMLMIGAEFDLSSGVAVTSTALAATMLNYNLHLNSWVGAGISLVFALGIGAWNGFLVTRTGIDSFLITLAGFLGLQGLNLAITKWVTGQVATPIISDMEGFGSARVVFAGTIHVGSVSIRATVLWWIFFVVIGSWLLFKTRFGNWIFAVGGDADAARASGVPVDRVKIILFMFVGFAAWFVGMHNLFAFDSIQAGQGVGNEFLYIIAAVIGGCAMTGGRGTIIGTAIGAVIFGMTNQGIVYAGWNPDWFKFFLGAMLLFAVLTNTSFASLTKGRR

SEQ ID NO: 54034 - protein, 74 aa, Cornyebacterium diptheriae
MSREVNCYDNAVMENFFGHLETKMYYGEHFASVDEFYWAVDDYIFWYNNDRLQQRFKGLTPMQYRDQTLKALTT

SEQ ID NO: 54035 - protein, 222 aa, Cornyebacterium diptheriae
MLPTPRWGRDFDPRCYFVTGTGSVDHIVDVARQAARAGAGLIQVRSKPIAARDLYILGREVARAVAEVNPRTRVLIDDRVDVALALMNNGEHIHGVHVGQDDLPVRHVRALLGDNAIIGLTTGTLELVRASRQVAEVIDYIGAGPFRPTPTKDSGRAPVGLAGYPPLVAESLVPVVAIGDVRPEDAADLAATGVAGVAIVRALMNSQGVATDVKLVLKGFAQ

SEQ ID NO: 54036 - protein, 455 aa, Cornyebacterium diptheriae
MQPSFLLTRAGRNFNGFDVDGFADHLGLPVRQLVDSTPDLAAILAAHPAATPSLFIGSGNVNFDAKAASALGVPLLLLIDAPGMHIDLAKQECEELGAVVASVFTADEAVSAEGIARIKASAVEAPVVMSAPVFESWLLEQAKSKNAHIVLPEGDDDRILQAAHQLLAQEICELTILGDPEAITARAQELGLDLSAAHLQNPETDPNAEKFAEDFAELRKSKGMTLEQARETMKDISYYATMMIHEGLADGMVSGAAHTTAHTIKPSFQIIKTKPGTSVVSSIFLMVMRGRLWAFGDCAVNPNPTADQLGEIAAVSAKTAEQFGIDPRVAILSYSTGTSGSGPDVDRAVAATKKAQELAPEYKIDGPLQFDAACDPTVAAKKAPESEVAGQANVFIFPDLEAGNIGYKTAQRTGHALAVGPILQGLNKPVNDLSRGATVADIVNTVAITAIQGGK

SEQ ID NO: 54037 - protein, 612 aa, Cornyebacterium diptheriae
MAILTSLSVVGTMTTTVAVESQEVDPSRLSRYKANEPWALVGPEVKNPEYRTEDFRDPRTAVTEARSTVNGVGVSAIFHKEDKTIEGVSFLTNGADQSEYRATSEMLAGSPSPASLPALGIFTAQSGHTKKINDKEMLDYKGRIPVGTLTLKFDQPVKDPILDFSGLGGYNIFSAHHEEASHEGIRNWEVRNGKIVVTGESASVVGAQINDQIRGSFNHTDLELETPGVKLVELAKNSNLKVDDRSISTVAANNDYVCNTPNDYQTLPEELENGPSYEQNDAFLSPVMKPAGCGSVLAQGEFSELKFTLFSSVEPMSSFAHDTHKTGLLYFAGGVNGGNANPVTPIPMLEGYSKPQEVSDTSNGDLFRMSIRLPEEPVKGSVSVGDFVWIDKDADGRQDDNEPGLAGVKLWLYGPDGGPVTDVHGKVVKSVTTGEDGKYSFKDLPVLTGSDSYTVKVVDVPAGYKPTLSGTGKVPAFKDSSTDLAKSTPGALSENGAQDLTLDFGFVKESATPSDPTVPGFKWWIPLIPLALVPLIPMLAQTVGGSSAPATSAPQVPNAPVSTSNDPKPAPVAQKPQNKQLAATGASVLGLLAMALALIAGGVLLLRSRKES

SEQ ID NO: 54038 - protein, 429 aa, Cornyebacterium diptheriae
MAAIVIVGAQWGDEGKGKATDILGGQVDYVVKPNGGNNAGHTVVVGGEKYELKLLPAGVLSENATPILGNGVVINLEALFEEMDGLIARGCDASRLRISSNAHLVAPYHQILDRVQERFLGKRAIGTTGRGIGPTYADKVSRVGIRVQDVFDESILRQKIESALNVKNQTLVKMYNRKAIVAEEMVQYFLGYVERLRPMVIEAELELNRGLDAGKHVLMEGGQATMLDVDHGTYPFVTSSNPTAGGACVGSGIGPTRITSSLGIIKAYTTRVGAGPFPTELFDKWGEFLQTTGGEVGVNTGRKRRCGWYDSVVARYASRVNGFTDLFLTKLDVLTGIGEIPICVAYDVDGVRHDEMPMTQSDFHHATPIYETMPAWDEDITGCKTFDDLPEKAQAYVRRLEELSGCRISYIGVGPGRDQTIVCHDVMEA

SEQ ID NO: 54039 - protein, 101 aa, Cornyebacterium diptheriae
MSIIKINAITVPEGHGPQLEERFMGRKHAVDSAPGFEGFQLLRPTAGESRYFVVTQWADEESYAAWRDGDARQVHGGNSHSKPIATDAELLEFDVVLDSRT

SEQ ID NO: 54040 - protein, 127 aa, Cornyebacterium diptheriae
MIVIGTDIVCIPSFAQQLDQPGTQFDRVFSAQELRVAARYQGRRRAEHLAGRWAAKEAFVKAWSQSLYGKPPVLEHVDWAEIEVQPDAWGRVLVVPRGEVARACGIECAQVSISHDGNYAMAQCVLG

SEQ ID NO: 54041 - protein, 317 aa, Cornyebacterium diptheriae
MTNMSESVTVGFDIGGTNMRAAAVTDSGLIIDSVSVPTPKSSEALEKGIISLVAQLREKHEVSAVGLAVAGFLDPDCEIVRFAPHLPWRDRPVRAELEDALGLPVRLEHDANSAAWGEYRFGAARGSQNWVLFAVGTGIGATLMHEGEIYRGAFGTAPEFGHLTVVPQGRQCSCGKSGCLERYCSGTAIEATARELLDADRGRDSMVAAAYHSGTLSGKTVTEAARQGDVFAIEVFDDFAEWMGRALSIVCDVLDPGQIVIGGGLSTSSDLFLEKATQHMAQQIVGAGYRPLPTVVCAELGGDAGMIGVSDLARRRV

SEQ ID NO: 54042 - protein, 673 aa, Cornyebacterium diptheriae
MTDIVLADRYRLGDVIGTGGMSEVYEATDVLLGRKVAVKMLRADLARDVNFRERFRREAQNSGKLNHPAIVAVYDTGETPRAGLNTPYIVMELVNGRTLRDIVREDGPLTPSQAAHTLIPVCHALQVSHDAGIIHRDIKPANVMITNTGAVKIMDFGIARALDDATSAMTQTSAVIGTAQYLSPEQARGKLADARSDVYALGCVLYETLTGKPPFEGETPFAVAYQHVQEDPVKPSEYIADLSPTAAINVDAVVLTAMAKHPGDRYQTAQEMCADLERLGRNAVTDAARHYVTPTSFATQDPASTTVVPVTQVTELDHAEAGAGIGAGVVPAGAVAGSAAVAGSGGAHAAPRSSNRGLRILAAILAVLVLAVGAGFAIDYFGGGPFSQRSTVTIPKLQNSTQQDAVNQLEKLGLQVNVIEEPNPDIPRGKVIRTNPTDGSNVQRNSTVRLTISSGKEITEVPDLSGKNTADAVKILEAAGLLLDPTVREDSSDTVPKGEIIEVSPAAGSQVSRGSKVSITVSTGVETVRVPVITGMKWDQAEGNLTSLGFKPEVVRVDSVEPAGTVVAVPDEGAEVPKGSSVTVQISNGAMFTVPEITRQTIDDAVRILHDAGWKGNASRLIQAAKVPTVAVTDQNLIASQLPTPGTALRKDAPIEIRLYEFNLAALVPPAQH

SEQ ID NO: 54043 - protein, 207 aa, Cornyebacterium diptheriae
MKVLVASNNAKKLGELRTILENAGLSSVEVVPLSAIDAYDEPVEDGRTFADNALIKARAGAHHSGLITIADDSGFAVEELNGMPGVLSARWSGQHGNDATNNELVLAQMKHVPEERRHAAFVSVCALVTPDGDEHIVEGRWEGRMLTAPRGANGFGYDPLFVPAEEDAAGTGRTSAEMSPAEKNAISHRGKALQQLVPIIAGYSTFF

SEQ ID NO: 54044 - protein, 265 aa, Cornyebacterium diptheriae
MNNAPIGIFDSGVGGLTVARVIMEQLPNESVIYIGDTANSPYGPKPIAQVRELSLAIGEELVRRGCKMIVIACNTATSAALRDLRERFDVPVLGVILPAVRRAVSTTRNGKIGVIGTEGTIKSGAYQELFAASPSVEVHAQACPSFVSFVERGITSGRQILGVAQGYVEPLQAAGVDTLVLGCTHYPLLTGVIQLAMGDRVTLVSSAEETAKDVFKTLSMTDMLASEDSTPVRTFESTGDPVLFAQLAERFLGPHVTNVEKFAGM

SEQ ID NO: 54045 - protein, 437 aa, Cornyebacterium diptheriae
MTHNQSTALLTDMYELTMLQSALADGTAERQCTFEVFGRRLPNERRYGVVAGTPRVLEAVQNFRFTEAQLASLTFLNDTTLEYLRNYRFAGHIDGYREGELYFPHSPILTVRGTFAECVILETVILSIMNADSAVATAAARMVTAADGRTIIEMGSRRTHEYAAVTATRAAYLAGFSATSNLEAVHRYGIPGSGTAAHAWTLLHVNEDGTPNEKSAFESQVRAQGTGTTLLIDTYDIAQGVRNAIEVAGPELGAVRIDSGDLGVMTRKIRQELDNLGAHNTQIVVSSDLDEYAIAGLRGNPVDVFGVGTSVVTGSGAPTAGMVYKLVEVDGNPVSKRSRGKGMLGGAKRAARTHRASGTAVEELVFPYEHPVPQVGTLTSVELTIPLMRDGVVVEGLPTLEESRAYLAQQLVTIPWEGLALSRDEPVLATRHVGFDQ

SEQ ID NO: 54046 - protein, 344 aa, Cornyebacterium diptheriae
MPIATPEVYNEMLDRAKAGGFAYPAINCTSSETINAALRGFAEAESDGIIQFSTGGAEFGSGLSVKNKVAGACALAAFAHEAAKHYGINVALHTDHCQKEVLDEYVRPLIAISQERVDRGEQPLFQSHMWDGSAIPIDENLVIAQELLEKARKAHIILEAEIGVVGGEEDGVEAKAGANLYTSPEDFEKTIDALGTGEKGRYLLAATFGNVHGVYKPGNVKLRPEVLLEGQKVAREKLGLDDSALPFDFVFHGGSGSEKEKIEEALGYGVIKMNVDTDTQYAFTRPVVTHMFTNYDGVLKIDGEVGNKKVYDPRSYMKKAEQAMADRIIEACQDLHSVGTTLSK

SEQ ID NO: 54047 - protein, 177 aa, Cornyebacterium diptheriae
MSKKAELAELVKELAVVHGKVTLSSGKEADYYVDLRRATLHARASRLIGELLRELTADWDYVAVGGLTLGADPVATSVMHADGREIHAFVVRKEAKKHGMQRRIEGPDVVGKKVLVVEDTTTTGNSPLTAVKALREAGAEVVGVATVVDRATGAADVIAAEGLEYRYILGLEDLGLA

SEQ ID NO: 54048 - protein, 375 aa, Cornyebacterium diptheriae
MRGVKKKSHLLSGITGGTVAVLTSAMLAIAPAHALPLPIPIGASSGIDVSGHQHPGGIAIDWKSVQRDGQSFAFVKASEGEGWSNDYFTQDAKQAANSGLKVGTYHYARPSKDARTQARHYAAQVAQINDHSLPPVLDIEVAEGKTPEQLAAWTKTFLNEFESQSGRKPMIYTYRYFWTHDMANTKQFAEYPLWLAAYQTQAPEPVGGWDTIDFWQRSGSGRINGIVGDVDLNLFNGDDAQLDAFAAGNYASAGGKFASISLPGIADLGGDSQALVSAVAALAAGVAAAPQVAQAAENAGLSTEGAEELIKVVQDLINSGNLPIDQLKDLAAGNYSVGDLVILLDNAQHLAATSSEPQNQNINVDQLVALAKNFI

SEQ ID NO: 54049 - protein, 276 aa, Cornyebacterium diptheriae
MIEFESVSKRYGKRGEKAVADFSLFIPKGKTTVLVGSSGSGKTTLLRMINRMVEPTEGRVIVRGKDVAETDPVQLRRSIGYVIQSAGLLPHRTVIQNIALVPTLNKEPKAEIERRAKQALADVNLEPSLANRYPGELSGGQQQRVGVARALASDPDILLMDEPFGAVDPIVRRSLQKQLIDLQSRLHKTVVMVTHDIDEAFCVGDHIVVLEKGGKIAQQGSPAHIFAHPANDFVASFLGSDQENRSLHTELIDGHTVVVDTFGRPLGTLGDGATCG

SEQ ID NO: 54050 - protein, 328 aa, Cornyebacterium diptheriae
MTTYNAYFESHPNPVAAINWNSIPDEKDLEVWDRLTGNFWLPEKIPVSNDIKSWNTLNDLEKQTTMRVFTGLTLLDTIQGTVGAVSMLPDAVSLHEEAVYTNIAFMESVHAKSYSNIFMTLASTPEINDAFRWSEENENLQKKAKIILSYYEGDDPLKRKVASTLLESFLFYSGFYLPMYWSSHAKLTNTADIIRLIIRDEAVHGYYIGYKFQQALRKETPERQAELKGYTFDLLYDLYDNEIQYTEDLYDDLGWTEDVKRFLRYNANKALNNLGYEALFPADECRVSPAILSALSPNADENHDFFSGSGSSYVIGKAENTTDDDWDF

SEQ ID NO: 54051 - protein, 1066 aa, Cornyebacterium diptheriae
MFSEDMLERLALEKLGDNDWQPLHGTAVAPGSGERQNWKEIVLRQTLNEAVSKLNPEVPEEFLQQAIGELLTPKSQDPVAENLRVHQMLVQGYSGIEYYDLDGQRQNPTIYFVSSNVDKNDYKVVNQVIIRNVEYERRFDVVAYINGLPVAFFELKKPSGKSTAEEAFNQLQTYVHEFPMAFRFANVVVASDGIDARYGTPFTPLNHMSPWNVDDDGKPIKMDQPDSSGEIPLGLENVIWGVFNQVRFLQLMREYTAFDDTERGLYMRIAKPHQYFAVTKAAGTTMQAVRSDGRAGVVWHTQGSGKSMEMEMYTAKVMRAPELESPTIIVINDRTELDGQLYSTFLASTLLPEKPRQIEDRDDLRTALATRTSGGIYFTTLQKFGLTADERNAHAKHPVLSQRHNIIVIADEAHRSHYGFGANRDGYAAHLRSALPNATMIAFTGTPISELDRNTRKVFGDDIDVYDLQRAVDDGATVPVYFEPRLIPLARVQGITDEYIDATADEALEGLSESERARIQRTTAALEAMYGADDRLDTLVDDLLLRWEDRKTVMQDFIGCPGKAMIVTSTRSIAMKIYDKIIAKHPDWHSDADDKGKIKVVYSANPSDTAEIKKHMRRPSAIKAVKERVKNPDDELEIIIVKDMMLTGFDAPPLHTLFIDRPLRGALLMQTLARVNRTFRGKQDGLLIAYAPLTDNLKEALDEFTVDAEKSGEKVIGQHAAETLTIAQQFLGQIHELVTVDWHTKLQSGDVRGALATVVGFLRSPQTLGNTDPEDPMARPVAKKFRELSSALARSWAIAVTADGADEIRSEVEFYLEARQWLIKIEAADRASRGEPISDTARRILGQLVVDAAESREVLDIYAEIGQDVPNLQELASQGFSEKNVKSNIEIAIEALRAKLQQGVRDATGNNELRSQLFSERIREVMTRYTNQQLTAAEVIAELVKLSKEVVEESRRGEKFAPALSNDELTFFDVVSQNESAVDVLGDSVLADIARDLVATMRRDTRTDWTVRDDVKAKLRRTIKLLLRKYGYPPDRQKEATQLVYEQMEKFAPRYAGRLGSEGVKP

SEQ ID NO: 54052 - protein, 719 aa, Cornyebacterium diptheriae
MNQSMGRHVAEPVSRAEQLDYHALNALLNLYDANGRIQFDKDREAANQFFLQHVNQNTVFFHDLEEKIEYLVENNYYEPEVLDKYSFAGIKDLFKQAYAHKFRFKSFLGAYKYYTSYTLKTFDGRRYLERFEDRVCMVALTLADGSIELARNLVDEIMTGRFQPATPTFLNSGKAQRGEPVSCFLLRIEDNMESIGRSINSALQLSKRGGGVALLLSNLRESGAPIKKIENQSSGVIPVMKLLEDSFSYANQLGARQGAGAVYLNAHHPDILNFLDTKRENADEKIRIKTLSLGIVIPDITFELAKRNEDMYLFSPYDVERVYGKPFADISVTELYADMVEDPRIRKTKINARSFFQTIAEIQFESGYPYIMFEDTVNRANPIEGRINMSNLCSEILQVNSPSVLNADLTYEHVGEDISCNLGSMNIAMAMDSTDFAKTVETAIRGLTAVSEQTSIDSVPSIKKGNDAAHAIGLGQMNLHGYLGREHIFYGSEEGLDFTNAYFAAVLYQCLRASHKIAAERGQRFEGFETSDYADGSYFDRFDPADFAPKTAKVQELFENSTIVVPTAEDWEELKQLVMKDGLFNRYLQAVPPTGSISYINNSTSSIHPIASRIEIRKEGKIGRVYYPAPHMDNDNLEYYQDAYEIGFEKVIDTYAVATKYVDQGLSLTLFFKDNVTTRDINRAQIYAWRKGIKSLYYIRLRQVALEGTEVEGCVSCML

SEQ ID NO: 54053 - protein, 254 aa, Cornyebacterium diptheriae
MEEHNLRTVGEVADLVGVSVRTLHHWDDIGLVSPQWRSWADYRLYSEEDVAQIYQVLLYRETGMPLKTIRDMLEGNSSPADHLQRQLELLQQRKHRVTSMIESVHQLLEDTMNHNEPLSADHTAKVLGREWSKWEKEAEERWGDTEDWAIFQQRAAQMGKDDFAARQMVMHKLDQRLAQAFESGMAPDSPDAHALAEEHRACLSQWFPVSHSKHALIAQGYTADPRFTAHYDKYAKGLAVWLEKAIQSNAQRHT

SEQ ID NO: 54054 - protein, 849 aa, Cornyebacterium diptheriae
MAGFNPTTKTQEALQEALQKASAAGNPDIRPEHLLAAILGQEDGIAIPVLRATGVDPDVVRREAEALVAKLPKAEGANLANPNFNRDALSVLNNAQELAGELGDEYVSTEVLLAAVARGTNDAAELLTKRGATYDVIKGVFPSVRGNKKVTTESPEDQFQALEKYSTDLTARAREGKIDPVIGRDQEIRRVVQVLSRRTKNNPVLIGEPGVGKTAIVEGLARRIVAGDVPESLKGKTLISLDLGSMVAGAKYRGEFEERLKAVLDEIKSAEGEIITFIDELHTIVGAGATGDSAMDAGNMIKPLLARGELRLVGATTLDEYRKYIEKDAALERRFQQVFVGEPSVEDAVGILRGLKERYEVHHGVRIQDSALVAAATLSDRYITSRFLPDKAIDLVDEAASRLRMEIDSSPQEIDELERIVRRLEIEEVALSKETDAASKDRLIKLRQELADEREKLGELVARWNNEKGAINKVREAKEELERLRSESEIAERDGDYGKVAELRYGRIPELEKQVAEAEEHTVETTMLSEEVTPDTIAEVVSAWTGIPAGKMLQGETEKLLNMEAELGKRVVGQSEAVVAVSDAVRRARAGVADPNRPTGSFLFLGPTGVGKTELAKALAEFMFDDDRAMVRIDMSEYGEKHAVARLVGAPPGYVGYDQGGQLTEAVRRRPYTVVLFDEVEKAHPDVFDILLQVLDEGRLTDGQGRTVDFRNTVLILTSNLGAGGTKDEMMDAVKRAFKPEFVNRLDDVVIFDPLSQEQLTHIVEIQIAQLAQRLAARRLTLAVSDSAKLWLAERGYEPAYGARPLRRLIQQAIGDQLAKKLLSGEVRDGSEVHVDADLDNDGLVISAS

SEQ ID NO: 54055 - protein, 141 aa, Cornyebacterium diptheriae
MLVVYFSSATENTKRFVEKLGFPSQRIPLTKSDAPLRIDEPYVLVCPTYGGGASISGNNTKPVPVQVIKFLNNEHNRSFIRAVISGGNSNFGLDFGKAGDVISQKCSVPYVYRFELMGNDEDVRLVRDGLRENAAALGLEK

SEQ ID NO: 54056 - protein, 278 aa, Cornyebacterium diptheriae
MGITSTSHHHFDYLVIMTPSSFHSEPTDQAFAVRDLSVMFGPKAAVDHLNLDVPHGSIFGLVGPNGAGKTTMISAATGLLRPQSGSAWINGVNVWEEPIAAKAHFGLLIDGMPVFDRLTATEYLEFLGGLRSMAPDVVAQRSEELLRTLGLAEAKDKQIVDFSAGMTKKILLAGALLHAPRVLILDEPLEAVDPASGQLIQKILRNYARSGGTVLLSSHVMELVEGLCDHVAIINQGTVIASGTVDEVRGTGTLVDKFVELVGSTQLDDDSFGWLGGK

SEQ ID NO: 54057 - protein, 535 aa, Cornyebacterium diptheriae
MVRKKKEVAQVPSTSKEIKDTLWKSADKLRGSMDASQYKDVALGLVFLKYVSDSFEERQKEIRAELEGKGFDEEYILEDLADVDAYTSENVFWVASNARWDFLKKYSKGMDLEGKHKSIGKLIDEAMQQLMADNESLLGTLPQIYGKDNIDQRRLGELVDLFSSTYFASTKDKKARDLLGEVYEYFLDKFAKAEGKRGGEFYTPQPVVRTLVEILEPTEGRVYDPCCGSGGMFVQAEKFLEVTKRDRSNIAVYGQELNERTWRMAKMNLAIHAISSSGLGERWGDTFARDIHAGTKMDYIMANPPFNIKDWIRNEEDARWKYGVPPAKNANFAWIQHIISKLKDHGEAGVVMANGTMTSQSSGEGEIRKNMVEDDVVSCVIALPAQLFRGTGIPVCVWFFAKDKSAGVGGSVDRRGEVLLIDARQLGHMIDRTERAFSDEDITKIANAFRTWRGRKSAEGEYEDEAGFCKSATIEEIREAGYALTPGRYVGMPEAEEDDEPIDEKIARLTAELTAALDESARLDAVVREQLGRLK

SEQ ID NO: 54058 - protein, 341 aa, Cornyebacterium diptheriae
MKTQASLLAILAAALYALNVPVAKMLLDHTTATMLAAFLYLGAGIGMIAFARPTPDDAPITAQDTKYVVAMVVLDIAAPILLMLGIARTTSSSASLLGNFEIVATSLIALILFREVISKHLWLAIGLVTLASLILSFEPGTIQFNLGSLLVLAACACWGLENNCTRALSNKNPAQIVVIKGIFSGLGALTVALLLANSLPSWQIIALTMALGFVSYGLSITFYIMAQRHLGAAKTSAYYAIAPFLGVAFSMVLLGERPDIQFWLALAIMGAATVVIVRDSIGLQHDHMHTHVHTHQHSHGDLVHTHAHTHTHSHLHAHEGDSEEPGHSVDHHADFDGHEHD

SEQ ID NO: 54059 - protein, 367 aa, Cornyebacterium diptheriae
MVTVTAQSIQAVADKLRAHRAEFTQAANQKPDSPLADAIAQLVDHTDLDGHVPESIATSWLQHAAAAESLGVSRDYYLTLADASRSALRHICADLPFAEVLGAERAITSIANTLSSAPLPNAAVPAQVVQVEKRSSAISVVRLQAETAINYTTTQYVTVTADYLRGARRELFPTIPPNEYGQIEFHIRHEGMISTLLAGAHVGDTWWISTGQGGFDYVENQDMVFIAHGVGLAALRPIIVDFLRLAEPPRVHLFLAADYPGELYELAGLWSLASTAPWLSVTPVVAHEEDAWWVAPTQHSHPPRGLHITQVGQAGEIVAGYGTWEDRRILIAGPSHDVAASRKALIRRGTPPTIIHTQTFDYSPFWL

SEQ ID NO: 54060 - protein, 272 aa, Cornyebacterium diptheriae
MRNNIIHRLGTKPTIDPATEIRNRVEFLTRYIKHSGTKGFALGISGGQDSTLAGRLAQLAVEQLRVAGYPAEFWAIRLPYGVQADEDDAHIALEFIQPDHSVVINIKEATDAAARATAQALGLQDVGDFNKGNIKARQRMIAQYALAGEKKLLVIGTDHAAENVTGFFTKFGDGGADILPLAGLSKRQGAALLEHLGAPASTWEKVPTADLEEDRPALPDEEALGVTYREIDAYIEGNEEVSPEAQQRIERLWKIGQHKRHLPVEPDDTWWH

SEQ ID NO: 54061 - protein, 331 aa, Cornyebacterium diptheriae
MTDILELARTKVLNNGEGLNKEEVLQVLQLDEARIPELLELAHEVRLKWCGEEVEVEGIISLKTGGCPEDCHFCSQSGLFESPVRSAWLDIAGLVEAAKQTQKSGATEFCIVAAVKGPDERLMSQLEEAVAAIKSEVDIEVAASIGILTQEQVDRLKAAGVHRYNHNLETARSYFPNVVTTHSWESRRETLRMVGEAGMEVCSGGIIGMGETLEQRAEFACDLAELNPTEVPMNFLDPRPGTPFADYEVLDTTDALRAIGAFRLALPKTILRFAGGRELTLGDLGTEQGLLGGINAVIVGNYLTTLGRPMEQDLDMLGKLRLPIKALNASV

SEQ ID NO: 54062 - protein, 960 aa, Cornyebacterium diptheriae
MTMTNPSGNTPDTSAGPAFRYTAELAGEIERSWQQYWIDNGTFNAPNPVGDLAVSGDKLPEDKLFVQDMFPYPSGAGLHVGHPLGYIATDVFARFNRMLGKNVLHTLGYDAFGLPAEQYAIQTGTHPRTTTMANIANMQRQLGALGLGHDPRRSVATTDPEFYKWTQWIFLQIFNAWFDTKQQKARPISELIPLLESGEVALPEGFEGSADSYSELDAVEKAKVVDEFRLVYRSHSMVNWCPGLGTVLANEEVTADGRSERGNFPVFRKKLSQWMMRITAYSDRLIDDLDLLDWPDKVKSMQRNWIGRSRGAEVDFDALGHTITVFTTRPDTLFGASYMVLAPEHELVDALVAAGTNSYEGIDPRWTFGQATPAEAVKAYRASIAAKSDLERQENKEKTGVYLGVNAVNPVNGESIPVFIGDYVLTGYGTGAIMAVPAHDTRDYEFATEFGLPIREVVAGGNIAEAAYTESGAAVNSANDQGLDINGLDKQEAIAQVIEWLVDKQKGSEKIQYKLRDWLFARQRYWGEPFPVVYDENGLAHALPESMLPVELPEVEDYKPVSFDPDDADSEPHPPLAKATEWTQVELDLGDGLKKYTRDTNVMPQWAGSSWYQLRYIDPTNSEAFCDIENERYWTGPRSAEDSGGVDLYVGGVEHAVLHLLYSRFWHKVLFDLGFVTSREPYRRLFNQGYIQAFAYTDSRGVYVPAEEVEEKDGKFYYQGEEVNQEYGKMGKSLKNAVAPDDICRDFGADTLRVYEMAMGPLDTSRPWSTKDVIGAHRFLQRLWRLVVSEDDGSIVVTDAALTDDDLKQLHRTIAGMRDDYEGLRINTVVAKAIEYVNYLTKAYGSTGAPRAAVEPLVIMVAAVAPHIAEELWKRLGHNDTITFVPFPEYEDKWLVDDEVEMPVQINGKVRARIMVPADASQDQISEIALASEAVATHIEGKNVIKKIVVSGRMVNLVVK

SEQ ID NO: 54063 - protein, 346 aa, Cornyebacterium diptheriae
MSATEFPSAFTAAVVDKFGSELNIHDVDLPEPGQHQALVKVLTSGICHTDLHAAEGDWPVKPKPPFVPGHEGVGEVVKLGPGEHSVALGDMVGNVWLWSACGECEYCRTGWETMCEKAEYGGYTVDGSFGQYMLVDTRYCARIPDGCDLLEVAPILCAGVTVYKGLKVTETRPGQFVVISGVGGLGHIAVQYAVAMGMRVIAVDIADDKLELAKKHGAEFVVNAREEDPTEAIVKYTKGGAHGVLVTAVHPQAFGQAIGMARKNGTIVFNGLPPGEFPAPIFDIVFKGLTIRGSLVGTRQDLEEALDFYARGMIKPTVTECKLDDVNSVFADMKQGKIDGRMAIRY

SEQ ID NO: 54064 - protein, 221 aa, Cornyebacterium diptheriae
MSAAPVLSITNASVVYPDGISTVTALDSANVEIFPGELVAIVGESGSGKSTLLSIAGFLQEPTSGTVTLHGAEGLDATSTRREHIGFVFQQPNLLGSLTAREQLLITDHLRGIKPRKDRADELLARVGLKGLGGRRVAQLSGGQRQRVNIARALMGNPQLLLADEPTSALDARLSKEIVELLRDVTKEFALATLMVTHDRSQLAYADRFVEMADGKALQTA

SEQ ID NO: 54065 - protein, 506 aa, Cornyebacterium diptheriae
MTVYAYPGTPGAVANYKKRYDNYIGGQWVPPVGGEYLDNITPVTGEVFCQVARGTAADVEKALDAAHDAAKTWGHSSPAERALILHRIADRMEEHLEEIAVAETWDNGKAVRETLAADIPLAIDHFRYFAGAIRAQESRTSQIDHNTVAYHFHEPIGVVGQIIPWNFPLLMAAWKIAPALAAGNTIVLKPAEQTPASILFWIDIVGDLLPDGVLNIVNGLGEEAGVALSSSNRIGKIAFTGSTQVGKIINRAAADKIIPVTLELGGKSPSIFFADIMDYDDPFREKCIEGLAMFALNQGEVCTCPSRALVHESIADEFLELGVQRVKNIKLGNPLDTETMMGAQASMEQMDKISGYLDIGPKEGAEVLTGGHVNKIDGLENGYYIEPTVFKGTNDMTIFREEIFGPVLSVATFKDFDEAIRIANDTNYGLGAGVWTRHQNTAYRAGRAIQAGRVWVNQYHNYPAHAAFGGYKESGIGRENHLMMLDHYQQTKNLLVSYDENPTGLF

SEQ ID NO: 54066 - protein, 417 aa, Cornyebacterium diptheriae
MLASVKPHVIQILTVMRVSLHVMFAGLLIFGIVRYYLELPTVPTDANNIAIAAAITLGIFYMIGTAWENRFARGDDIPDPGILSPVWLVIIVALWAFLVGASGYFLWLMFPLVFVMLHLKQGIRGILGVALLLAIAIAIPLATRPDEWMPAQAMGPTMGAAFSTVIFYSYTTLRNDAQHYRQLAAELLAAQQDLATSEHQAGRLEERERLSREIHDTVAQGLSSIVILARAAHGRLDKGEIEDVAQQLSVIETQASDSLAEARRFVRDLAAPALGDSLPIALTSTINNLRTKQDALGAPLDVHLELVGDTSISLPEPVSRTVVRVTQEGLNNVVKHAHATKAVVTLGVWEDEVSLDVVDNGIGFNLGTTERGTSSGFGLDGLRKRVDTVGGTLVIESDTYGTALACRIPLTSRRETS

SEQ ID NO: 54067 - protein, 611 aa, Cornyebacterium diptheriae
MGRAVGIDLGTTNSVVSVLEGGEPQVIANSEGSRTTPSVVAFAKNGEVLVGQSAKNQAVTNVDRTIRSVKRHVGTDWTIAIDDKKYTSQEISARTLMKLKRDAEAYLGEDVTDAVITVPAYFSDAQRQATKEAGQIAGLNVLRIVNEPTAAALAYGLEKGEKEQTILVFDLGGGTFDVSLLEIGDGVVEVRATAGDNELGGDDWDQRIVDWLVEKFKTAQGVDLSKDKMAMQRLREAAEKAKIELSSSQSANVNLPYITVDADKNPLFLDETLSRTEFQRITQDLLDRTKTPFNQVIKDAGVTVSEIDHVVLVGGSTRMPAVSELVKELTGGREPNKGVNPDEVVAVGAALQAGVLRGEVKDVLLLDVTPLSLGIETKGGVMTKLIERNTTIPTKRSETFTTADDNQPSVQIQVFQGEREIAAHNKLLGSFELGGIAPAPRGVPQIEVTFDIDANGIVHVTAKDKGTGKENTIKIQDGSGLSQEEIDRMVKDAEAHAEEDKKRREEQETRNSAESMAYQTRKFLDENGEKVSEEIKTKVTEAADAVDEALKGEDIEAIKTAVEKLSTESQEMGKAIYEAEAANAGAADATNVDPNVVDAEVVEDDDKDGNK

SEQ ID NO: 54068 - protein, 222 aa, Cornyebacterium diptheriae
MALDSIDVEFAAHQFTAIMGPSGSGKSTLMHCMAGLDSISSGSTFIGDTDLSLLKDKEMTALRRDRLGFIFQSFNLVPTLTAAENITLPRDIAGKSVNKEWFDEVTSRLGLTERLSHRPSELSGGQQQRVACARALVAQPEIIFGDEPTGNLDSNSSAEVLSILRTAVDQDDQTVVIVTHDPRAASYADRVVFLADGRIVKELMHPTAEEILSTMATIEELA

SEQ ID NO: 54069 - protein, 203 aa, Cornyebacterium diptheriae
MREQGLVSKIRRKKYNSYRGTVSHIADNVLGRRFIQDAPNKVWVSDVTEFRVAGTKVYLSPIMDLFDRTILAHTLSTSPNTQLTSRSLADAIAMFSPGKGLIVHTDQGFQYQHASWRNLIESVGGVQSMSRKGNCYDNAVMENFFGHLKSEMYHDVYFTSVDELCQAIDEYILWYNTYRLQERFKGLAPMQYRNQTLAKTLTV

SEQ ID NO: 54070 - protein, 122 aa, Cornyebacterium diptheriae; identical to SEQ ID NO: 53644
  MISC_FEATURE (19)..(19): X=any amino acid
  MISC_FEATURE (24)..(24): X=any amino acid
  MISC_FEATURE (118)..(118): X=any amino acid

SEQ ID NO: 54071 - protein, 633 aa, Cornyebacterium diptheriae
MSDPATLADTRHFSWKRLCAVLFLLFPVLVSVVYMWAMWDPTKNLRSVDLAVVNEDEGATRNGEFNRYGDKVVKGLLDKDYLAFKQVSADEAAKGLDNGTYLFTVTIPEKFSENVNTLLADQPTKPEIILSYNDFNGTNGSVLTGGLVPKIQQAVSASISESYATKLVNGVNKLGGGLERAADGSAKLEEGSGKLKDGLAKGVAGSQKLNDGSHQLAEGTAKLADGTGQLADGASRLAAGTAKLGNGAAQIDDGVGTLVNTLIPVLTTAQAAAPQLQQAADALRAVGMVAEADRIQDLATKFDANNPDNQVNKLNKLKNGTATLRYMLSDPSSEYYGGVLKLSDGVAKAHDGAVRLNDGAHRLADGTAQLANGTQQLYDGAGRLNEGANTLATKLDEGAKNAPKVPNAEASAKQISVPIVYKENNANPVQTVVDSNDPTAKKLNGGASMLIVMVFGFLLMALAAILLPHVFGTDRRNAFVGPTLKSFAGLFGIGVLTLFVLAGFATTIGWHPRSWAGIALGFLLTASAMAAVNQLLRALFGRFVGGIAILAVFAFGMFSFGGVWPLATVPGVFRAIHPLSPMSYARQAFVGASQGELDASYVLAIAVLALFTVVPLAVTLMVRAARVRKLNNQ

SEQ ID NO: 54072 - protein, 418 aa, Cornyebacterium diptheriae
MKERFLVTGGARLEGTVHVSGAKNSVLKLMAAALLAEGTTTLTNCPKILDVPYMVRVLEGLGCSVVHSGSTVEITTPAEISSNADFDAVRQFRASVCVLGPLTSRCGKAVVALPGGDAIGSRPLDMHQSGLEKLGAKTHIEHGAVVAQADQLRGANIHLDFPSVGATENILTAAVLAEGTTVLDNAAREPEILDLCVMLKEMGADIEGEGTSTITIRGVEKLHPTQHEVIGDRIVAGTWAYAAAMTQGDITVGGIAPRNLHLALEKLKVAGAEVTTYDHGFRVRMDRRPMAVDYQTLPFPGFPTDLQPMAIGISTVADGVSVITENIFEARFRFVDELVRLGADATVDGHHVVMRGVEKLSSTPVWSSDIRAGAGLVLAALCADGVTEVNDVFHIDRGYPNFVEDLQRLGAQIERVQV

SEQ ID NO: 54073 - protein, 533 aa, Cornyebacterium diptheriae
MTDSAMLSGAPFDQRSDKWWHLTFGGMLAVALIFFITWSMGYVGPEANKAMLITTIAFGVFMAFNIGGNDVANSFGTSVGAGTLSMKQALVIAAIFEVSGAVLAGGEVTDTVKSGIVDLGAIDLDPQHFAFIMMASLLGAAVWLLVATKMGWPVSTTHSIVGGIVGASLLLGFTQGIGGWEMVQWAEIGRIAMSWVLSPLLGGLCAWLLFGFIKKHILVYNEEADEALRQIKADRIELHQSFKASFERLNEIQQLAYTNAMTRDAALIQEPDFDPEQLESDYYRNLYRINTRRDNLNTHRALENWVPLLAAAGAALIGAMMLFKGLKNLNLHISNLGNVVILVMLSAVVWMAISIFSRLLRQQELTRATFVLFSWMQVFTASAFAFSHGSNDIANAIGPFSAVLDVLRTDSINGKAAVPTALMVTCGISLIAGLWFIGRYVIHTVGTGLTKMHPASGFAAELSAAAVVMGASVIGLPVSSTHILIGAILGIGVVNKSANWRLMKPIGMAWIITLPAAAAVSGAAVLVLNAVWG

SEQ ID NO: 54074 - protein, 311 aa, Cornyebacterium diptheriae
MAKIYDSILDTVGNTPLIKLNRLDKYLPGNVVVKVEFFNPANSVKDRIGKAIVDAAEASGDLKPGGTIVEATSGNTGIALALVGAARGYNVVLTMPETMSLERRVMLRAYGAEIVLTSGAAGMQGAVDKANEIVAERDNAILASQFKNAANPEIHRRTTGEEIWNDTDGQVDIFVAGVGTGGTVTGAGETLKKHNPEIKVYAVEPAASALLTTGKAGPHKIQGLGANFIPSVLNQKVYEEVITVTNEDAISTSRQLAAQEGILGGISAGANLKAALELAALPENEGKTIVTVVPDYGERYVSTVLFDDIRD

SEQ ID NO: 54075 - protein, 203 aa, Cornyebacterium diptheriae
MRRGVDKPKLIESESMYRLVKTIREDLANAREHDPAARSDAENAIVYSGLHAIWSHRIAHALWQKNLKGPARILAQFTRFLTGVEIHPGATIGRRFFIDHGMGIVIGETAEIGDGVMLYHGVTLGGQVLTQTKRHPTVEDDVVIGAGAKVLGPITIGKGSAIGANAVVTKDVPANHIAVGIPAANRPRGADEKIKLVDPDYYI

SEQ ID NO: 54076 - protein, 300 aa, Cornyebacterium diptheriae
MFTMTQETFTATTRVKRGLADMLKGGVIMDVVTPEQARIAEDAGASAVMALERVPADIRAQGGVARMSDPDLIEGIVNAVSIPVMAKARIGHFVEAQILESLGVDFIDESEVLSPADYVNHIDKWNFDVPFVCGATNLGEALRRITEGAAMIRSKGEAGTGDVSEAVKHLRTIRGEINRLRSMDEDQLYVAAKEIQAPYDLVREVAATGKLPVTLFVAGGVATPADAALVMQMGAEGVFVGSGIFKSGNPAARAAAIVKATTMYDDPAAIAEVSRGLGEAMVGINVADVPAPHRLAERGW

SEQ ID NO: 54077 - protein, 185 aa, Cornyebacterium diptheriae
MVIGVLTLQGGFAEHIAILESLGVEHRRVRVPNDLLGLDGLIIPGGESTVMDKLARAFDLAEPLRAAINNGLPVFATCAGLIYLGTVENPAKGQQTLGCLDVVVRRNAFGRQVDSFDAVVDVEGIDANVAFIRAPEVISCGAGVTVTARVGDHVVGVRQGKIHAYAFHPESAGEVRLHQAWLASI

SEQ ID NO: 54078 - protein, 329 aa, Cornyebacterium diptheriae
MTDQPPTPNTADATPPRQDKKLNTNAIIAVVLILAGLGVLLYPVLATQWNNYQQSRAAEAYSQLEKGVPPEVLNKAWEEAQQYNANLGDIDPGDAWTSSDDESSSAYQRYLNYLSALNETEAMGRIVLPSIKSDLPIFHGTSDRVLARGVGHLYGTDLPVGAPGELGEDGVIPPAPPEGRLSALSAHTGLQNATLWDNLIQIKKGDPVYVAAAGEKLKYEVRNIEVVTPDKTSLLRRTSNKDQVTLITCTPYGINTHRLIITAERVPMDPQGESAFDGQGTTWQWWMWAILAAAAIIVLLLIRWWWKNFRKQEGEEGPTTSGAGGTTES

SEQ ID NO: 54079 - protein, 312 aa, Cornyebacterium diptheriae
MDHTLSTDVEPEKEPRRANSAKTSPVLAAVLVILGVLVMLYPVTSTLWNNHLATKAAQEYAKLEKNAPQEVKNTQWERAHEYNENRTTGPIFDPWLARFDENNSDYQEYLDQLDANDAMARLIFPKIKADLPIFHGTDNDTLQKGLGHLFGSDLPVGGKGMHSVITGHTGLANSTMFDHLNKAEKGDTFYVQVSGEKLKYVVDQIKVVLPTETEDLRPEQGKDYITLITCTPYGINTHRLMVRGHQVPLAPEDHEVFDKNHGAGWQWWMYTLLAAAAVVLLLLLRWLLKNKRDGESQETTEMMNDEGAGADD

SEQ ID NO: 54080 - protein, 264 aa, Cornyebacterium diptheriae
MSALNELLHDDAIDLNAHAETWQEAIAQAGALLEKTGAITSAYTESMISSVEEQGPYIVVAPGFAFAHARPSEAVKRTAIAWTRLDSPVEFHHSSNDPVTLVVALAAQDDQAHTAAMREIAQVLGSRRRDLDTVATVAELRGVLEASKRRKSRGVAGGATHVTAQDSVESKGKILTVCGNGLGTSLFLKNTLDQVLDTWGWGPFVSTEATDTISAKGRAKEADFLLTSEEIARTLGDVGVPVYVISNFTSEDEIDAALRELYDV

SEQ ID NO: 54081 - protein, 520 aa, Cornyebacterium diptheriae
MNALIAIPEFLVNEILSVPAFLIGIITAVGLGAMGKKTGQVLGGAIKATLGFLLIGAGASLVVASLEPLGTMIQGATGAHGVVPTNEAIVGIAQNQFGGQVAWLMILGFAISLVLARITPMSYVFLTGHHVLFMATMLTMVLAAAGFGPWVVVPVGALLLGILMVSLPAIAHPWTRRVTGDDSIAIGHFGTAGYVAAGAVGKLVGGKKESMSASTEELKLPEGLRFLRDSMVATALSMALMYVVLAILFILRAGQNEAFTAFANGATSVGNYLMQSVTQGLQFGVAVAVILFGVRTILGELVPAFQGIAAKVVPGAIPALDAPIVFPYAQNAVLIGFIMSFVGGLIGLTVLSVWLNPAFGVALILPGLVPHFFTGGTAGVYGNATGGRRGAALGGLTNGLIITFLPAFPLGVLGNFGDANTTFGDADFGWFGMLVGGGARVGGPLGIVLVLLVGLAVFALGWFSQVKLVQGNWDPTPWRGGSTTAGAAGPAGAAAGSAQGLTRTYPKVLPPKGAPVPPSR

SEQ ID NO: 54082 - protein, 122 aa, Cornyebacterium diptheriae; identical to SEQ ID NO: 53644
  MISC_FEATURE (19)..(19): X=any amino acid
  MISC_FEATURE (24)..(24): X=any amino acid
  MISC_FEATURE (118)..(118): X=any amino acid

SEQ ID NO: 54083 - protein, 138 aa, Cornyebacterium diptheriae; identical to SEQ ID NO: 53643
  MISC_FEATURE (27)..(27): X=any amino acid
  MISC_FEATURE (131)..(131): X=any amino acid

SEQ ID NO: 54084 - protein, 57 aa, Cornyebacterium diptheriae; identical to SEQ ID NO: 53864

SEQ ID NO: 54085 - protein, 1238 aa, Cornyebacterium diptheriae
MDARLAIRRSPNFRDEERALLRSLNNLEGAPLTDVQIINVYDVFDATEADITALTNSVVSDPKVDTVLTTAELDTIVEQAPAHLAVEPLPGQYDQRADAAEQALRLLNPHTNARVTSGELYIFSDLTEEAFANIRDYLINPVEAGEKNLDVLRAPSMGDIAPLKQYPDFLELDDAGLSALLASEGMAMSLADLKLIQEYFRTEGRTPTEVELAALDTYWSDHCRHTTFNTELTEITNSSSRYGAQLDRALKRYDELREANGRAHKPRTLMDLGTIMVRELRRNGTMTDQEVSEEINACSVYVDVDTPEGDKPWLLMFKNETHNHPTEIEPFGGASTCLGGAIRDPLSGRSWVYQAMRISGAGDINTPRTETIDGKLPQADISARATHGYSSYGNQIGLATTSVRELIHPGYVAKRMELGAVVAAAPQENVKRLEPQPGDVVIILGGRTGRDGVGGATGSSKAHDEESLARSGAEVQKGNPVNERKIQRLFRRPEIAQMIVRCNDFGAGGVSVAVGELTDSIDIHLDRVPLKYAGLNAREIAISESQERMAVVVRPEDAAAFIEAAATENIEAVELAIVTDSGRLRMFLGEDVVLDLSREFLETNGAARSQSVEMRDAGDVEKPAQPATILESLTRHGSQEGMVEQFDATVGRSTVLMPYGGRTQKTDELASVQTFPVPGGSHTASVMTYGFSPELADVSPYLMGSYSVVEALSRLVATGANARGAWLSVQEYFQRLDQKPELWGEVTQALLGLLEAQDAFEVAAIGGKDSMSGTYGDDLHVPATLVTFAVATMDARRTLSAAIPSGEFDVYHLAHTPLETGEANYEQLRANFDAFHELAATGTLSAASPIIPGGLGATIVNMLLGNELGFQGTATTNAALGGLVFAVPAGTAVELADAQLIGHTNPSGEITFGEETFTIAQALDTLERDYREVYPLNVTTADVEALPDFATALPKADTDSEEANASAGDKAVHVLLPVFPGTNSEYDMAEAFEAAGATTEFHIIRNLNSEMLAADTEAFITKLQSANILAFSGGFSLGDEPDGSAKFMAAFLRSDTVAAAIKDFVARDGLVLGICNGFQALVKSGFLPYGDPAKMSAESPTLAHNRQLRHVSRIATTRVSSVASPWLSTFTPGQQHLMPVSHGEGRFVVSEKEAQALFSAGQVAFQYVDAEGTPTMEAPANPNGSNYAIEGIISPDGRILGKMGHPERFRDGLMRNIPGMEIQDIFANAVNYCRKSQR

SEQ ID NO: 54086 - protein, 834 aa, Cornyebacterium diptheriae
MPLTITTVLGFLGIVLSAPAWFYFIRAAAHLYKFVAQGQPSPGRTQQLGRRAWQTFVEVFFHTELRRKPAIAVAHWFVMLGFLFGSIVWFEAYIQTFRPDSGWPLLSHWSVYHFVEEILALGTVLGVLFLFAVRLNTGMRDRLARFYGSNATAAYFVEAVVFVEGLGMLLVKAGKIATYGHASAWADCVTRFIALALPASPTLVSMFALVKLLSGMIWLVVVAHNLSWGVAWHRFLAFFNIFFRRNPDGSQALGKLQPLYSDGEVLTLDTADDDSTLGVGTIEDAPWKMLLDVSTCTECGRCQEQCPAWNTEKPLSPKMLVTDLRDAAIEYFDSSHDSVDVLALAGNSGVISDDVLWSCTNCGACVEQCPVDIEHIDHVSNMRRFQVLAESNFPSELGGMFKNLEVKGNPWGRNSQERATWIDEARRDGIEVPVFGEDITDFEDTEYLFWVGCAGAFDDDGRRTTRAVVELLHTAGVKFAVLSKGETCTGDPARRAGNEFLFQMLATENISTLDDVFDGVPQGQRKIITTCPHCFNTLRNEYPDFDGHYDVFHHTQLLNRLVREGLLTPVPRRPEDRAPITYHDPCFLGRHNKIFDPPRELLGVTGMELVEMDRNRNEGFCCGAGGARMFMEEKLGTRINENRAAEAVATGATEIAVGCPFCNTMMTNGVKAVTENTPIVRDVATMLRDAISTDGTLPAPRERAFLDLPIRSARATTPETQQAAPKPVAPAAPAVPAMPAVPAAPATPVPPSTPAPGAAVPPAAIPPAAVPPVAVPPVATPPVAAPPTPVPPTPVPPAAVPPAAAPPVAVPPAAVPPAPQPPMAQPPQAQPPQQ

SEQ ID NO: 54087 - protein, 363 aa, Cornyebacterium diptheriae
MKAARYYDQKDIRIEEISEQPLLPGTARIKVAWCGICGTDLHEFLEGPLFVPEHHHPHPVSGEDSPVTLGHEMSGVITEVAEDVTDLAVGDHVVVEPYLIHDDVDTSEANPFYHLSRDMNFIGLAGGGGGLSENIVVKRRWIHKISPDLPLDEAALIEPLSVGYHAVERAGFASEEAAKGKVALVGGAGPIGLLTASVLKAFGATVVISELSPLRRKKALDSGAADYALNPAEVDVVEEIAKLTDGKGADVAFECTSVQVVLDTLMDAVRPGAVIVVVSIWSKRSNFDIHKLVMKEIDLRGTIAYSHAHPNTIKLVESGKINLKPFITGKIALQDIVDKGFDTLINHNETAVKILVSPSGVGL

SEQ ID NO: 54088 - protein, 430 aa, Cornyebacterium diptheriae
MTDTTFELRTELDDAPGRHGRTGVIHTPHGDINTPAFIPVATKATVKTLTPQQIRDTGAQAILSNAYHLYLQPGPDIVDEAGGVSKFENWHGPTYTDSGGFQVMSLGVGFKKVLAMDTAGLVEGDIRAPKKDRYAQVDEDGVDFRSVIDGSRHRFTPEVSMQIQHRLGADIIFAFDELTTLVDTRQYQESSVERTHRWARRCLIEHDRLTREREGKPLQSLWGVVQGAQYEDLRRQAVRGLLDLDKEAEDNGRRGFGGFGIGGALEKENLGTIVGWVCDEIPQHKPRHLLGISEPDDLFTAIEAGADTFDCVAPTRLGRRGGVYTLDGRVNLTAARFKRDFRQVDEEFGGPIAEYSRAYIHHLFKAKEFLGGTLCTMHNVAFMIQLVDNIRSAINNGDFEAYRDEFLGRYYASKGGPAAAGRSGGMIYGV

SEQ ID NO: 54089 - protein, 717 aa, Cornyebacterium diptheriae
MAVRAAAHHLVQLDQSSCDQPSTHRVGYTIRGERSRGDLVEFVTPGVLLRRLISNPELDGVSAVVVDEVHERQLDTDLVLGMLVELRELRDDLTVIAMSATVDAPHFAELLSPEHPAPIVETHAEIHPLELHYQPAAERIALSRSYMDHVCTVTQHAVAHFTDSALVFLPTIAAVTTAVSTLEQRTSVPVYPLHGQLTSSEQDAALRAGRQRIVVATSIAESSLTVPGVRIVVDAGLSRVPKRDHARDLTGLVTTSTSQAQADQRAGRAGREGPGTVYRLYSAAEFQHFPDHVTPEIRSADLTQAALFLAAWGCTDPAQFPLLSAPPKQSWEQAVDTLRDIGALNAAGQITELGRTLATLPTDPRLGASLLHCGGGAAPTIAALSLDARGDIPRAIAAMSHQQRFTREVARLAGFVPDSECTPGEAIARAWPKNVARRDGDSYLMAGGSRAELGVSSLSGHEWLAVAQASLTHRGSVIRSAAPISEAAAVDIIGVAERTEATLIDGSLRGTRIRHAGAITLSTTNVKVEGELAEQALAEGIRTHGLELFTFSDKATELRDRLRHLHEYYGEPWPDVDAADPTLWLGPEISALAAGTPAARIDLYPALQRLLPWPEATHLDELAPAVLELPNGRRARISYAGDRPVVSTKLQDCFGLLESPIVCGRPLQFHLLSPAGRPLAVTDTLDSFWAGPYQQVRSDMRGRYPKHPWPEDPLAIR

SEQ ID NO: 54090 - protein, 142 aa, Cornyebacterium diptheriae
MILSPASKDCTIRQPLTIEYGVNTTIGKDTFINYGVTILDTAEVTIGSQVLIGPNCQLITVTHPVDNADMRTAGWEIAHPIVVGKQAWLGAGVIVLPGVTIGERAVIGAGSVVTHDIPDDTIAYGNPARVIRTTNPHTTYEL

SEQ ID NO: 54091 - protein, 504 aa, Cornyebacterium diptheriae
MHITGGGALNRGPFSRIHFNRLALSNKQRAFLLATNKLTRVSAHRLNTTNICFSAKEVRNTMTDSTLRKTLISAYFGNYGGQFVPDALLPVLDELEQAYVDALNDPEFSRELARLQKHYLGRPTPITECANLPLAGKGKGKVRIFLKREDLVHGGAHKGNQVLAQALIARRLGKTRLIAETGAGQHGTATAMVAALMGMDCTIYMGAKDVARQQPNVYRMRLMGATVVPVTNEHGDSMSDAIDVALMDWVENLDTTHYLIGSAVGPHPFPTLVKEFQAVISRESREQMLELTGKLPDAVVAAVGGGSNAIGAFADYLTDKPGNESVRLIGVEPAGEGLDSGKHGAPLQRGKVGVQHGFKSFILADEQGNPLHSYSVSAGLDYPGVGPEHAHLMESGRAQYYGITDAEALQAFRMLSRYEGIIPALESSHALAYALKMAENAEETDAPINIVVNLSGRGDKDVDYVRNILGDLATEDPATSPVTDPHVAETLVTMIAESNAREGV

SEQ ID NO: 54092 - protein, 362 aa, Cornyebacterium diptheriae
MAGRLPISEPGLADLLAANSVEWTDDPQRARDCDLYFVCVGTPSTDGPSAQARLDVSAVVAAVGTIATLAPHPVVVGKSTVPVGTSIRLLQQFPQIRLLWNPEFLREGHAVADTLHPDRIVIGGADPQPLLRVYEGINAPVITTDLATAELAKSAANAFLATKLSFINGLSELASATGADIGTITRAMGLDPRIGSQYLSAGLGYGGGCLPKDVRGLAASARDYQASHFAELLSIIDATNLRQRERTCELVANLCTPGARIDVWGATFKEGSDDVRDSPGLAVAHALKTAGFRVRVVDPLVGHWPPELQEPEAIVVATAWSEFSRVVPEPRLAHGCGGVVVDARGVLNRSAWVAAGWTYRNL

SEQ ID NO: 54093 - protein, 341 aa, Cornyebacterium diptheriae
MTSDKTLNNLIAYLDNPHPTVEQAIEVFTPLTVGDYDDVHIAALLATIRTRGETYADIAGAAKAFLAAGRPFPITGAGLMDSAGTGGDGANTINVTTAASLVAAAGGVKMVKCGNRSVSSKSGSADVLEALNIPLDLNPDRAVRQFNASNFTFLFAPAYNPAVAHVQPVRKALKVPTLFNTLGPILAPARPEFQVMGVANPKLGQIIAEVFRELGRSHALVVHGSGTDEIAVHGPTTVWELRDGEISTYTITPEEIGINRYELSELAGGDGVENAHLMRETFASRGPAAHRDAISATAGAMFYTANHVPTIAEGVAKAQTMLADGSVERWLAIHEEANYAE

SEQ ID NO: 54094 - protein, 485 aa, Cornyebacterium diptheriae
MQNDSSTRPMPTVLESIVSGRRSHLPEIQARISHVDPARLLRSTRSLFQSLGGRSDGGPALRGSARFIMECKSSSPSLGMIREDYRPGDIARVYSRYAAGISVLCEPDRFGGDYNHLATVAATTHLPVLCKDFIIHPAQVHAARYFGADAILLMLSVLDDATYTELSQEAARLGLDVLTEVIDEVEVERAIRLGATIFGINHRNLHDLSIDLNRSARLAQLIPDSAVIVSESGIRNNETVRQLSGHSSAFLVGSQLTSQPDVDRAARELVYGLNKVCGLQSPSEAQAARASGAIYGGLIFVESSPRNVSRETSKKIMAAEPDLTYVAVSRRTTGWTEIIGGNIAVAQIHSPYQGSIAAEKELINHVRGEVGDKVKIWRAVSMTHADGSLVAEALAPEVDRLILDTGNGGTGTTFDWARIPEAVKGKTLLAGGIGPDNVTEALAVGCAGPDLNSGLEYPVEAGKWAAHKDATAIHSTFTQIRGFHY

SEQ ID NO: 54095 - protein, 212 aa, Cornyebacterium diptheriae
MLGYSGTNQVSFEEMVMLTAAVVRGAGPAMVVADLPFGTYEASDEQAVRSATEMVRRTGAHVVKLEGGVRMASRIRAITDAGVPVCAHLGFTPQSMNQLSGFKVQRGAEKLTADVDAVVEAGAEMVVFEMVPADLAAELTARCPIPVIGIGAGNATDAQVLVWHDIANLPKGDHRARFVKTYAEVGSQLTCAARFYRKDVEARRFPAEEHTF

SEQ ID NO: 54096 - protein, 217 aa, Cornyebacterium diptheriae
MTNLKLDVLTAEGKTDGQVELPAEIFDREASVALLHQVVNAQLAAKRQGTHSAKTRAEVSGGGRKPFRQKGTGRARQGSIRAPHFTGGGISHGPKPRDYSQRTPKKMIKAALFGALTDRARHERIHVISELVAGQTPSTKSARSFIERITDRRNVLLVVGREDVTAQKSARNLPGVHILFADQLNTYDVLYSDDVVFSVEALNTFINRASGAAQEEK

SEQ ID NO: 54097 - protein, 442 aa, Cornyebacterium diptheriae
MSIHHTTFGNTSPRIAGFFVYSLRYAQPTTGNILMKHTLLPAYFGEFGGQYVPESLIPALDQLEAAFVEAQNDPEFRAELAGYLKDYLGRPTPLTLCSKLPKAGKGKGHARIFLKREDLVHGGAHKTNQVIGQALLAKRMGKTRIIAETGAGQHGTATALACALLDLDCVIYMGAKDVERQQPNVYRMELMGAKVVPVDSGSGTLKDAVNEALRDWTATFHESHYLLGTAAGPHPFPTIVREFHRVISEEAKAQILEQTGALPDVVVACVGGGSNAIGMFADFIDDPSVELVGAEPGGMGLSSGKHGATINNGQIGILHGARSYLMRNSDGQVEESYSISAGLDYPGVGPQHAHLAKSGRARYVAITDAEALEAFQLLSREEGIIPALESSHALAYALKRAALAEENNEDITIVVSLSGRGDKDIDHIRRTLSAHPELVVKD

SEQ ID NO: 54098 - protein, 280 aa, Cornyebacterium diptheriae
MAIRKYKPTTPGRRQSSVSMFEEITRSTPEKSLVRPLPKKGGRNVHGHITVRHKGGGHKRQYRLIDFRRNDKDGIPAKVAHIEYDPNRTANIALLHYVDGEKRYIIAPKGLQQGQMIESGVNADIKVGNNLPLRNIPAGTTIHCVELKPGAGAKLARSAGASIQLLGKAGKYAVLRMPSSEIRRVDIRCRATVGEVGNADQINIRWGKAGRMRWKGVRPTVRGVVMNPVDHPHGGGEGKTSGGRHPVSPWGKKEGRTRNPNRYSNNMIVQRRRTNKSKKR

SEQ ID NO: 54099 - protein, 92 aa, Cornyebacterium diptheriae
MPRSLKKGPFVDEHLLNKVDAQNEKGTKQVIKTWSRRSTILPDFIGHTFAVHDGRKHVPVFVDDSMVGHKLGEFAPTKTFKGHIKDDKKGRR

SEQ ID NO: 54100 - protein, 256 aa, Cornyebacterium diptheriae
  MISC_FEATURE (243)..(243): X=any amino acid
  MISC_FEATURE (255)..(255): X=any amino acid
VGQKIHPHGLRLGITSDWKSHWYADKNYAEYLAEDIRVREYLVKTLDRAGIADVVIERTRERVRVDIHTARPGIVIGRRGSEADRLRTSLEKLTGKQVALNILEVKNIDANAQLVAQSIAEQLTNRVAFRRAMRKAIQGAMRQPQVKGIKVVCSGRLGGAEMSRTERYHEGRVPLHTLRAEIDYGTYEAHTTFGRIGVKVWIYKGDVVGGRRESEINAPARASRPRRPQRTSTSWRSASSALXAEAGGLRNAYPXA

SEQ ID NO: 54101 - protein, 75 aa, Cornyebacterium diptheriae
MWINIFPDRPLTQKPLGVRMGSGKGPVEKWVANVKPGRILFEMSFPNEEVALEALRRAGQKLPCKVRIVKKEDQF

SEQ ID NO: 54102 - protein, 106 aa, Cornyebacterium diptheriae
MTQPDMSQILAQAQQMQAKLQEAQREILATTVTGTAGNGLVSIDMQGNGMVSSVTIDPKVVDADDVETLQDLLVGAFAEAHEKLGTLAEQKMGPLSQGFDGLGGMF

SEQ ID NO: 54103 - protein, 218 aa, Cornyebacterium diptheriae
MFEGPLQDLIDEFSRLPGVGPKSAQRIAFHLLHVEPADITRLQDALGAIRDGVTFCRICCNISREEVCRICADSSRDRSTICVVEEPKDIQVIERTGEYTGRYHVLGGSLDPLANIGPRELNISQLLQRIGGVLPDRELADSTPETPLYDASPEVREVILATDPNTEGEATASYLARLLRDFPDLVVSRLASGMPLGGDLEFVDELTLSRALSGRLTL

SEQ ID NO: 54104 - protein, 250 aa, Cornyebacterium diptheriae
MSELTIGLILPDVLGTYGDDGNALVLRQRARLRGISAEIHTVRLGEAVPEGLDLYCLGGGEDTAQILAAEHLNNDRGLRRAADSGRPILGICAGLQVLGRSFRASGKIVEGVGLIDATTASLAKRTIGELQSTPTAAGFTAELTEPLTGFENHMGATILGPDAQPLGAVTRGVGNTDLHGITTASVSDEQVSYEGAVQGNVVCTYMHGPALARNPQLADLLLAKAMGIALADLAPLDLPVVDQLRKERLA

SEQ ID NO: 54105 - protein, 122 aa, Cornyebacterium diptheriae
MIQQESRLRVADNTGAREILCIRVLGGSTRRFAGIGDVIVATVKEATPGGNVKAGEVVKAVIVRAKKETRRPDGSYIKFDENAAVLIKNDNEPRGTRIFGPVARELRDKKFMKIVSLAPEVI

SEQ ID NO: 54106 - protein, 416 aa, Cornyebacterium diptheriae
MRTRLAIGAAAVATTASRATGRGSGGMIGGLIAEKIDPNIMQSLAKTRPTALVTGTNGKSTTTRMLASAVRAQHTVATNEGGDNMDAGIISALMAGQSASHVVLEVDELHVPSAADRLHPQCLILLNLTRDQLDRVGEINKIERALRDCVTAHPDMTVIANCDDVLVTSVAYDAPNVVWVSAGAGWTGDSVSCPRTGSHIVRQDDHWYATKPLPNGETFQRPTPAWTITPDGILTPGHAEPVPLSLALPGNANRGNATQAIAAAVTCFNVPLDDAVRAVETVDDVAGRYSTITLGEHQIHLLLAKNPAGWQEALSMVDRTAEGLVIAVNGQVADGEDLSWLWDVKFEELEELSVKAAGERGTDLSVRLTYASVDHELVRDPLAAIKACPAGRVEVLANYTAFRDLKRAITAATKEA

SEQ ID NO: 54107 - protein, 104 aa, Cornyebacterium diptheriae
MKIHKGDMVLVISGPDKGAKGKVIQAFPKTEKVLVEGVNRIKKHVANSAPERGAESGGIVTQEAPIHVSNVMVLDSDGNPTRVGYRFDENGKKVRISRRNGKDI

SEQ ID NO: 54108 - protein, 187 aa, Cornyebacterium diptheriae
MSENYTPRLKTRYREEIRTKLNDEFSYENVMQIPGVVKVVVNMGVGDAARDSKLINGALEDLTLITGQKPELRRAKKSIANFKLREGMPIGARVTLRGDRMWEFLDRLLTVALPRIRDFRGLSDQQFDGHGNYTFGLSEQTMFYEIDVDKIDRPRGMDITVVTTATNNEEGRALLRELGFPFKKADA

SEQ ID NO: 54109 - protein, 362 aa, Cornyebacterium diptheriae
MTRRGEEGEDSRDSCEVAYMNPVSCARYPTMWNMLWGVSWLGVEWGKNVHMIDARDCLALDAAKLYYVTGLGQAQVAKELGISRPTVSKLLSHARDKGFVTISLNDPREVAGGYVEKLCARYGLADVRVVQSPAMGRGLTGELGNAGAALLEEVVKDGMTVGVSWGDTMLAVSEHLRTLPLVDVKVVQLKGGHSHTARNTNDMVTLTRFSRALNAEMMMLPLPVILDSKEAKELVVKDRHIASMLNLGAHCDVAVFTVGAVKSESLLLNLGYLSPSEQARLMEHAVGDVCSRFYDAQGEVADPDIDARTVGISLADLKKRPVRVLVAGGLEKAPAIEAALRTGVATHVVIDHATAQRVVEMA

SEQ ID NO: 54110 - protein, 495 aa, Cornyebacterium diptheriae
MRVNSQSNHDVSPAPSGVVLEAADPAELLVRAQKTLGLLSPLLSPLAQAFHDRGHRLYLVGGSVRDALLDELGHDLDCTTDARPEVVSAILEEYAPVVWDTGIEFGTVSAEKDGQQIEITTFRSDVYDGQSRNPEVQFGDTLEGDLIRRDFTVNAMAMEILPDGSMQFHDPVGGMNDLVAGLLDTPATPQQSFNDDPLRMLRAARFVSQLGFDLAPRVRHAMTEMADQITRITAERVQVELDKMICGKVPWDGIDVMVDTGLADIIYPEISALRLTQDEHHQHKDVYAHSLTVLRQAMDQEEDGPDVVLRWAALMHDCGKPDTREFSPEGRVSFHQHEIVGARLMRHRMRALKYSKHTIRDVSELIRLHMRFHGFSEGEWTDSAVRRYVTDAGDLLPRLHKLVRADCTTRNKKKAERLQKTYDHLEDRIADIAAKEDLAKVRPDLDGNEIMEILDIKAGPQVGQAWKFLKELRLERGPLEREDAILELKKWWYEQ

SEQ ID NO: 54111 - protein, 447 aa, Cornyebacterium diptheriae
MSQIVSHSASAGVRDGVAPSESPASSSAPSWRKTDTVWSLSLFGTAIGAGVLFLPINAGIGGIIPMLVMAVVAYPMAHWAHRGLTRFILSASKEDADLTDVVDEHFGHKAGAFITVLYFLSVYPILLVYSVTITNTVNSFLENQLGITPLPRWLMSLILVGGLIFVVSLGRTVIVKAMSVLVFPFIAILVVLSVYLIPKWNTALFQTFDLRTSAEASGHSIWVTLLLLVPVMVFSFNHSPIISSFAQEKRAEYGQWADYKTGRILSAAQILMVVVVMFFVFSCALSLSPADLAAAKEQNITILSYLANHFDNPVIQWAAPIIAMIAVAKSFLGHYLGAAEGFQGLIASGAASKGKTVDTQSRALVLGTLAFMLISSWLVAWLNPSILGMIETMCGPTIAILLFLMPMYAIHKVPALAKYRGRISNYLVFGMGLLALCTIVYSIVQAF

SEQ ID NO: 54112 - protein, 1109 aa, Cornyebacterium diptheriae
MNPTNPTPHPQRGTRHRIVTPAAPAPVPAARPQVAKETSNDRSKLDRVPVRHKQPEAAVAAVDTSVAVAVAEEAAKEPTEAAPAAAPVASESDAQETSDSDVVRSTGSMAIATLVSRITGFLRTVLITTTLGGAIASAFNTGNTLPNLITEIVLGAVLTSLVVPVLVRAEKEDPDRGEAFIRRLFTLASTLLIAVTIIAVVSAPWLSRLMLRSDGKVNLFQTTSFAYLLLPQIYFYGIFALLMAVLNTKQIFKPGAWAPVANNVITIVVLVAYMLLPGEIDPDAPSKVTDPHVLLLGLGTTLGVVVQLLIMIPPIRRAGVSLKPLWGIDARLKQFGGMALAIIVYVAISQWGYIITTRIASHADAGAPNIYQQHWLLLQVPYGIIGVTLLTAIMPRLSRNAADGDDKAVVRDLVVGSKLTFIALIPIVVFFSAYGERIGVGLFAYRRFDVESASILGLTLAYSAFTLLPYALVLLHLRVFYAREEAWTPTFIIAGITGTKVVLSMLAPLVASDPSRVVILLGAANGFGFVSGALIGAMLLRRKLGNLGSREVTKTSVWALGSSLVGIVVALGLSMGMDRVAGGFFEFFGSVGMLIHLAIVGVVFLVVTALVLSRSGLEEVVSLGYALQRIPGMRRVIKMKAQQPADTIPTNEALAAQALTFDDTFNATPIPAPMSAGIVRGPRLVPGAQVSDGRFRLLADHGSVSTARFWHAREKATGRDVALVFVDTSGSAPQAPASPAAAAGKAAEIARRTRALAGLHHPAIAPNIEVLSYRNGCLVVADWVRGSNLSAVADSTVNPYAAVYAFEPLAQASVAAEQAHTPLGIDNHARIRINTDGMAVLAFPAVLSDSSYERDLRSLRTALGTLIDVDTAPKAITALLQKDAADLPQAIADLPDPDDAHEEHLNVTAEETPKPTNTPGFGSRGFSRSSRVFIAATAVLLVVVLAIITAYVTSVLGGDKQEAPITKNSIAGGQSESANSTMPGIVVPIISAETSHAAGNADPDVPDTAPLAIDTALESAWQPAKGDTLVLNFAQPYVISRVIVDSPTKDMTLEVRAGDTVVGTGTVTKSRTKITVTPAPAVTSLSIRVVGVPDGVSPEINDVKLVAKI

SEQ ID NO: 54113 - protein, 1330 aa, Cornyebacterium diptheriae
MTSADIMRWRNSDTTGQALPDYPVVFTSALGHGDSTDWPGVMTWGVSQTPQVLMDLLHWESDGDLVLAWDCVDAALPENFADNAIDIAYAVIQQLTNPAVWTDPTVVADPWLRMPGPMERIGESELIDAPLRAQYEAAPEARAVIAGEQSWTRAELDHHSERLAAAVARAAHDHDVVRADAPVLVMMQKSCMQVAAVCAVVRAGFAYIPVDPSWPMERVQSVMQRSGAVVCLADEGVAIPEGLHRIPLSEQGAEATGYTGRQSQPEDLAYVIFTSGSTGQPKGVAIEHRAARTTIDDINQRFEITDTDVVLGLSALSFDLSVWDIFGGLGAGATVVLPEEDRLRDPSYWLDLCDRHEITVWNSAPPLLEMLVDYAEIDPEAAAHALRNLRMVMLSGDWIPVTLPRRLKELAPNATVMSLGGATEASIWSICHRTSDADEHGPSIPYGRALRGQWFRILDTEGVPVPLGTPGILHIGGHGVARGYLGDPERTAERFCEHPRLGERLYNTGDEGMWLPNGEIRFLGRVDRQVKINGFRIELGEVDAALARCASVKSAISAAPQDASGRKRLLGHVVPTQPERFDDSVLRRELAEHLPSYMIPSRFVVHDHLPVTDNGKVDHKALPNPWCAETAPEPQVEPEPEVLPEPDRGSATPAELGINSLDIVRLANRIEDATGTRPSLATLLNQPWQESLAMVEVLEPRPALASEQKPELVPDRDREVIDVVGAGMALGARIRAEVPISEEPVEDQFVQVGQWLKQLRAVVEPAGCMQVTPPSGNILCAIDITPGEKADVSDHAPLTPLQLGYLVGRADTWLGEPVAPHYYTEVEVADLDVVALQRALDEVVRAHPALMLGVHDDGNQGLSEALRPRLVVTDLRDHPDPDGELERIRAVGCAGVSDPLGTAWFQLRATLLPTAVRLHLSIDMLFCDVVGAGVLVSDLQRAYNGETLEPEQRGFLEFAQRVAQNFGAQVTAGASDAQPLPSVIGPWQQPTSARFERIRTEITSDVADELSRAAATMGVTLDALMATIISTTAGAITGSPAQPIVATVLARPRGFERTVGEFTSTVRVVPDQGDFVARAKSATHTLVTATDRALRCESEPRQGSAEVTPIVYSSGLHAVGDQSEVLGTWGKTIVAQSWTPQVLVDVQLFRTESGLALIVDYAVDALQPGAGRAFADGIVAAMRQCAMGAGMDSIWPQLRVPGLRAVDTRWTAFDGDSAPSSTKPDHLIEVDIVAHELGSVLGITLEAQSYDKGFFDVGASSVDLIAMRNALVSRGYSLTLLDVFAHPSVLQLGRFIAPDTPTTSQVTTDSAHQRGHRRRRIARALNGELS

SEQ ID NO: 54114 - protein, 458 aa, Cornyebacterium diptheriae
MFISCFDMFKIGIGPSSSHTLGPMKAGKAFVDTLEERDLLDRVTRVRADVYGSLSLTGIGHATDKAIIMGLAGFEPETVDIDAMPGFLEIVASLQRLALAGGKKTVDFSRTEGIVFHNTCLQLHENGMTITAFEGDEVLLTKAYFSIGGGFIVDKEHFGLPVEDTAVVPFPYNTAEEVLAHCDREGMSIPEFAWRNEVAANGEEAVREHLAKVWKVMQSGIERGSSAEGILPGDLRVPRRAKALRERLEATSENEPLRMMSWLNMFAMAVNEENASGGRVVTSPTNGACGVLPAVLSYWDRLVKPVGEQEVIDYLLTCGVVGALYKKNASISGAEVGCQGEVGVACSMAAAGIAQLMGATPAQAFAAAEIAMEHNLGLTCDPVCGQVQVPCIERNAIAAVTSVNAANMSLQRGSTPTVSLDQVIQTMYQTGKDMDSKYRETSLGGLAKVLMPRLMPCS

SEQ ID NO: 54115 - protein, 347 aa, Cornyebacterium diptheriae
MTIDHARYARQIALSGFGVAGQTALSGAHVVCIGAGGLGSPAALYLAAAGVGTITIIDDDVVDRSNLQRQIMHSDEAVGQPKVESALQRLRALNPDCRVVAINKRCVWPACLDMCRDADVIIDGSDNFDTRYVASTTAARLGIPHVWGAILGFQAQLSVFDAEHGPVYEDVFPQPPLPGDVPNCAEAGVLGPLVGVVGSAMALEAIKLITGIGQPLTGNIGYFDGMTGLWEYIPISSHADTRRQLRVEPPRHTATVRETTKVDSKKYTTIIDVREPEETHHGTIPNARLVPLSLIENDLNTARSLIPDGSLLYCAAGIRSARACILLSRAGVKDLVSLSGGYNQWSA

SEQ ID NO: 54116 - protein, 218 aa, Cornyebacterium diptheriae
MTTRNDVAQMIDHTLLKPEATTDDFKALIADAVRLGTYSVCVSPSALPVEVPENLHVATVVGFPSGAVKPEIKAAEAARTVADGAEEVDMVINIALAKEGKFDELEAEIKAVRDAVPAPGILKVILETAALTDDEIVAACKASENAGADFVKTSTGFHPAGGASVHAVEIMHATVGGRLGIKASGGIRTAKDALAMIEAGATRLGLSASAAILEELGE

SEQ ID NO: 54117 - protein, 550 aa, Cornyebacterium diptheriae
MSYAELERTAREWADHDPDPRTKETIEGWLKTHDEESLQQAFNGPLTFGTAGLRARVGAGESQLSLAVILRTTYGLVDWVKTQLGADATPTIVIGCDARHGSLEFHQAAAEVVSAAGGRALLLPAKNPTPLTAFSVKKFGADAGIMVTASHNPPADNGYKVYLGGRIAQGPAEGVQLISPADKEISEAIAAAPYADEIPRTTDNIEHVDPREDYLTRALTLADKKSDILIALTAMHGVGAALGEKVLTAAGFNVSLVPEQAEPDPDFPTVSFPNPEEKGALDLAKAHANTIGADVIIAYDPDADRCAVATPDANAEGGWRQLSGDETGAVLGAYRASVAKPGSMANSIVSGRLLSKIAEAAGRTHATTLTGFKWIARTPELVFGYEEAIGFCCDPEAVADKDGVSASVVVASLVSALKAEGRTLDDALDDLAREHGLYQTAPLTFRVDDLSIIARAMSTLRAQPPTELAGATVTEVTDLNDPTLPWGATDGMMFITDHNDRIICRPSGTEPKLKCYLEVVMPVTGDTIPRAEAAQRLDAIATALRTHLGM

SEQ ID NO: 54118 - protein, 421 aa, Cornyebacterium diptheriae
MALVVQKYGGSSLESAERIRRVAERIVATKKQGHDVVVVCSAMGDTTDELLDLAAQVNPVPPAREMDMLLTAGERISNALVAMAIESFGAKAQSFTGSQAGVITTERHGNARIVDVTPGRVREALDEGKICLVAGFQGVNRESKDVTTLGRGGSDTTAVALAAALNADVCEIYSDVDGVYTADPRIVPNAQKLEKLCFEEMLELAASGSKILVLRSVEYARAFGVPLRVRSSYSNDPGTLVAGSMEDIPVEEAVLTGVATDNSEAKITVLGIPDSPGSASAVFRALADAEINIDTVLQNISSLEDNRTDITFTCPRADGPHAMELLRNLQAKNDWQNVLYDDQIGKVSLVGAGMKSHPGVTAEFCEALRDAGVNIELISTSEIRISVLIRESDVDVAARAIHEKFELGGETEAIVYAGTGR

SEQ ID NO: 54119 - protein, 343 aa, Cornyebacterium diptheriae
MTTVAVVGATGQVGRVMRSILEERDFPLDTIRFFASARSAGTTLPYKGQEIEVEDLALQIEESLAGIDIALFSAGGSTSKQYAPLFAAAGATVVDNSSAWRKDDEVPLIVSEVNPDAKNDVVKGIIANPNCTTMAIMPVVKALHDAAGVTKLHVSSYQAVSGSGLAGVETLIKQVAEIGDRAVELVHDGSLLAPEDMGPYVAPIAFNALPFAGNLVEDGTEETDEEQKLRNESRKILGLPDLKVAGTCVRVPVFTGHTMVVHAEFNNAITPEQAREVLGNAAGVDVVDVPTPLAAAGVDNSLVGRIRQDQTVDDNKGLVFVVSGDNLRKGAALNAIQIAELLV

SEQ ID NO: 54120 - protein, 259 aa, Cornyebacterium diptheriae
MVSIDTYNACVDFPIFDAKSRSMKKAFLGAAGGAIGRNKDNTVVVEALRDVNLHLREGDRIGLVGHNGAGKSTLLRLLSGIYEPTRGSAHVRGRVAPVFDLGVGMDPEISGYENIVIRGLFLGQTRKQMKQKMDEIADFTELGDYLSMPLRTYSTGMRIRLALGVVTSIEPEILLLDEGIGAVDAAFMAKARERLSDLVKRSGILVFASHSNDFLVQLCDSALWVDHGTIRQAGPVADIVEAYEGKEAADHIRRLQARM

SEQ ID NO: 54121 - protein, 402 aa, Cornyebacterium diptheriae
MHLAKERSSVSGTLRVGDRSPRIAEVRTALTRLGLLEGTTKNLEQTKSDTFTDSETLFDEDLALALQGFQQARGIIASGEINEITLKLLREASYSLGARVLSFEPNNIFVGDDVVQLQHQLQELGFYTDRVDGRFGELTYTSLVNYQLNYGLNPDGICGPETIRAFGRLGRRITGGSPHALRERERVRDAGPMLAGKRVVIDPGFGGADKGQVVRGPYGDITEEEIIWDLAGRIEGRMIAAGMETIVSRPRQDSPSLKGRADIANAFGADVMISLQCDKYPNDKANGVASFYFGSEMGSSSLTGEMLSGFIQREISARTDLVNCGNHGRTWDLLRITEMPTVEVVLGYLTNPHDVAILTDPEQRDAIAEAIVVAVKRLYLLDDDDQPTGTYRFSEMLEQGLL

SEQ ID NO: 54122 - protein, 315 aa, Cornyebacterium diptheriae
MRAIYVQDDATLAVHDAPTPTLQPGEVLVQVKAAGVNRADLLQAAGHYPPPPGESEIIGLECAGVIVDAGTTSRNVGDKVACLLAGGGYAEYVAVPEGQLMPIPEGYSFAEAAAVVEVAATVWSNIGMLTGLKPEHMFLIHGGAGGIGTFAIQLAKHVGATVAVTAGSKEKLETCRELGADILINYREEDFAEVLKNKCDRILDIMGAKYLDQNVRALAMDGHQVTIGMQGGVKGELNIGRLLSKRGTISATALRARDREDKARIVASTVENVWPLLADGTIRHHIHATLPLEQAQRAHEMLKNGEVTGKLVLEV

SEQ ID NO: 54123 - protein, 338 aa, Cornyebacterium diptheriae
MDDQSWDDTPIAAAARRAAQVMTPNTLHLPRPERTRRLTVANQKGGVGKTTSSVNLAAGLALGGLKVLVVDLDPQGNASTALGADHRAGTLSSYEMLIGECTAEEALQQSTASENLFCIPATIDLAGAEIELVSLVRREYRLADALNDAFIKEHGFDYVFIDCPPSLGLLTINAMTAVDEVLIPIQCEYYALEGVGQLLNNIGMIRQHLNQNLHISAILLTMYDGRTKLSEQVTEEVRGHFGDVVLRTKIPRSVKVSEAPGYGQTVLDYDPGSRGAMAYLDAARELAQRGDYLPIEASGAVGMSPESARRLQEQLDAQDGEGDQPEAADVINLETSKE

SEQ ID NO: 54124 - protein, 211 aa, Cornyebacterium diptheriae
MKHEEIESIASHVFGGNVDKAYAYHELLATDGSTRGFIGPREVPKLWSRHLLNCAVIGEAMDENIRVADIGSGAGLPGIPLAIARPDLTITLIEPLLKRSVFLGEVKEKLELDNVTVIRGRAEEKAVREQLGLVDVATSRAVAPLGKLAGWSLPLVRLGGKMIAMKGSSVHEELERDEKMIWKAGGGKVKIFSVGEVLEEPTTLISIRKVR

SEQ ID NO: 54125 - protein, 362 aa, Cornyebacterium diptheriae
MRHEFGISQFDAQLTITFFLIGMTVGQLFSGPITDARGRRGLFFIGTIVLTIATLLSALAPHAWVLYLSRAAMGWAAGTAVVSARAIAADKASGPELAKVFSILMVLGSIAPVVGPILGGLIVHSAGWRAVFWFLTVVYAFTAVIAARTIPETLPVERRTHGGIRAMLAAIRTLLSNRVYVGSTVAFVFAFATMFTFVSASPFILQEHFGFSPLHYALIFAMNTSGLATMAIINARVVHRFGAPRLAATGVTIMALAVAWLAIAATFSLGTVAFLAGIFTMTASMGMIFANTSALAMSHAGPVGGAASAFLGSGQFFIAGLYAPMFGVVQSWGIAPPLAAATMMSVTAVITVVGLAQALRSS

SEQ ID NO: 54126 - protein, 317 aa, Cornyebacterium diptheriae
MLNFIYWPISAILWFWHKVVSFVLDPGSGLSWVLAIVLLTFTIRALLVKPMLNQMRSMRKMQELQPLMQEIRKKYPNDQQKLMEETRKLQKEMGVNPVAGCLPVLVQMPVFIGLFHVLRSFNRTGTGTGQLGLSPEVNRETANYIFSAADVQSFLDARLFGVPLSAFISMPKEMYQAFQPVDFTRTDIALVAAPLIVIIVLATHFNARLSVDRQKARRESGLQKPPANDQMQMQMDMMNRMMLWFMPLTILFTGVLWHLGLLFYMVSNNIWTFFQQRWIFDKIDAEEAAEIEAKKAAKRATAPRPGQRPQQSKKKKK

SEQ ID NO: 54127 - protein, 119 aa, Cornyebacterium diptheriae
MLPSQHKLSNSEQFRATIRKGKRAGRSTVVLHFYAEATAGNLATAGGPRFGLVVSKAVGNAVTRHRVSRQLRHVVIAMKDQFPASSHVVVRALPPAATASSEELRADVQAALDKLNRKR

SEQ ID NO: 54128 - protein, 259 aa, Cornyebacterium diptheriae
MHSYDMFLWVAFPWLAIAAFAVGVSWRWRTDQFGWTTHSSQIYESTLLRLSSPLFHYGMMFVILGHVMGLAFPKSWTRAVGINDHAYHLIATIPGTIAGIAAVIGLCGLIYRRVSNKAVLLSTSKSDKVMYILLALAIFSGFIATVSTQVFGGPHGYDYRETISPWLRQLFIFNPTPELMLDVPWQFKVHVISGFTMLAVWPFTRLVHAFSAPVGYVNRPYVVYRSRDITTQPSQQHVAWAPVQHDKNQSKDEAGWTGA

SEQ ID NO: 54129 - protein, 50 aa, Cornyebacterium diptheriae
MFTVAKGKRTFQPNNRRRARKHGFRIRMRTRAGRAIVAARRNKGRKSLTA

SEQ ID NO: 54130 - protein, 332 aa, Cornyebacterium diptheriae
MSATSSTPQAVALDPVQLRKDAASLMMVGVGNFDDALFAIQQGAGGIFIGSGTDPQILTTPGRDIAELRRIAGRPLSVAIDFEGGRVLRHRGILGDFPSPQVMAQTMTPEQVRGMAYDMGRSLFAHGINVNFAPVVDIEAGLEVVGDRAFSPDPLIDATYATAFAQGMADAGVRPVLKHFPGHGRASGDSHTAQVHTPPLAELEKLDLIPYGRVPVAGAGVMVGHMIVPGLGAPETPSTINPAAYQLLRSGSYPGGQPFSGVIYTDDLTMGAVTSLMPTVQAVPAALAAGADQALWVSTAGLVEAIDATVAAVSEGRYPVEQFKASVARVAG

SEQ ID NO: 54131 - protein, 533 aa, Cornyebacterium diptheriae
MKVMAQIAMIMNLDKCIGCHTCSVTCKQAWTNREGTEYIWFNNVETRPGVGYPYGWENQDKWEGGWVLDKKGKLKPRSGGRLKKLSTLFHNPKLPTIQDYYEPWTYEYEKLLSTPAGQKTQPTARPISQVDGRPIDKISWSSNWDDNLGGSQETLDDDPVLKQMNLEVKKEIEDAFMFYLPRICEHCLNPTCVSSCPSGAMYKRAEDGIVLVDQDRCRGWRMCVSGCPYKKVYFNHKTGKAEKCTLCYPRIEVGQPTVCSETCVGRMRYLGVVLYDADKVASAARTSDVKDLYQAQKNLLLDPHDPQVIEAAMKENIPHAWIEAAQKSPIWDLIARYEVALPLHPEYRTLPMVWYIPPLSPVVDRVTATGNDGEDHKILLTAISTMRIPLDYLAGIFTAGDTVPVEKVLRKLAAMRSYMRDISLGKTADESIPAAVGMTGADIRNMYHLLGVSKYDDRYVIPTASPETPRGIASLPEYAGINPAQSVEQFHGLGPGAPEACHHEAQSSGGGKVSLASWNVGSSPSSMFPPRKS

SEQ ID NO: 54132 - protein, 328 aa, Cornyebacterium diptheriae
EGQQIFLKGGRQADVFYRNRWAFDKMVRSTHGVNCTGSCSWKVYVKDGVITWESQAVDYPTTGPDMPDYEPRGCPRGASFSWYTYSPTRVRYPYARGVLVDMYRDAKKRLGDPVLAWREIQETPEKRDAYISQRGKGGLIRIPYEEAIEMASAAHVYTIRKHGPDRIAGFTVIPAMSQVSYGAGTRFLQNIGGVALSFYDWYADLPPASPQTFGDQTDVPESGDWFNSAYLMMWGSNIPVTRTPDAHFMAEVRYKGTKIVTVSPDFADNTKFADEWLRIEPGTDAALAFAMGHVILKEFHVGKREPYFLDYMRKFTDSGFLVTLEQRE

SEQ ID NO: 54133 - protein, 443 aa, Cornyebacterium diptheriae
MATINTSGRVLTGWNPEDPEAWDSKIAWRTLVITTYSLFIGFSTWYLVSAIAPQLNQIGFNFSKTQLYWLSSASGLAAGFSRLAFMFLPPIVGTRKLVTISSFVLVLPMLGWFFAIINPATPYWWMLVLSVAGGLGGGVFSGYMPSTGYFFPKAKAGTALGLQAGIGNFGVSFIQLAAPLLMGVSLLGVSAKPQLRTDGSEVFVHTPAIFMVPWTILAGVLAWMYLKDVPVKANFRQQMDIFGNFNTWIMTLIYLATFGAFSGFAAQFALLVNNIYGANSSLADTFAASELPKGAAFAFLGPLISAAVRAAWGPFCDRFGGAIWTFISCAGMAVSTAVAALLLNPTDPSQFWYFLAAMLTMFFFTGLGNAGTFKQMPMIFPRRQAGGVIGWTAAIAAFGPFFVGVIVSTLGAPAFFWGCVVFFALCAALTWIFYARPQAPFPG

SEQ ID NO: 54134 - protein, 340 aa, Cornyebacterium diptheriae
MLGITLFSAVASLGVAFSQNYTMTLVLAFLVGFCGNSFTAGAAWASAWFPKHKQGFALGVFGAGNVGASVTKFIGPVIIASTAGATYFGFIPAGWRLIPIIYSVTLVIVAILMMIYTPKVDRFGSSGRSLAEMLLPLKQVRVWRFSLYYVVVFGAYVALSATLPKYYISNYDVSLAAAGLLTAIFIFPASLLRPVGGWFSDRYGARRAMYGTFFVMGTAAGLLCLPSNIINIFVFTLLIFSLGCAMGVGKAAVYKHIPEYFPHDVGAVGGLVGMLGGLGGFFLPPLFAYTKAWTGWSTSPFIVLLILVAVSALWMHVTVHRMLHSHVPELKHHMEVPATQ

SEQ ID NO: 54135 - protein, 920 aa, Cornyebacterium diptheriae
  MISC_FEATURE (2)..(2): X=any amino acid
  MISC_FEATURE (546)..(546): X=any amino acid
EXSVTLIIVLALAACAVALAPVTVRICDRKAGWPLAALFVVAAVLLCKELPGIIAGTPLTLEYTWVPDFVGDGVDVSFALRADALSSFFALLALGIGSVVFAYSASYLHNNAGNTSFYTIMTAFMASILLLVFANDAVLLFIAWELVSLASFMLIARSGGKGGELGSQRTLILTFIGGLTLLVAMAIASNQAGSTNIDAIIHAGFWAEKPALTGVVAVLVAVSAFTKSAQFPFHFWLPEAMAAATPVSAFLHAAAVVKAGIYVLLRFSAVFSDVAVWNWLLIVVGMFTAVMASFFAIQKTDMKKLTAYSTVSHLGWIVATIGVGTPFALAAAVVHTLAHALFKSSLFMLVGVVDHQAGTRDLTRLGSSWRQLPFTFGAMAIAAASMAAVPPLFGFVSKEGMLEAFLHAPIGNAGVVVLMVAAGVGALFTFTYSVRLVVDGFIDGSREMSDCKEAPVSLWLPAALPGVLSIPAALFVSRLDAPVSAAVSEVADDPHTHLAVWHGVTIPFVISMLVLVFGVLGLVKRQWIWDSLADRKLHRVVVMSCXTCRFVALLRLVVVWVRWRDSLSPTRHLAYVFMLLVVLGGTVTVKGVASGGIDGVPLAPRIDGADRWADALPLAIIVLAAALLLRTKRRLTAVIMIGVVGVGVTVQMLMLGSPDVALTQFMVEALTVVIMMMVIRQQPDNFHPSKGRRKAFAAVMAVAVGVVTFLMCWFVLGRRERPELAIWYLNNGPEITGGDNVVNTILVEFRAFDTMGELSVLGMAAVVIAAVVTSMPRYPFAHGTHPAPFGLSHVNSIPLRQLLRVLIPILGILSFAIFMRGHNSPGGGFIAALVAGGALMLSYLSHARDQHIFTFKTPIYLTSIGIILALVSGFLGLTHGSFLYALHGHWAGEHWTTAMIFDLGVYLAVLGMLSMAINAL

SEQ ID NO: 54136 - protein, 408 aa, Cornyebacterium diptheriae
MLTPKIYRETCIDLAHSLAQARTGTITVSPHDAAIDCLTLAHDIHAVLPIPPMDNSAMDGFLVRTADLVGSAPWSFPVAGDVPAGAAPMEVPPGRAVRIMTGAEVIGENVTVIPVEKTNIPAGPTTCPSHIVVHEADAQPRHIRRRGENVQPGQCIATRGQRVDAGTLAAIVSCGVREIEVLPRLRVTVIATGNELGDSDADSLKRAHIPDSNSPMIAQLVHDTGLATVNIVRMCDDIAAFGSAISAAANSSDLIITTGGISAGAFDVVKESLSSHKDSTMWFGAVAMQPGKPQGHGRVGNTMITCLPGNPVSAFVSFQLFVRPALYTLAGLQPPALGYLEADIQGTLPTPRGRDIFVPATVTYVDTWQAQPAAFGSHFIGSLVGVNALIHVPADAHRVAPRVIPLTF

SEQ ID NO: 54137 - protein, 298 aa, Cornyebacterium diptheriae
MPSPQVLTDDEVIRLVSIAVTRLNVTSVRFTGGEPLLRKSLESIVSTTSSLRTPQGTSPSIALTTNGLGLDKRITGLVDAGLDRINISLDSLDPQRYAELSRRARLDDVLKGIDAAVRTGIAPIKINTVVMPGVNEDDIVPLARYCLSTGLQLRFIEQMPIGAEGNWDKSSMITAAQILEVLSSEIELSEASQPRGHAPAELWNASYQGIQGSIGVIAAVTQPFCGACDRTRLTADGSIRNCLFAHDEFSLRDLMRDGASDDELAQAWKGHAYIKAAGHGINDLGFLKPTRTMSAIGG

SEQ ID NO: 54138 - protein, 154 aa, Cornyebacterium diptheriae
MSELKNKIRADLTTAMKAREKERTGTLRMLLAAIQTEETSGSKHELTDEDVLKVIAREIKKRRESAEVYAEAGRSELADAETNEANILAEYQPQQLDDDELAALVAEAVAQVKAELGEGVSMKQMGQVMKLATAQAAGRADGKRLSTAVRAALA

SEQ ID NO: 54139 - protein, 306 aa, Cornyebacterium diptheriae
MPSIVKGIIPPVLTPMKSDRSIDFEALERLVEHLIAGGVDGLFALGSSGEVAFLSDEDRATVIREIVRIAAGRVPVYAGVIDMQVNRMLGHIKAAEEAGVDAIVATAPFYAICGPAEVEAHFRAVAAATSLPVIAYDIPVCVHTKLSPELLVKLGSEGVLAGVKDSSGDDVSFRRLVMLNKKAGSPLTLLTGHEAVVDGAFIAGADGCVPGLGNVDPAGYVRMWKAAEAGDWATVQKEQDRLAALFEIVFQPIGKVGPAAGVGSFKTALELMGIFSSNLMSMPLAPIDDAPSRDAIAEILKATDML

SEQ ID NO: 54140 - protein, 540 aa, Cornyebacterium diptheriae
MSMDSQRRYSRRDFFKISGAVGLAAGFAATLSACAPDNSGSSTSGSQAAAGSANNDGTINAAISYELGTNGYDPMSTTAALTVAANWHTLEGLTEIDPATGETYAALAKEMPKASSTEVEVTLRDGAKFHDGSAVTADDVVFSFERVLDKANKSLYASFIPFITSVEKKDDKTVVFKLSTETGVFASRLAVVKIVPKAAVEKDVDAFSANPIGSGPYKMTDNGGTSKTVKFERFEDYNGPKPARAKNMVWQIIPDASTRTNALQSKSVQAIDSVPYLSIDQLKGTHTVESVQGFGLLFAMFNNDKSNPFSDLKNRQAFLYGIDMDKVIKTALLGQATAPTSFLHKEHPQYHEAKVVYSHDAEKAKALFKETGLTKLRMLCTDHDWVKKCTPLIQESLTALGIQVDFTEKKSSDVYNTIDGKPEAYDVVIAPGDPSVFGTDPDLLMRWWYSGDTWTDTRMHWKGTEAYAKLQEVLDAGLAATSESEQKNKWHEALDIISENVPLYPLLHRKAPTAWDASTLVDFKPISLTGLSFSGVGTTQ

SEQ ID NO: 54141 - protein, 417 aa, Cornyebacterium diptheriae
MGRMNSPCGLLCMALRNGANISPRGSAHLRGRSGQYQTRRADTLELSLMRPETQSAVTQLDSTLTTIEKVMNPEDLESRVRELEQQASDPTLWDDPDTAQKVTTELSSVQAKLKKLSTLRQRIDDLPVMYELADEEGEDALALADEELAELTADVEALEVKTMLSGEYDSREAVINIRSGAGGVDAADWAEMLMRMYIRWAEKNDHKVDIYDISYAEEAGIKSATFVVHGEYMYGQLSVEQGAHRLVRISPFDNQGRRQTSFAEIEVLPVVEQTDHIDIPDSEVRVDVYRSSGPGGQSVNTTDSAVRLTHIPTGIVVTCQNEKSQIQNKASAMRVLQAKLLERKRQEERAELDALGAGGNASWGNQMRSYVLHPYQMVKDLRTNYEVNDPQKVLDGDIDGLLEAGIRWRMAEQQGQN

SEQ ID NO: 54142 - protein, 481 aa, Cornyebacterium diptheriae
MTAVNPQDGSTVEVTNLLTKEGATKMVSEAVNNFVAFPPLGVIITVMLGVSVAEHSGFISALVRAMVAKVGPKTLTYVVALAGVTGSIASDAVYVILIPLGAMSFRALGRSPIVGAMVAFAASSAGFNASLILNITDVLLSGISTSAAQLVDPEYHVSPLANYFFVVASSLVLALIITAVTELFVKNRARQLVDHDHIDHSELSFRDDDHPDLGAKTDEELAEEIALHSGEIRALTIAGVAFIGMLAVYFALLFVPASPFYSEESAMSSPLVKAVTVPISLMFLGLGVVYGITIKSITSLGDIPAFMAKGLTTLIPMVVLFFMVAQFLAWFQWSNLGIWTAIKGAELLQRWDLPVYVLFAAVVLAVALLNLTITSGSAQWALMAPVIVPMMMYVGISPEVTQMLFRIGDSPTNIITPMSPYFALALTFLQCYYKPAGVGTLVSLALPYSIAMLVGWFAFFIVWYALGIPLGLGTPMHFQQG

SEQ ID NO: 54143 - protein, 404 aa, Cornyebacterium diptheriae
MGYHPVCQRSPRKLTPPHITTKEYQGMKQIIGDLVTPAGVLPHHRIDIDSNGMIAAITPAPEVDNPPLVLPGLADIHNHGGAGESFPNSDYDGCVIAARHHRAHGSTTLLASTVSMPEHTLLPQLSLLADLADAGEIDGIHAEGPFVNPCRCGAQDPEAIILGDPELFKKMIRAARGWLKSMTFAPETAHAKEIIDLCAENNIIVSLGHTDADFSVTEQALSYAVAAGATVTATHLFNAMPAIHHRDPGAAAALIDAAARGNAHVELVADGIHLDDHTVRMVIDSVGADRVSFVSDAMGAAGKEDGDYVLGALAVTVKDSVARLTTTDGSEGAIAGGTSRVIDQVRRHVAAGFPIEDVVKAATEGTRILGLHDRGAIEVGKRADLVLCSGDFHVDHVLIKGEDI

SEQ ID NO: 54144 - protein, 127 aa, Cornyebacterium diptheriae
MGTEIKSIREGKVSLTDSFATIDEGEAWIRNLNIPIYSRGSWTNHSPMRTRKLLLHRREIDSLMGKVRDGNKTLVPLSLYFKEGRLKVELGLAQGKQDYDKRQDIKRRTEEREVVRDLGRRVKGIHA

SEQ ID NO: 54145 - protein, 259 aa, Cornyebacterium diptheriae
MEIVITPTKDDAARIAADILEEYAREGKTLGLATGSTPLGTYQELIRRHNEEGLSFAECQAFTLDEYVGLPREHEQSYYSTIRREFTSHIDIPDEKVFNPDGTAEHPGQAAQEYDRLIVEKGGVDIQILGIGTDGHIAFNEPTSSMASRTRIKTLHPDTVRDNSRFFNGNESQVPHHVMTQGIGTIREARHLLMLCFGENKADAVKAMVEGPVAAVCPASVLQLHEHATVIVDEAAAAKLEHTQYYRYALENKPDWQRF

SEQ ID NO: 54146 - protein, 247 aa, Cornyebacterium diptheriae
MTVDFPQPDAPGHNIDLRPEFAPRWLSPLVSDVANGVICDRLRRVLAPPQRTETTKQAAVLMLLAGDPLAHTVPNDATVLLTHRSPTMRSHSGQIAFPGGRMDPTDHNVVDCALREAWEETGVDRMNVTPLVTFPMLHIRATGYPVHPVLGYWHRPSRVGVVSPNEADAVAAIPIAELADPSNRLTVEFDRWSGPAFRINDFIIWGFTGGLLDAMLYQAGWEQPWDSHKHYDLYDTLARSRNNERLT

SEQ ID NO: 54147 - protein, 132 aa, Cornyebacterium diptheriae
MTMTDPIADMLSRVRNANNAHHDAVSMPSSKLKANIAEILKSEGYIADYKVEDAKVGKTLTLDLKYGPNRQRSIEGVRRVSKPGLRVYAKSTNLPQVLGGLGVAIISTSHGLLTDRQATEKGVGGEVLAYVW

SEQ ID NO: 54148 - protein, 178 aa, Cornyebacterium diptheriae
MSRVGKAPIAIPSGVDVKIDGQHVEVKGPKGTLDLTIPEPIVASIEDGQISVVRPDDHRKNRSLHGLSRSLVNNMVVGVTEGYTIKMEIFGVGYRVALKGKNLEFSLGYSHPVLIEAPEGITFAVDGNTKLSVSGIDKQKVGQIAAIIRRLRKDDPYKGKGIRYEGEQIRRKVGKTGK

SEQ ID NO: 54149 - protein, 135 aa, Cornyebacterium diptheriae
MSNTENNNAKRLPVGKDISTRRRIARARRHDRIRKNLRGTAETPRLVVHRSSRHMHVQVIDDIAGRTLAAASTLEAEVRALEGDKKAKGAKVGQLIAERAQAAGITAIVFDRGGYKYHGRIAALADAAREGGLKF

SEQ ID NO: 54150 - protein, 208 aa, Cornyebacterium diptheriae
MPGRERRDGGRSADDNQKKNDRRGGRRDDRRNQQQDERSQYIERVVTINRVSKVVKGGRRFSFTALVIVGDGKGMVGVGYGKAKEVPAAIQKGAEEARKNFFRVPMVAGTITHPVQGEAAAGIVMMRPAAPGTGVIAGGAARPVLECAGVQDILCKSLGSDNAINVVHATVAGLKQLNRPEEVAARRGKTLEEVAPARMLRARAGQEA

SEQ ID NO: 54151 - protein, 148 aa, Cornyebacterium diptheriae
MSEPIKLHDLRPAKGANKPKTRVGRGEASKGKTAGRGTKGTKARKQVSAAFEGGQMPLHMRLPKLKGFKNPAKVYYQVVNVSDLEKAFPQGGEIAVADIVAKGLVRPKQPVKVLGNGEISVKLNVTATKFSKSAVEKIEAAGGSVTEA

SEQ ID NO: 54152 - protein, 266 aa, Cornyebacterium diptheriae
MATHNPTLNDKIFGSVAKKEALLKTDFLRYFTRCILAGVYITLGTAFSAHVAQNVENLAPGLGSVVFAMFFFVGLGTIVILNAELVTSNMMYVSYAVVGKKTPWHKAALVLIVCVIGNLVGAVIIGYLLGQSAAYSGLTPESFVSVTLDHKLEKHSMGLFIEAMLANFVVNMAIVGCALIKDIAGKLIWLMFIIGMFVGLGLEHVVANFGLVALVGFGSEVHSEYFTAGYILHNWGIDFFGNLVGGGLCIGGVYAWLNRGSENYRD

SEQ ID NO: 54153 - protein, 532 aa, Cornyebacterium diptheriae
MTSKSLPTRTTLSSGTFYQIYPPSFADSNKDGIGDFRGIISRLDYLSDLGITGIWLNACFDSPFKDGGYDVRDYTKVASRYGTHEDLVELFHQAHARGIAIILDLVPGHTSEQHPWFQQSAASKYTDFDDRYIWTSHAFEGGAGLAFIGGEHPRNGAYIINFFKSQPALNYGFAELTQPWHQPVDAPGPRANQDAMVEIMKYWLSQGADGFRVDMADSLVKNDGTSKRATIGIWQSMLSQVRAEFPNAIFVSEWGTPTQAFEAGFDADFYLDWRGNGYNLLARNTDTPLERRDDASFFNSDSATGAQEFLDMYLPQWERTHEAGLFSFISGNHDCPRLAPRLNEQERALFFLFQLTMPGLPFIYYGDEIGLPYAEIPTKEGGYARTGSRTPMCWDSQLPNGGFSLGDAPLYLPMTDTSQNVAQQRERADSLFHHVQKLIQLRSQLPALDGFADLEFDLSLLKKHPKVMVYRRTHHHGDSVLIALNAGNKPIRVELQQPQAHELFRCGDVTYPDLSDHSVVELGPTSGVILSV

SEQ ID NO: 54154 - protein, 413 aa, Cornyebacterium diptheriae
MDMVHTKKILSVVAASTLVLAGCSSESDSSNKASDSGASNEATLTVWGPQEDQDGADGWLQSVQKEFEKAHPDYKITWKNSVVSAADAGKTVNQDPSAAADVYVYANDQLGSLLDSGAVGELSDDGMKQLKEQAEDTMAATVTGQDGKAYGLPIEPNTWFMYYNKSKLSADDVKSFDTMLEKAKVSFPISNSWYFPAFYAGAGAKFFGDDGLKADAGIDLGAKAGDVTKYLANVVRNPNFVNDADGSGIGGMKNGSVDVVFSGSWDANNVKEALGDNYAVASLPTFKLDGKDVQMKAFSGSKAIGYNPNTKNPKIASEFAAFLASSQSQKTHFEKSGVIPADKTLSTDATITADPVAGALFETVAKASILQPTIKKMSDFWEPAENFGKGLANREVTPENAAQKTEAWASTLK

SEQ ID NO: 54155 - protein, 57 aa, Cornyebacterium diptheriae; identical to SEQ ID NO: 53864

SEQ ID NO: 54156 - protein, 311 aa, Cornyebacterium diptheriae
MAREAAARKNAEAPAPEPAPEPKPEPKPEPRDGFATIQEKWATISDVIFKANSVAGILLSQATLLGLRDDSTLVIGHNTGALAHRINDPQHAGSIVTAIKQETDLDVTIECVVGTDPKAAGFSEPENKKVWNPEPKPEPKPEPKPEPKPEPEPAPASDNVWGAPAPLGGGQPATPPPPPVERFSPAKATAPQPPAAPQPVQEAPKPRWQQAAERGMRKMEERAKRPSFSDGVPLPPEPEEPDVPPDLYGYPADEGIPEPQTPQATSNYVVDHDEEEEMVREAAQGVGNRDHRDAMTVAVDILSEELGARQL

SEQ ID NO: 54157 - protein, 87 aa, Cornyebacterium diptheriae
MLGLGIIGWIIIGGLAGWIASKIKGTDAQQGIGLNIIVGIVGGFLGGWLLSLFGVDVAGGGLFFSFFTCLLGAVILISLVQLVTRKK

SEQ ID NO: 54158 - protein, 74 aa, Cornyebacterium diptheriae
MSRKANCYDNAVMENFFGHLKTEMYHGEVFGTVEEFTQAVEDYIQWYNTERIQQRLKGLTPMRYRNQALEPLTT

SEQ ID NO: 54159 - protein, 312 aa, Cornyebacterium diptheriae
MLPTTRILSVLLLGLGVALVAVGILAPRWVNTDARLPLDLSQTTFTLVDDHARTRLINDGRVLDAGVVRQWHMDILPPTDADTATVRIGVTDVRKSRQADVDRLIQASVWTYPLDRLSGEALAPATVSAQLGSPTESVPVDGAWLKFPSDAQQTTYEVFDPTLRSTTPAVFSEEIDRGGRTIYRYSQEIKPTNVAEKYASVFNTTQKDENTLYLYHSGNRQWYVDQISGLVVDVEENIEDYFGDADGTRREDALIFHGRMSEDNKAALFEQASAVSDGSVARVLYRVALAAGAVLSVVGLMGAFRRRPVALH

SEQ ID NO: 54160 - protein, 224 aa, Cornyebacterium diptheriae
MTWFGDLLSYLTTAAHWWGSQGFLARLLEHVGISLAAVAIAALLALPAGVLIGHTGRGAGLVGGVSGAARALPTLGLLTIFGLAFGIGLTAPMLALIILAIPSLLAGAYSGVAAVDRATIDAAYAMGFTHRQVISSIELPLSAAVLVGGIRAAVLQVTATATLAAYTADVGLGRFIFHGLKTRDYIEMLAASVLVIALALLFDALLGGAQKLISQRTRTATPAP

SEQ ID NO: 54161 - protein, 610 aa, Cornyebacterium diptheriae
MAGMFQDLLYLNLIGAVRAITAAQGIKIRISGEENVPESGGAVVVVNHTGYLDFIYAGYPFRKFRRYIRYMAKGDVFKHPVAGPLLREMRHIPVDRIDGTAAFDQAVDMLKKGELVGIFPEATISRSFEIKTLRPGAVRMAQAAGVPIIMVMVVGSQRVWTKGQKKNLIHPGSPIHMKVFPAWYPEGDANEATQELRRRMITGLEEVWSDYQAEEPIVPGALWVPARLGGGAPTFDEAQAEDEKVEQERRRVRVLTEEIAQLTERIKQATKAGASAVDAARHRVEDVLHGEVPAKADAGKALSVLKDTVDEFVEEVVSSAKEGKDRVMDAGEQLRRSVADLYGQAVTASQVNPVVVQATAQVSMLLDRLPQRKDAPKVELPRVLVLSVDGAVAAYPEVTLSPSVLSQVAALSQQHTVVLTTISGMDRVVALARQVAQESGADVCVSASAGAVAATVSDTDVSVLHECVVSDELRAAVQECVDSLGLDVEWKGAHHGVVSGLGADPDLWQELSQVVRVVPLPGEPDRCVIVSPEASVEAAVQTCVGDVWDEVLVCAADASEAGALARAGHRVAVVSAPVVVLREAAQWCDRPDKDGVINFLDKHFITPESV

SEQ ID NO: 54162 - protein, 106 aa, Cornyebacterium diptheriae
MENPTKQHYSFEVRKQVVDRFNAGQSKMDLAREFGLSSDQLVSSWVRAWRAGGDEALRPKPKGRPKGSASSKPLTEEDRLRREVEKLRAENAYLKKLRDLRNQRRS

SEQ ID NO: 54163 - protein, 951 aa, Cornyebacterium diptheriae
MNSPTGSPKIVKTPTKRLSRKAVALMATLGLSAGHLIISDNTIAGAAVDNGSASFTSNNNARFANEIFFFDFGKLASGEERQDTWGAQEKTNNEAEFYGKRIKSGDSYTYKEVDGLPKGLEVTVTVNSVTALHDDAVYPDNGPKAGQKIDDGIWARTVTWNDFFRPLNLSSPGSIDRDKKRSNEWFDADTLYPSDPGSMLQISNYLDPQGFANNADHQSNQGYKFSINVEGKLNGKPVDLDLFASDGESTGIKVEDHDNPYGLKDKGQVVKGGVPENLQLTPNGEGGWVVIQDLVGKDKRYYFTDSKPTVPQKVPEGVAPYKPIEVEPDKVWTEQNGAKTYGWVDTELDEQGGPWKAIPMSQPLLVSRGATQISVELDNHARGKTGSRQGVVAGIFLPTDQGDAPESYGEASHILTNWKETGSPKNNPNIAFQDGNKVGSYIAEFDGGKNWTTDPDNAKGDDEEDLNPDFFKSGFENSNGKVTIPAVAKNSAVVAWVDLNQDGKFEDDERRVGKDNGDGTFTFDWSDAQKTPQPDSAIYARIRVGGEGTSADQIKDANGTITGGEIEDLKFTIDKKVPAVTPSVTVGDYVWHDANHNGIQDDNEQGLAGVTLELYGPNGEAVTDVNGNPVETVTTKADGKYSFENLPVLKNGEQYTVKVVDVPEGYKPTKENQGTGSLARFKDSSTGSAQTIPGTLSENGAKDLTLDFGFIKTDAPVNPSVTVGDYVWHDANHNGIQDDNEQGLAGVTLELYGPNGEAVTDVNGNPVETVTTKADGKYSFENLPVLKNGEQYTVKVVDVPEGYKPTKENQGTGSLARFKDSSTGSAQTIPGTLSENGAKDLTLDFGFIKTDAPVNPSMNWLMPLAPLAVLPLIPLLSQQIGGSSAPNPGTPQATAPQTSAPTADKPAQTQKPQKPKNKQLAATGASVLGVLAAALAMIAGGVLVLRSRKEN

SEQ ID NO: 54164 - protein, 79 aa, Cornyebacterium diptheriae
MNEVILAASDTAVSGSIATVGYGIATIGPGLGIGILVGKALEGMARQPEMAGQLRTTMFLGIAFVEALALIGLVAGFIL

SEQ ID NO: 54165 - protein, 58 aa, Cornyebacterium diptheriae
MWRGLTIHQSYHGGLFDSTGIVEFTARYAVCGQLQSQHETSHFRRHDGRWVYVDGDLH

SEQ ID NO: 54166 - protein, 564 aa, Cornyebacterium diptheriae
MTAVAPRLENYAEPTRPAPTGGARKGTLAWKMLTTTDHKLLGMMYIVMSFVWFFVGGLMALLIRAELFSPGLQFLSNEQFNQLFTLHGTIMLLAFGTPVVWGFSNYILPLQIGAPDVAFPRLNAFGFWITQIGVVAMLAGFLTPGGAADFGWTMYLPLADSIHSPGVGGDFWIIGVGATGVGTIASAVNMITTILCMRAPGMTMFRMPIFCWNIFVASVIVLLIFPLLTAAALGVMYDRKLGGHIYDPGNGGAILWQHLFWFFGHPEVYVLALPFFGIVSEVIPVFARKPMFGYIGLVFATLSIGMLSMAVWAHHMFVTGAILLPFFSFMTFLISVPTGVKFFNWLGTMWRGHISWETPMTWTMGFLVTFLFGGLTGIMLASPPLDFHISDTYFVVAHFHYTLFGTVVFASYAGVYFWFPKMTGRMLDERLGKIHFWITFVGFHGTFLVQHWVGNEGMPRRYADYLESDGFTTLNQISTVFSFLLGVSVIPFIWNVFKSYRYGEIVTVDDPWGYGNSLEWATSCPPPRHNFTSLPRIRSERPAFELHYPHMVERMRREAHIGHH

SEQ ID NO: 54167 - protein, 302 aa, Cornyebacterium diptheriae
MREVIFLQRSTTSAISAICLLGCVVACDISPSPDPNATLIDLAAIAHNDAAVLQSKNSALAQQRHADSEELISEIQRLCGTNSEGKLPESCSNEIVQGAVDKQAVSLKETVTESDAATRSAQAIVSAIDSAPSESLGLLGQQLVDLVRAGAAAPQSGIAQLNPRNEINKGTSKDDLIHDRESLKKALDWEYSAIYGLGVALAHSPAGTRTAVSDAITAHRDRVELLESSFAESFPNETIPRPEAAYEFSGYPEPHDAQSSRAFFDSLEADSAAWWLHALSESHSATWRALCASLAAQSAARR

SEQ ID NO: 54168 - protein, 414 aa, Cornyebacterium diptheriae
MRIQIGELIRSGVLELGDGYRTKRSELSQFGYAIVRAGDVVEIGVTASDSEFVDQRFDKAIGRKTVRLGDVVITTKGTVGRVAEVSKVPNAGLAVYSPQVCYLRSLQPSILHQRYLKYLLMSPATKYSISTFASSSDMAPYLSLSDFKSMVVDLPSLEDQRAIADVLGALDDKIAENQRVIQLSEQLAMTFYRSTEKSESSLTFADVAGIYGGGTPSTKNPDFWDGEIRWATPTDITALKGPWLCGTARSITEEGLSKSSGSLHPEGSILMTSRATVGHVAFIDAPTTTNQGFINLVPQEAYRYWLYFQLKQRTSEFIAWANGATFLELSRGTFKKLPFQACAETELEKFNSVVAPLMKRVLKAQKENQVLAATRDELLPLLMNGKITVAEAKEAAGDVGVVKQNQQEEGDSSV

SEQ ID NO: 54169 - protein, 76 aa, Cornyebacterium diptheriae
MANGTPAHELRELNAEELKTRLTEAKEELFNLRFQAATGQLTNNRRLRTVKRDIARIYTVIRERELGLSEVPGAEA

SEQ ID NO: 54170 - protein, 87 aa, Cornyebacterium diptheriae
MWAARRKKPMSAICQVTGRQPGYGKSVSHSHRRTSRRWNPNVQRRKFYLPSEGRTITLNVSTKGLKVIDRDGIESVVAKIRARGEKI

SEQ ID NO: 54171 - protein, 254 aa, Cornyebacterium diptheriae
MTNSPTDAQLTAARNFLHALEADDPRNAVVVSEGIDDSFQHTLSSIAAMVNMRDPRAASQELQKAQSAFLKATTPAATVVVGDITELPFSAMVVPATQTLIGPTSPSISDLAARIHQRAGFGLRLECARLLKESHEHIEVGSAYVTSGFLLPTPWIIHIVTPQLNLAARGESIELLRQCFQNIFATAAGRDWKELTIPSQLTGPLGFPAGMEAQILSEELAAARKTGFSAHVVIVCDSETAAGAYRRTFAPVTD

SEQ ID NO: 54172 - protein, 323 aa, Cornyebacterium diptheriae
  MISC_FEATURE (103)..(103): X=any amino acid
  MISC_FEATURE (163)..(163): X=any amino acid
  MISC_FEATURE (184)..(184): X=any amino acid
  MISC_FEATURE (190)..(190): X=any amino acid
  MISC_FEATURE (247)..(247): X=any amino acid
TPSLSGRSHHCAASRNTTTGAETTATRCPARANAPASDASAAHTNTSSQTSPTHVCTAASTEASGETITQRSGSPGNGTTRTTCDNSCHRSGSAPNPETTPWXAPFHSTSRPKLSTHSCTAARSSSETTHSCNTETSVSLTVAATAPALALTQTSAPDSCATXRASATTRSIPLIVVSTTVCCXDNAATXDNTDGDSVTSGYAATAPSTLSTNTRGNSTFGASLRCGNRSNNMLTWAVACTTTGLTXLAVTACPYRSATLRRSCSPASITRSLPSFALETTSSTNSSTVSFNTDNALPASAFAGTSPCNTSSTRCRAASTALA

SEQ ID NO: 54173 - protein, 142 aa, Cornyebacterium diptheriae
MAIIDSEVNRQLSDHIRSATSLNNRAALLVTSSLIFVSIPKNGDGNSCWYGLALIFGVIAAILGAIALFFRSKGQELKLSSLEAQLVGKTEIEAMRALTESKRITLSQGRAQIQGISKFVIWGFVSLVVSLMCTVAYSLVGG

SEQ ID NO: 54174 - protein, 69 aa, Cornyebacterium diptheriae
MSDFENKIEELGGKAKEAVGEATENEQLADEGRADQTKADVKQAVSDAGDKIKGAADKVLGSFQKDEEN

SEQ ID NO: 54175 - protein, 241 aa, Cornyebacterium diptheriae
MGSTKSRPLRDANGTPKFRHESIACVFRVHPQQGVDVLTVIRSRPPYADMSALPSGALETNEMLKDACLRHLSLSGVHPSMVSHIEQLDTRSAIDRDPYDRTIATAHLCLIPWDIDPSVTNGSFTPLVDLDELAFDHKNIIEQGLYRLRAKLSYSNIGFALAPRLFTISDLAKTYSHVLTYNVSPTNLQRILTRRNQLQPTTARAIGSGRPARLFTFTTDRLEITDPFATLKPTESRKCKS

SEQ ID NO: 54176 - protein, 160 aa, Cornyebacterium diptheriae; identical to SEQ ID NO: 53980

SEQ ID NO: 54177 - protein, 114 aa, Cornyebacterium diptheriae
MRRDVGGHTDGNTVGAVHQQVRNARWQYVWFLGLAVVVRGEVHGVLANVANHLHSQWGQATLGVTHSCGAVVAAGAEVTLAVDHGVPHVPVLGEAHQGVVNCGVAVGVELAHGV

SEQ ID NO: 54178 - protein, 120 aa, Cornyebacterium diptheriae
MSEAITSARATARFVRVSPMKARRVIDLVRGKSVEEALAILKYAPQAASEPVAKVVASAAANAENNFGLDRRSLVVSEAFADEGPTMRRFSPRAQGRAFQIRKRTSHITIVVESQKEGAK

SEQ ID NO: 54179 - protein, 95 aa, Cornyebacterium diptheriae
MASLQDQLLKLQSDQPSSNSQEEATAFSRVCAVLKRVGLDPEKMTPDTVLEDAGVDSLDRIEITVRLEQESGIELHDADVFPARTVHDLMQLIDQ

SEQ ID NO: 54180 - protein, 485 aa, Cornyebacterium diptheriae
MPYAYIMELTKHWIIAHGFALAILVIIGFLIPRIGRRIINDMSHAIDEDTEASKGRKAIIGAIVYIAEAIAYAALIITAMHNLGINLAAAAIPATVVSAAVGFGSQKIIGDLLGGFFIITEKQYGVGDWVKFFGSAATVEGDVVKMTLRATTIRTINGDEITVPNGEARMCVNSSARWARAVISIPVPITAGSSMAEIKTRTLAAAQHAINDPELSPHIRSDITFQAATDVIPPTAMGLPWTATMRLLIDVAPGKQWLIERGVRAAVIDEWWKDYGEKASSAVVLSEGIDDSFRQFSLDTHTPPVLDEETHSTNPPADPDPETARALTHAAETIDLPRTEVMREIQEQSEEDAPPQRSHGLLSFGGRVRPSTSILIICLLGFLALGSMTLSGGENNKAGWLAPTQTPIPTVPATPMRTESSIPSESVEPSTPSMPSSSAESTMPLPSSSPSSTPSETTLETPTTIDEPTVESSSSPSASESTTAP

SEQ ID NO: 54181 - protein, 160 aa, Cornyebacterium diptheriae; identical to SEQ ID NO: 53980

SEQ ID NO: 54182 - protein, 188 aa, Cornyebacterium diptheriae
MADLLAAADMPRATFFYHQTRLDKPDKHAAVKHAILESFEANKHRYGYRRVLLDLRNKGWVVNHKLVYKLMHQMGLRAKIRQRRPYNSYTGTISRIADNKLARKFTPDKPNTVFVSDVTELRVAGRKSVFITGNGSLRPLYCRSHRGYITVDSIYRRFPHKGDCSLCAEVWMDDAHRSRLPVPAFNLA

SEQ ID NO: 54183 - protein, 66 aa, Cornyebacterium diptheriae
MLIFDPLSQEQLTHIVEIQIAQLAQRLAARCLIQQAKKLLPGEIRDGSEVHVDVADGGENLDISAS

SEQ ID NO: 54184 - protein, 1082 aa, Cornyebacterium diptheriae
MKMVDSRFYEPLGFRRSPIRRLITLLMVVVVCVGLVVSPRVPSAGAAECKGEISNVQWKNDTNIKDGVFVGSYGQGADVQFDWKVDPGAKAGDQFTLKLPNELSRLGNKDLTLTAPSGEEVAKGTWDDVAKTWTFTLTDYANSHGDISGSAFFTVQWDRSVAQSNTQYPLTFSGCKGAGTLNGKTPEEGVGGTAQATSKTGLYDSKTDSARWNIYVETADTDIYTPVVVKDIGNTQLLFRCSDVKVFDRTPYPHTKIRDTPIDPNRWKCEEKDGGIIVSMVPDEHGRYLTAGQSLTIGFETPINDDTSRFITNKAIVEISPNKIENVEYSVDRGDAGGVGQGFQGKIKIQKEVVGETAPVQGNKFDFEYKCGETTQNISVAAGQTSDIFTQRSSSTCSITEKNVAEGVTVDFEVIDEETGKPAYVVPIDNGVTVKFNKNSSTTLNVKVTNTYPNKPEAKKGKFVIKKTVNGLDAGQKDKAFKFNYTCKAPDGDAYTEPQLAEVTAGRTWQSGNYPEGTICTIEEDLESAKVPGYSLISAQPKGDVTIKAEGTEGSPVEFAATNSYTKDLGSFSVQKKIEASAEAMPLLKDQEFGFKYTCGADKGEFKLKNGETKKVERIATGTKCTVEESDAKVPNGFMWTGKIEGTDLDPNDFTIVKDKTLAFTATNTYKQQYGGFTLSKNVTGDATNLEELQKRSYTFNYTCTAPTGTVLKDKVEITEETPKAIGNIPAASTCKVTEVEAPAKDTDWTVDLSVNGTWVGETAEFKVPAEGEPSISILAKNNYRQHKGSFTIEKIVDASEGIVTPKEFTFTWQCGEDKGAETVRVTNGKGRVEIDRAFPVGTKCSVKELEAEAEDARLITSWENQEFTIDKDKQHVIVSATNTYRYAESKVKIVKKLEGPAKDKAKDKTFTFDYSCVVNNEAIEGSVNITGEGATEIPESFPAGTKCTITERDASISGTTWTHRIAEDGQITIQSPAKVYQVGVTNAYSKPGFPWFIPLIPLVIIPFLPLFPHPTPAPQPAPQPTPQKPSEQQPSPKAPEKKPQKEKKVLARTGANVWMFIVIAVLLVLLGAFLRRRGNNS

SEQ ID NO: 54185 - protein, 301 aa, Cornyebacterium diptheriae
MAGDVVLAPHGAFVTGHGVVLPMAFPDFDGGEHTRRLHMGTAWSKRMIFEFSRSLLGETRPSECIAALFDDRARPPRVPEPQAARKVAQKLIAYPADQTPLLEFAQLHNISSRTLQRQFVASTGFTFSEWRAALRVSVAADLLAHDFRIGQVSQMVGFSATSSLTRAFKRHTGDTPSSFTSPRMHAVCEQQPPMIPATTTFARASDDIALWIYSGTATVTTPGYCRFMGAGETVTIPSGTSTRLDVSAGSVALPVPLAAAHDDLTLSDVLAASVNPLAAVELQRLSAQERADVEQVLVPSV

SEQ ID NO: 54186 - protein, 196 aa, Cornyebacterium diptheriae
MAGALADLESTTLSAWTETTHGWALVGECLGDNQGAAIQAEVVFGVSCSGSYNLCYWLGSCLWGVLQNCECFLNGLAADQIDHATCLHWGDTDEARGCACGGDCFTHRLSTSLLVVLDVTLEGLGWSKLTKLVADHGVVHEHWNVLATVVNGEGVSNEVWENGGTAGPGLDDLLGALFVLSVDLVEEVLIDERALL

SEQ ID NO: 54187 - protein, 465 aa, Cornyebacterium diptheriae
MSRKIVRRALAGALFFVPLIAGTVYATTQDVDPAATWSAAQETQQGAPAVQEDPSLVDIRRAAGEAGSQASLLKNGTTQLVDGTTALNNGAAQLGDGTKAAQNGAAQLADGMVKLQAATGQMGNGATEIANGIDQAVGQFQNVEVIRGQLLTAINLAMSDPKLADVKPDLEDFKRQVETFKVDDNITSQMDKLRDGSRELANQLAVPGYSFHDGIYSATKGSKDLSAGLNDLSGGVDQALTGVRDLDNGAKKIDAMAKENQTRVGNIQRALPITKAGTPEAQEQGVTRTLAPLYAFLIAAGLMLAATAYLRDRIWGTIAFITLTLLGGGLVYLLGTEITAGVAAAAAGVSALAVAGAALLGTLLTSIFGERTGRGLSALVTIAQVAVVGFVWNSAANSALSSAAKALVNFMPLHYPTLALSSIGNAGDTTTTALGVGVTAACAVCAAAGVMILRKKEEQTLPTAE

SEQ ID NO: 54188 - protein, 407 aa, Cornyebacterium diptheriae
MPKLFEARSVSAGRRYKKRCNLARTTHSQSSRQLLHNPRSALDCVHMSFSPELPDFMQGLGVSVHAMTNADVPAHTDSVLRNLNRFEQHFTADDLAVVPLSEYTFFNEGRGDIGIVVQDASGAVVGTMCVQFIKGLAYLNPAVPEMTLRLDEAWRGKGIGGWLIEQATEYGRLNGWPGIAVNVEKQSPARRLYARHDFAAQDREVEYGAIMLKTLSPKIRSVAVYCGSAVGERPEYAQAARELGTALAQRGITMVYGGGRPGLMGIAADAAIAAGGKVHGVMPHALVDLEQAHPGLSALDITDTMAQRKTRMEELADAFVVLPGGMGTMEEMFQVLVRQQLGPYAGPVALMNIEEFWDPFIAALRTMSEEGFISERYIDALVMAKDSEELFQGFSSWVNPGLKWLSD

SEQ ID NO: 54189 - protein, 92 aa, Cornyebacterium diptheriae
MSEANVNKKEKGARKVRTGYVVSDKMQKTIVVELEDRKSHAKYGKTIRTNSKVKAHDEKEIAGIGDLVRIEETRPLSKDKHFRLVEIVEKAK

SEQ ID NO: 54190 - protein, 238 aa, Cornyebacterium diptheriae
MQQTQRTTGGKHRKQASPVKGRVAVVALATGAVSSAGATGASLAHATHDNSTVKINLASDSTTQTNNDSPQVLSIAEFKPAASDLNQQLSKAIHYSQVVAEKDLEARTPKISVHTPAKGTLTSPFGMRWGTLHSGVDIANAMNTPIYSVMDGVVIDSGPASGYGQWIRVRHEDGTITVYGHMETLNVAVGETVTAGQQIAGMGTRGFSTGVHLHFEVHPGGGDAVDPQSWLAEHGIFI

SEQ ID NO: 54191 - protein, 40 aa, Cornyebacterium diptheriae
MKVRKSLRSLKNKPGAQVVRRRGKVYVINKKDPRFKARQG

SEQ ID NO: 54192 - protein, 294 aa, Cornyebacterium diptheriae
MTHALGVDIGGTKIAVGIVDSTDPTTVISRHIVPTPDHDVIDRVRDAIAHIITPEVTSIGIGAPGVIDETTGVVVSSGPTMQGWAGTRIADTIAAEFSLPVAVHNDVRVMGLGESIYGAGRDYTNVLFVSLGTGVGGAIVRDGRLVASPHHTAGELRALIGRLPDGRADLLENFAAGPGLAQRFGERYPEHAGRDLRFIMELYHAGDTHARDYITATLAAAGETIAGFASAIDVDAIIIGGGVGNIGDAIIKPFAHGFAAHAIPPLDTIPIRQAQLGTDAPIVGAAHLGHSAIE

SEQ ID NO: 54193 - protein, 196 aa, Cornyebacterium diptheriae
MDISNGLPLIVIAAPEEAGGMPASIPTLITGIGTLNAAITLTRSLADAHFRGHRPSRIINAGTAGSLIPSCSGIFEIDHVIKHDFDHETLTAITGRPFANRIDLPTVTSLPTAGLATGDTFISDTATRDRLAQQAQLCDMEGYAVVKVAREFGIPVTLIKQVSDHADESAAAKWHDAARGGAATLGECVAQIVDLS

SEQ ID NO: 54194 - protein, 160 aa, Cornyebacterium diptheriae
MHPRSKLSQAQRELAVDLFEEGYGSRAVANRLGVRREQVRHLEDRFRLHGRLCLVSKPTKKQYSFDTKMEILRRYRTGELKSDLAKEYGLSSPNLISHWVWQVNKGGSDALQPKPKGRPKGSGQSVPMTEEDTLRRENELLKAEVAYLKKLRDLREQRRG

SEQ ID NO: 54195 - protein, 66 aa, Cornyebacterium diptheriae
MNALATIARWITAPVRYWGEVLGEKDYEKYVAHLKRHHPGCPIPTEREYWHKRWADQETNPGSRCC

SEQ ID NO: 54196 - protein, 54 aa, Cornyebacterium diptheriae
MARNDIRPIIKLKSTAGTGYTYVTRKNKRNNPDRISLKKYDPVVRKHVEFREER

SEQ ID NO: 54197 - protein, 101 aa, Cornyebacterium diptheriae
MAKIADPRDIILAPVVSEKSYGLMEQNTYAFFVAPTANKTEIKIAIEQIFGVKVDSVNTANRAGKRKRSRTGYGVRKATKRAYVTLREGSDAIDIFGGNAA

SEQ ID NO: 54198 - protein, 1058 aa, Cornyebacterium diptheriae
MAITSTAITTPVDATPITSTNIDTVVEDAAENPPLDQESAALPTEVTDDNLQHVKLIITNNMISAGFATIERKNGESEFYGHDQVLIDGTEVSDSSVYSAPATENQGDLITINFAGLSIQSGQTISFSYRSSATSQNDTWLPSEANAFKYLAAPAESAIANTDEREAQSFLQGNFELSMSVSPALVQVGQPVTYTYTFKNTSSEYRLFWSNYADGAKGVIEDRLNLNDDVKCKWDEGNGWLKSKTGQRYIDTNSEATFSCVRTFEHVGNYTNSVNIKEAKQRTGPLNGQIGLTLAPTTIDDALSVKVVNVVNSQTDPQWSLTISSSKFYVDPSGEDVTYTYTVTNLSNDKIYYEALKHDVCSPIKIENSLQFDPENRKYYIPQNGTATWECATRINHETTGLVSGTFSDNKGNRSTVKASTQTKVKTPTLSNGTSYGIPRCDVIDFTTVNKSTGIGTLGSIEQQNGQFKKIEQSNIFPEKGSPAHHDQRIKNKGRMTTASATSAQHPEYVYYAALALGDSISISSDANMGIYRIHKISGTVEKITAPHFSQSALQNNQRFGATLTNRLAFDATGKLWSFAQDGHLYSLPMDGDGKAAGEWFDHGAVAGEAINGEGNAVGFESLVFGDIAFDGNGAMWILGSIRGLTKEDTNGRVIKDEVDPTTYLFTLKPPRDNTPITEKVQIVQKITGVGTSIDQKGFFGLAFGVDGTLYGSYDTSGDGISDSPGELYSFNLRDGKVTKVFSSPLMARVQDLSSCAFPAPRISAEKTAAHEVDKDTITYTITVRNSGNLEATGTKFTDNLPGSYVPNSAKLNGKPIPDLPVNSTNPTGNPFHDGLYIKSPDAAPGTIDPQSEAVIEMTINKLNSTNDGRVCNQAEINAVGQQVKTDDPTLPGHEDPTCVSVPISLKMSLKKAIYDPSAQSPKILDNLGGAKFAIYARTDTGDLGELRKEVSDEEPFEISPGTYLLVETQSPAGLSLLPKPVEFTITKSSSGFDVKSNSPLTVSFTKTDGIIVATVSDVKNGTLPKTGSTGFLPFVFVGLSIIVLTALWVQRRSQYKL

SEQ ID NO: 54199 - protein, 388 aa, Cornyebacterium diptheriae
MLLSMNRVSNPFRATLGSTPPYLAGRRHEIEDFAEALDDGPGAHERISLITGLRGVGKTVLLNAFEEEARARSWWVISETATAGFTERIIDALFRKASEILHTHRRKLSGITLPSIGGIQFSDILEHQPKITLRSVLTEILSWQEEIDRKLGQDSVGLLITLDELHYHRREEVIDFGATIQHLVREDLNISVAMAGIPQSIKPLLASEEGKNPVTFLRRANRIDLGLIDNNEVRKALAEPVEKVGVTWESDALTDAAEACGGYPFMIQLIGQQCFKRKRSNFITVGSVAEAAVVAKRKLGQLVHEPALADLSEVDRTFLVAMAADDGPSTMSDIAQRLGVNSQYAGNYRRRLIDAEIITSSGYGQVDFELPYMREYLREHAVVDVFKQ

SEQ ID NO: 54200 - protein, 61 aa, Cornyebacterium diptheriae
MALKITQHKGLVGANPKQRKNMAALGLKHINHSVVHQDTPVVRGMVNVVRHMVSVEEVAGE

SEQ ID NO: 54201 - protein, 114 aa, Cornyebacterium diptheriae
MATRDVIITRVAPGSAFKTALSLSLIGLISWLICVVILYFGMQAVGIWDKINQVIGGVGGDQIVSFGLIISLAALLGTIVAIIATVLAPLTALAYNAFVDLFGGVEVTMREELD

SEQ ID NO: 54202 - protein, 440 aa, Campylobacter jejuni
MNPSQILENLKKELSENEYENYLSNLKFNEKQSKADLLVFNAPNELMAKFIQTKYGKKIAHFYEVQSGNKAIINIQAQSAKQSNKSTKIDIAHIKAQSTILNPSFTFESFVVGDSNKYAYGACKAIAHKDKLGKLYNPIFVYGPTGLGKTHLLQAVGNASLEMGKKVIYATSENFINDFTSNLKNGSLDKFHEKYRNCDVLLIDDVQFLGKTDKIQEEFFFIFNEIKNNDGQIIMTSDNPPNMLKGITERLKSRFAHGIIADITPPQLDTKIAIIRKKCEFNDINLSNDIINYIATSLGDNIREIEGIIISLNAYATILGQEITLELAKSVMKDHIKEKKENITIDDILSLVCKEFNIKPSDVKSNKKTQNIVTARRIVIYLARALTALTMPQLANYFEMKDHTAISHNVKKITEMIENDASLKAKIEELKNKILVKSQS

SEQ ID NO: 54203 - protein, 355 aa, Campylobacter jejuni
MKLSINKNTLESAVILCNAYVEKKDSSTITSHLFFHADEDKLLIKASDYEIGINYKIKKIRVESSGFATANAKSIADVIKSLNNEEVVLETIDNFLFVRQKSTKYKLPMFNHEDFPNFPNTEGKNQFDIDSSDLSRSLKKILPSIDTNNPKYSLNGAFLDIKTDKINFVGTDTKRLAIYTLEKANNQEFSFSIPKKAIMEMQKLFYEKIEIFYDQNMLIAKNENFEFFTKLINDKFPDYEKVIPKTFKQELSFSTEDFIDSLKKISVVTEKMRLHFNKDKIIFEGISLDNMEAKTELEIQTGVSEEFNLTIKIKHLLDFLTSIEEEKFTLSVNEPNSAFIVKSQGLSMIIMPMIL

SEQ ID NO: 54204 - protein, 769 aa, Campylobacter jejuni
MQENYGASNIKVLKGLEAVRKRPGMYIGDTNIGGLHHMIYEVVDNSIDEAMAGHCDTIDVEITTEGSCIVSDNGRGIPVDMHPTENMPTLTVVLTVLHAGGKFDKDTYKVSGGLHGVGVSVVNALSKKLVATVERNGEIYRQEFSEGKVISEFGVIGKSKKTGTTIEFWPDDQIFEVTEFDYEILAKRFRELAYLNPKITINFKDNRVGKHESFHFEGGISQFVTDLNKKEALTKAIFFSVDEEDVNVEVALLYNDTYSENLLSFVNNIKTPDGGTHEAGFRMGLTRVISNYIEANASAREKDNKITGDDVREGLIAIVSVKVPEPQFEGQTKGKLGSTYVRPIVSKASFEYLTKYFEENPIEAKAIMNKALMAARGREAAKKARELTRKKESLSVGTLPGKLADCQSKDPSESEIYLVEGDSAGGSAKQGRERSFQAILPLRGKILNVEKARLDKILKSEQIQNMITAFGCGIGEDFDLSKLRYHKIIIMTDADVDGSHIQTLLLTFFFRFMNELVANGHIYLAQPPLYLYKKAKKQIYLKDEKALSEYLIETGIEGLNYEGIGMNDLKDYLKIVAAYRAILKDLEKRFNVISVIRYMIENSNLVKGNNEELFSVIKQFLETQGHNILNHYINENEIRAFVQTQNGLEELVINEELFTHPLYEEASYIFDKIKDRSLEFDKDILEVLEDVETNAKKGATIQRYKGLGEMNPEQLWETTMDPSVRRLLKITIEDAQSANDTFNLFMGDEVEPRRDYIQAHAKDVKHLDV

SEQ ID NO: 54205 - protein, 1496 aa, Campylobacter jejuni
MDLENILENNQSIGLYHPKNEHDACGIAAVANIRGIASYKVICDALEILMNLEHRGGTGAEENSGDGAGILIQIPHDFFKTQELGFELPKKGDYAVAQMFLSPNTDAKEEAKEIFLQGLKDKKLEFLGFREVPFNPSDIGASALKAMPYFLQAFVKKPSKISAGLEFERVLYSTRRLIEKRAINVPKFYFSSFSSRTIVYKGMLLSTQLSDFYLDFKDVNMKSAIALVHSRFSTNTFPSWERAHPNRYMVHNGEINTIRGNVDSIRAREGLMQSEYFENLDEIFPIIAKLSSDSAMFDNTLEFLALNGRTLEEAFMMMVPEPWHKNENMESKKRAFYEYHSLLMEPWDGPAAIVFTDGVIMGASLDRNGFRPSRYYLTKDDMLILSSETGALKLDEKNIKAKKRLEPGKLLLVDTARGRVIADNEIKEHYANAKPYKKWLKNLVELEKQKSGVYKHQFLKEDEVLKLQKAFGWSYDELKMSVAAMAQNGKEAIAAMGVDTPLAILSKTYQPLYNYFKQLFAQVTNPPLDAIREEIVTSTRIYLGSEGNLLKPDENNAKRVKIALPVISNEELFEVKALNKFQVKEFSILYDYSKKTLEKALDELCVKIEDEVKKGVSIIILSDKGVDEKNAYIPALLAVSGVHNHLVRKNLRTHTSLIIESGEPREIHHFACLLGYGATVINPYLVYESIQKLIANKDLNLSYEKAVENFIKASSSGIVKIASKMGVSTLQSYNGSALFECLGLSSKVIDKYFTSTTSRIEGMDLEDFEKELIALHKHAFNDTHKALDSKGIHGFRSAKEEHLIDPLVIFNLQQACRNKDYKSFKKYSALVDEKQVNLRSLMEFDFSEAISIDKVESVESIVKRFRTGAMSYGSISKEAHECLAQAMNKIGAKSNSGEGGEDEERYEIKEGVDKNSAIKQVASGRFGVDLNYLSHAKEIQIKVAQGAKPGEGGQLMGFKVYPWIAKARHSTAGVTLISPPPHHDIYSIEDLAQLIYDLKHANKDAKISVKLVSENGIGTVAAGVAKAGANLILVSGYDGGTGASPRTSIPHAGIPWELGLAETHQTLILNKLRDRVRLETDGKLMNGRDLAIAALLGAEEFGFATAPLIVLGCTMMRVCHLNTCPFGIATQDTELRDRFKGKVDDVINFMYFIAEELREYMARLGFERLDDMIGRVDKLRQKSVQGKAGKLNLDKILKSLPTYNRTAVHFKDYKDNKLEKTIDYRILLPLCKNAVEKKEPIKLSLEVGNQSRTFATMLSSEILKTYGKDALDEDSIHIKAIGNAGNSFGAFLLKGIKLEIIGDSNDYLGKGLSGGKIIAKISNEATFSPEENIIAGNACLYGATKGEVYLDGIAGERFCVRNSGALAVVLGTGVHGCEYMTGGQVVVLGDVGANFAAGMSGGVVYIFGRHNEAHVNTELVDIKDLNAKDEKELKAVIEKHITYTDSKKAKDILEKFDKKDFFKVMPRDYEKMLKMLDLCKNEKDPNLAAFLKITQK

SEQ ID NO: 54206 - protein, 481 aa, Campylobacter jejuni
MGNARGFLDFKRMDFKKIAPKERILNYKEFTIPLDKKEQEVQGGRCMDCGVAFCHTGVMSEGKDVGCPLNNLIPEWNDLVYRSLWKEAYERLDLTNPFPEFTGRVCPAPCEDSCVCAINGVSVSIKNNELSIIENAFKENLVRVNKPKQYNGKKIAVIGSGPAGLACANTLNSLGYKVSVFERSDKIGGLLMYGIPDMKLDKSIVQRRVDLLKKSGIEFKVNENIDSKDKVSKLLKEFDALVLCTGASKPIDLDIEGRKLKGVEFALDFLTQNTKTLLKTGKGADMAKGKNVLVIGSGDTSVDCIAVATRQGAKSIVRFERSPKRPLQRSQNNPWPLKADIFTTDYGLEEAIAVYGKDPREYQKMTKKFLGKTHVEGVEANDLKREFKEGKAINVEISNSKKTYKADLVLLAMGFSGCEEAISKNFGVKLDEKNNISTENFQTTHKKIFACGDARKGQSLVVWAIKDGIECALSLHQNLAK

SEQ ID NO: 54207 - protein, 191 aa, Campylobacter jejuni
MKTLFDTKELLNEFDINLIGIDEAGRGALAGPMMMAACKLNKQLDGLCDSKKLSEKKREELYEIIIKNSNYLILAFSSEQIDALGLSTCLKKGLKLIKKHFKTENNFLYDGNTNLGINGIKTQIKADTSILQVSAASILAKVSKDRVMNFLAKDFPCYEFEKNKAYGTKAHKEFIAKFGICKLHRKSFKLL

SEQ ID NO: 54208 - protein, 558 aa, Campylobacter jejuni
MRSDAIKKGHLRAPNRSLLRACGLKDEDFDKPFIGVANSYIDIIPGHYFLNDYAKIIKDEIRKNGCVPFEFNTIGVDDGIAMGHEGMLYSLPSRELIANSIETVMNAHQLDALICIPNCDKITPGMLMGALRVNVPTIFVSGGPMASGVTKKGEKISLSSVFEAVGAYESKKISEEEFKDIECSACPSGGSCSGMFTANSMNTLCEAMGIALEGNGTILALSKEREELLRKAARRICEIALDERFKIRNIITQKAVRNAMVVDMAMGGSSNTVLHMLAISREAGVALDIKDLNFISSKVAHIAKIAPSLNSVYMDDIHKAGGVSAVMAEISSRQGHILELDALTITGESLKERLKNAKIKDENIIRKVDNAYSKVGGLAILFGNLAKQGCVIKTAGIIGERKFKGKAVCFNSQDEAIKGIIKGKVQKGNVCVIRYEGPKGGPGMQEMLSPTSLLMGMGLGADVALITDGRFSGATRGLSVGHISPEAAEGGLIGLLKDGDEIEIDVDAYTIHANVSEEEIAKRKKEFALPQKEVSSRWLRMYQKLVSNASKGAVLDME

SEQ ID NO: 54209 - protein, 292 aa, Campylobacter jejuni
MKFVNFIQGQKPNLGVLNSSGKIVSFDDLGIETNDMNEFIIHFDKFKHKLTDLDSKIAYEIPQENYLAPIIEPRQDIICLGINFLDHAKESAKFKGEKFEEREYPVYFGKRCNQATAPFGDIPLHADVTSQLDYECELAFILSKDAYKIKAKDAKDYIFGYTIINEISARELQKRHKQFYRAKSLEGSTIMGPYITSVDEISYPPKLQLQSYVNDELRQNSNTQLFIFDIAYVLEELSAGMLLKAGSIISMGTPSGVGMGLNPPTFLKSGDKVRCVIENLGELCNKIKNINY

SEQ ID NO: 54210 - protein, 442 aa, Campylobacter jejuni
MVERYSREIMAKKWDMQAKYDAWLKVELAAVKAWNKLGLIDDTDCEKILKNAKFDIARIDEIEKTTKHDVIAFLTSVSESLGEESRFVHYAMTSSDCIDTAVALQIKESLELILEDVSLLLEAIKKRALEHKNTLMVGRSHGIHGEPITFGLVLAIWYDEISHAKELLEHAKEVISYGKISGAMGNFAHAPLEFEEEVCKNLGLKAAPVSNQVIQRDRYAQVISAIAILASSCEQIAVAIRHFQRTEVYEAEEYFSVGQKGSSAMPHKRNPVLSENITGLCRVLRSFVTPALENVALWHERDISHSSVERFILPDAFITADFMLMRLTNLIDKLLVYPENMMKNLNLTGGLVFSGRVLLELPFKGISREEAYKIVQRNAMKVWADLQNGKAAINEKNESLFLLALLSDEDLRKSLSEEDVRKCFDYNYYTKNVDAIFKRTFK

SEQ ID NO: 54211 - protein, 789 aa, Campylobacter jejuni
MKVIKRNGRTEELDVSKIKKCTSDAVKDLEGVNLSELELDAKIQFRDGISTEEIQKTLIKTAVDKIDIDCPNWTFVAARLFLFDLYKKVNGMNRYNHLREYFQKGEKEGRILLGLKEKYDLDDLNAYIKPERDMQFTYLGIKTLYDRYLIKDSKGMPIELPQQMFMAIAMFLAQNEFNPQEWAKKFYDLISKFELMLATPTLSNARTTRHQLSSCYIGSTPDNIEGIFDSYQEMALLSKFGGGIGWDWSKVRAMGGSIDGHKNAAGGIIPFLKITNDIAVAVDQLGTRKGAIAVYIEPWHMDISDFIDLRKNSGEERRRAHELFPALWINDLFMKRVRANDKWTLFDPADTADLCDLYGEAFEKRYEEYEKDESITKEIVEAKELWKKILLNYFETGLPFLCFKDSANRANPNAHVGIIRSSNLCTEIFQNTEPNYYQIKVVFENGDELHFDEEQKVVIDGGYEKPAKKISTLDSIEGNKVYIVEKYKNDGKTAVCNLASINLSKVYTKEDIERVVPTAIRMLDNVIDLNFYPHRKVKDTNLKSRAIGLGVMGEAQMLAEAKIHWGSDEHLNKIDEIMEQISFEAINASSNLALEKGSYEDFEGSNWSKGIFPIDVASPKAKALTLREGLFDQSECDWVKLREKVKKDGMRNGYLMAIAPTSSISILVGTTQTIEPVYKRKWFEQNLSGMIPVVVPNLSLDTWQYYTPAYELDQKILVKAAAVRGKWIDQGQSLNIFLSLDKASGGYLNEIYQLAWELGVKSTYYLRSESPDSEKVNVADRSIECEGCQ

SEQ ID NO: 54212 - protein, 543 aa, Campylobacter jejuni
MKQTKYIFVTGGVLSSLGKGIAAASIATLLKNSGLKVSILKADPYINVDPGTMSPFEHGEVFVTDDGAETDLDLGHYERFLDESLSQDNNFTTGRVYQSVIEKERRGEYLGKTIQVIPHIVGEIKDRIKKAGEGKDILIVEIGGTVGDIEGLPFLEAIRALRLEVGKNNAMNIHLTLVPFIKAAGELKTKPTQHSVGELRRIGISPDMIICRSEKALDRDLKDKIAISCGVEKNCVIESVDAASIYQIPLNFLKQDILSPIAEILDLKNLKPNMENWDSLVKRVIAPSNEVKIAFVGKYVDLKESYKSLTEAIIHAGAALDTKVELKWVDSEKLENMESSEVFKDVSGILVAGGFGYRGVEGKIKAIQYARENKIPFLGICLGMQLALVEFARNVLKLKDVNSSEFNEKCQNPVVYLIDEFMDTNGEKQIRTAKTPLGGTMRLGAYKCDIKEKSLLAKVYNEVKSVKERHRHRYEANPKYRADFEKYGLIVSGESKGLIEAVELNCHPFFLAVQFHPEFTSRLEHVNPVICSFIKAAINYEDN

SEQ ID NO: 54213 - protein, 523 aa, Campylobacter jejuni
MKIINKNEIKKILASRFEKDLHTKLCDLPLPCCLKDAYKAANRIKEAVEKNEKVAIVGDYDVDGIISCVIMAEFFDDIGFDYIIRIPNRFKDGYGLNAEIINELDVNLIITVDNGIAALEAAKLCKEKNIDLIITDHHMPQDILPDAFAIINPKQKDCDFPEIEICGAQVAWYLIAALKEVCKLKYDMCKFLELLAIAIVADMMELRDLNRALVRRGIDHINKSKRAAFRAIKHYYQKDKFALDNIGFLIAPLINSAGRMDDASISYEFLHTKDFNKALEYLEQIVSFNESRKDEEKQLFEDSLNQIDENDSCIVVSGLNWHEGVLGIVASRLAKHFNKPAFVFSQNEEHLKGSARSVGKIDILALISKTNSILSNYGGHKGAAGISLNSENFEQFKNKIKKECSQISESEFLDTDEILGILEPSEIDFEMLEILESFEPFGHKNPRPFFVLENLCVKNKKLLGKDEKHLKLVLTKENKTIEALFFNFDKEPELNQNISLLGSISKNEFRGMVTPQFVVKEIL

SEQ ID NO: 54214 - protein, 400 aa, Campylobacter jejuni
MQKHTKIHGFAKFKLIVILALMSSIAPLSTDMYLPALSHVEQSFQTNSFLTQLSIASFFIAFALGQLIYGPLSDIFGRKIPALVGIFFFIVSSLFCVIIDDIYAFIALRFFEALGGCAGVVIARAIVNDLFEIKEAAGIFALMMVFSSLAPMLSPTFGGILLEYFSWHSIFATLFALGILLFLMILFGLKESAPHLKNKKFSHHEAMKSYKFVLSDKRFLVYILCASFALAAMFAYITGSSFVFTQFFSLSEQKFALLFGANALGFVICANINARLVLKYESEKILAKALMIMFISTVILLVNAFFHPNFLLFELSIFTSIAMLGFIAPNTTTLAMARFKEHSGTASAVLGTVQFGFAGLISFVVGAINANTPIILAFVMCACVLVANMIYFLIKIKEKK

SEQ ID NO: 54215 - protein, 602 aa, Campylobacter jejuni
MENIRNIAVIAHVDHGKTTMVDELLKQSGTFSEREQISERVMDSNDIEKERGITILSKNTAINYKGTKINIIDTPGHADFGGEVERVLKMIDGVLLLVDAQEGVMPQTKFVVKKALSLGLKPIVVINKIDKPAADPERVINEIFDLFVALDANDEQLDFAIVYAAAKNGYAKLDLNDESDNMEPLFKTILERVPAPSGSDENPLQLQVFTLGYDNFVGKIGIARIFNGVVKKNQSVMLAKADGTKVNGRISKLIGFMGLEKMDIEEAGSGDIVAIAGFEALDVGDSVVDPNNPMPLDPLHIEEPTLSIVFSVNDGPLAGTEGKHVTSNKIAERLEAEMKTNIAMKYESTGEGKFKVSGRGELQITILAENMRREGFEFCMGRPEVIVKVEDGVKTEPFEHLVIDVPEEFSGAVIEKLGKRKAEMKTMAPTGDGQTRLEFEIPARGLIGFRSQFLTDTKGEGVMNHSFLEFRPFSGAVEKRNNGALISMENGVALGYSLFNLQERGVLFIEPQTKVYTGMIIGEHSRPNDLDVNPIKGKNLTNVRASGSDDAIKLVPPRKLSLERALEWIEEDELVEVTPVNVRVRKRYLDPTQRKRMEKAKS

SEQ ID NO: 54216 - protein, 598 aa, Campylobacter jejuni
MMSNLAPQNDVLNLTPSKTSTTSSSFSKTSKNKEHESSDSKNSTQDDTESFLNSLLNSINETNEFLPDHMKISQKEVVNEAMSRLQKGAFDESDKISIFESASFMQILSLLDKLKTDTADVKLANLSTQLSSLIKTEANFNALKGASNLSELLDIAKDLGLNVKNIKVDRLLDLKATFPNLDKADFFKGAVDNVFKEIINNKISNVSKNLNHNLENTTHTTSTHSMQKTNSKDSGSLLSQTLKNLDSILSSKESKHEKNDKVKSKIEEDTTDAKNTLKNIKNDEFAKNLTEELNIKDKKNQDNLNKESKDLNKDFNKELNKNQEKNNLNQENIQDQNKNLKNNDQNLNLDKNLNKEIVKDTQKLVSNLTQKDFNLNKEPKNNNKENKDIKQNFFDQKLNFENLNKTQVVQNKENNANFNNNNTNNKETFTQEQTKTHSENVDKNSLDELNSLVKDLNKVTQNNARNITPKETLQYFSQDLKEAVDQYKAPITKLSITLNPNNLGEVEVTLIQRGNNLHINFNSNANAMNLFIQNQAEFKNSLVNMGFTGLEMNFSDQGKREQNQNQGKNRSGYGFKDALDGKNESEKVNLELVLAKYF

SEQ ID NO: 54217 - protein, 294 aa, Campylobacter jejuni
MISSSDWNLNTTATTSGTTSSGSTSGTTRTDSSSSSGIVSNPNATLDKDAFLKLLLIELQHQDPTDPMDSDKMLTQTSQLSALEMQQNTNTTMQKMVETMQKLSDSFSTSMSTSALGAIGKMATVSDNKIKLTGADELIALKMYLPEDSDENGVTLEIYDSNNKLVFSEKSDAKSISQGLFTMEWPGRNNDGVYAGDGEYTVKMVYNNKNGEKITANYGTYPIEGVVFKDGVAYAKMAGQEVPFDAIQEITDYKLGSSSSTGGSGSSGDSSGGSSDGDSSGSGSTEDGDKEEKA

SEQ ID NO: 54218 - protein, 240 aa, Campylobacter jejuni
MKVKWSRDFSIKNMQLDKQHELIFEITNLANDLALNIQDNNTQHKNDLKQILVKLFQYIKIHFKDEEKFMESIDFPLIEEHKKSHQILVEKTKELLEHSNDIVKMSQELSILTKDWILDHFANEDLWIANFTKKTLHLQEIHYTLEQYIKLKSIKQDLRAEKTYDYICNCSLRIHAVPQTIHQELVSKENTLKCEKCGQILVHLDYFDLNQNFEKFNAIFEDALQNHHFTTQENDMRGGG

SEQ ID NO: 54219 - protein, 338 aa, Campylobacter jejuni
MKILVAMSGGVDSTVTAYKLKNLGHEVIGCYMKLHGKPNYHEENIKKVEKVANFLQIPYHILDLQEDFKNKVYMPFVDTYKEGKTPNPCALCNRFIKLGKLLEFAKSLGCEKLATGHYARLENNLIKTAVDESKDQSYFLASADKEALKYLIFPLGEMKKEDVKKFASTIEVLKSFATQKESSEICFVEDTYVQVLDQFMDTKIPGEVLDSSGKVVGKHEGYMHYTIGKRRGFEVRGAHEPHFVLKINPKQNQIIVGTKEELKISEFNLKNINLFIDAKELDCEVKIRYRSKSTPCKVEIYEDKSAKIILKDPVYGLASGQMAVFYDHDKVIASGFIE

SEQ ID NO: 54220 - protein, 201 aa, Campylobacter jejuni
MNEKISQDLEKFANIPNLKNAVTFFGSARLKEDNFYYQQAKILAQKCVQNGFCVISGGGGGIMRAANEGAFSQNNNTNSMSSVGFNIFLPHEQKLNDFVEYNITFESLAIRKMALIEKSLAFVIFPGGFGTLDELCEILTLKQLEFKKDVPIILFGSEFWRGFDEFVRNSLLKLEVISKGDELKYKITDDLDFIINTLKEI

SEQ ID NO: 54221 - protein, 157 aa, Campylobacter jejuni
MLKIQGVKHFEKSRFFPFFSQNIRSFKYLALIGLGSNIEPEKKRFDMLFRVMMDDKRFKILSTSPMLINEAFGFKEQKDFTNAVMLIQTNLHARALLKVLLYYEVKFKRKRTFKNAPRTLDLDLLYFSQKVKRDKWCEVPHKGAKERVSVILPLGMI

SEQ ID NO: 54222 - protein, 409 aa, Campylobacter jejuni
MFIVAARYLFLCDEDFTILENQAFVFEDKILELGELDNLKKKYPKAKIIKTPKNSVILPAFINPHTHLEFSANSTTLHFGEFLIWLKSVINSRSILNAQAKEELILQSIKKMQKSGIGTIGEISSFGSDLDPCLKASHKGMRIVFFNEILGTNENQVEDKKQEFLKRFENSLKFKNDFFIPAISIHSPYSTHPSLAHFALDLAKKQNLLASTHFLESKAENIWLRESKGGFKKWLENFTLHPKPLYTPKDFVKLFKGVRTLFTHCVYLKEYEWLDKNLHSITHCAFSNRLLSQKSLDLKTALKSGLNIHLGTDGLSSNISLSLLDEMRANLLIHKNFDLLELASKLLQMVTLYPARALNLNLGELKKGKIADFNVFELGECDKKQAPLQFILNAKEVDKLFIKGKECKF

SEQ ID NO: 54223 - protein, 246 aa, Campylobacter jejuni
MMKKVYFYATCLGSTAMQQSVLNAIKLLRREGIEVIFKKNQTCCAQPSFNSGYFDESREIALYNVDLFDKDYPIVVPSGSCAGMMSHDYKELFKNRPEFSKIKTFSSRVIELSQYLDEVLKVDYEDKGVPIKVTWHSNCHALRVQKSIQASKNLIKKLKNVELVELQYEEECCGFGGTFSVKEPEISNAMVRSKIKDIQNSGAKYLISGDGGCLLNIDGTMKRMGLDIKGIHLYDFLLKRLEGGRL

SEQ ID NO: 54224 - protein, 520 aa, Campylobacter jejuni
MNELSSVDWSRAQFALTALYHFLFVPLTLGLSFMIAIMETIYVKTKNERWKKITKFWLSLFAINFAIGVATGIIMEFEFGTNWANYSWFVGDIFGAPLAVEGIMAFFLEATFFAVMFFGWDKVSKGFHLLSTWCVAIGSNLSAFWILVANGWMQYPVGMSFNPDTARNEMQSFFEVALSPVAISKFLHTIGSGYVISALFVMGISAWFMLKGRHIIEAKKSLVVGASFGLVCSIFLFFSGDESAYRVTQTQPMKLAAMEGVYQGEHRAGLVPFGILNPKKTIDNNESVFLFDITIPYALSILGNRDPNSFVPGIEDLIYGNESKGIEPMQNRIDRGKIAIQTLKDYKLAKENNDTIAMANHKSILETHFKDFGYGYLEKPSDTIPPVALTFYSFHIMVALGSFFFLLFIVTLYLTMANDIEKFRKVLWVCLLSIPLGYIAAEAGWIVAEVGRQPWAIQDLLPVHIAATQLGKVNVQISFWIFAVLFTALLIAEVKIMLTQIKKGFDAHAGHTPLMGKGEK

SEQ ID NO: 54225 - protein, 102 aa, Campylobacter jejuni
MYAIIKHSGKQYKVSVGDELKLDHFEAESKASIEVSEVLAINDKELKVGAPFVAGAKVVLEVINHGKDKKVVIYKKRRRKDSKLKRGFRRQFTRVVVKDIKA

SEQ ID NO: 54226 - protein, 84 aa, Campylobacter jejuni
MAHKKGQGSTQNNRDSIGRRLGVKKFGGEFVRAGNIIIRQRGTATHAGNNVGMGKDHTIFALIDGFVKFERKDKDRKKVSVYPA

SEQ ID NO: 54227 - protein, 350 aa, Campylobacter jejuni
MFIDSVKITLASGDGGKGAVSFRREKHVPLGGPDGGDGGNGGDIIFVCDNNTHTLVNFKGKRELRAQNGAGGMGRNKNGKKGENLELIVPEGTQVIDAQTNEILLDLTKEGQRELFLKGGKGGLGNTHFKHATNQRPDYAQPGIKGESRLVRLELKLIADVGLVGFPNVGKSTLISVVSNAKPEIANYEFTTLTPKLGLVDVNEYNSFVMADIPGIIEGASGGKGLGLAFLKHIERTSFLLFVLDPMRQMPLKEQFIVLRKELEKFSNELFGRKFGIMISKSDSVRLGEEFAEQIALNINELDNYLKEINNPQSFLIKVSSLEKTGLKELKFMLLEEIKTLRNNKKNLTI

SEQ ID NO: 54228 - protein, 261 aa, Campylobacter jejuni
MSEIITIANQKGGVGKTTTAVNLAASLAVAEKKVLLIDVDPQANATTGLGFNRNNYEYNIYHVFIGRKKLSDIILKTELPQLHLAPSNIGLVGIEQELAKGENNEKKMLLKNQIQEVIDEYDFIIIDSPPALGSITINAFAASDSVIIPIQCEFYALEGVAMVLNTIKIIKKTINSKLRVRGFLPTMYSSQNNLSKDVVDDLKQNFKKQLFTINGNEDDFIVIPRNVKLAESPSFGKPIILYDIKSPGSVAYQNLAYSILG

SEQ ID NO: 54229 - protein, 141 aa, Campylobacter jejuni
MFEDMHPSIMLATMAIFLAMIVILNSMLYKPLLKFMDERNDSIKNDENKVKENSQEVLGVNDELEAIHINTREEIQKIKQSAIAAAKEEAEQILRSKKEELERKMASFYADLAVQKKELQEHLNIHLSELKQALQNNIKKI

SEQ ID NO: 54230 - protein, 501 aa, Campylobacter jejuni
MKFKADEISSIIKERIENFDLNLEIEETGKIISVADGVAKVYGLKNIMAGEMVEFENGDKGMALNLEESSVGIVILGKGEGLKEGASVKRLKKLLKVPVGEALIGRVVNALGEPIDAKGVINANEYRFVEEKAKGIMARKSVHEPLHTGIKAIDALVPIGRGQRELIIGDRQTGKTTVAVDTIISQRGQGVICIYVAIGQKQSTVAQVVKRLEEHGAMEYTIVVNAGASDPAALQYLAPYTGVTMGEFFRDNAKHALIVYDDLSKHAVAYREMSLILRRPPGREAYPGDVFYLHSRLLERASKLNDELGAGSLTALPIIETQAGDVSAYIPTNVISITDGQIFLETDLFNSGIRPAINVGLSVSRVGGAAQIKATKQVSGTLRLDLAQYRELQAFAQFASDLDEASRKQLERGQRMVELLKQPPYSPLSVEKQVVLIFAGTKGFLDDIAVSRIKEFEDGIYPFIEAKHPDIFEQIRSKKALDSDLEEKLAKAINEFKANHL

SEQ ID NO: 54231 - protein, 315 aa, Campylobacter jejuni
MKKIFTVALLGATLLYAESSAFGAGDITSNSSYGLTSNEKLFKEKLDNLNNENIQTNARINEINERIEGLQSTLEGINSQYAKSNSRLSQVEENNQNIENNFTSEIQKLKAYVEESRKIQEANNKQVKKVLAELSSLVDAINANYVSKNELNDANLSVKTITPSVVVSTTDSNSTIENNNTQNTQDDKAKQIDESWKKKKNNEILELAIKDVDKNAFEDSKAKLNFLITKQYKPARANFWLGEIEYKQKNYNNAIVYYKKSSSLSTKGDYFPKLLYHTAISLDKTGDTKTANGFYKALKTNYPNSPEAKASPNRK

SEQ ID NO: 54232 - protein, 306 aa, Campylobacter jejuni
MNAAFIFPGQGSQSLGMGKDFYENSIKAKELLQNASDFCKIDFKHLLFEENEKLNQSEFTQPAIVLNSLMAYSVLLEKKPDLSSKFALGHSLGEFSALAVNGAFDFLEALSLVNKRGLFMQEDCAKVEAGMMVVLGLDDEKVEELCQKAQKENKQIFAANYNCDGQIVVAGLKPDLASYESVFKEAGAKRAMLLNMSVASHCPLLENASAKLCVELEKVLKPNFKAVISNANAKIYTSKEEALELLKAQLISPVLYKQSIKACENEVDYFIEFGASVLKGLNKKITSKETYALTNMNDIDEFLKVV

SEQ ID NO: 54233 - protein, 229 aa, Campylobacter jejuni
MMKIAILGAMSEEITPLLETLKDYTKIEHANNTYYFAKYKNHELVLAYSKIGKVNSTLSASVMIEKFGAQALLFTGVAGAFNPELEIGDLLYATKLAQYDLDITAFGHPLGFVPGNEIFIKTDEKLNNLALEVAKELNIKLRAGIIATGDEFICDEAKKAKIREIFNADACEMEGASVALVCDALKVPCFILRAMSDKAGEKAEFDFDEFVINSAKISANFVLKMCEKL

SEQ ID NO: 54234 - protein, 308 aa, Campylobacter jejuni
MIDFSKKPLFLAPMAGFSDLPFRNVVKKFGADITISEMISSNALVYESSKTLHMLERAELENPYIVQIAGGDKEVLKKAVQMLNEMDFVDGIDFNCGCPVNKVVKQCAGSALLENLELFKNLVGVIKENNKKSLTSVKFRLGFNEKYPEKMAKICESLGVDFISIHGRTRKQLYSGKADYGSIASAKASVKIPVIANGDINAQNAKEVYKITKCDGLMIGRASVGNPWIFYEIKSGKSVDEKLKKEIILTHFDEMIKHYKDQGVSIFRKHLHEYSKGHKDASTFRDTVNRIDNVEEMRKKIEEFFSLT

SEQ ID NO: 54235 - protein, 120 aa, Campylobacter jejuni
MKKNEIQNFKNILEERKKAILENLQSNSNEIEALHNSVPSDSVDFSVIETGSQIDFAISTNLKEELIEIEDSLDKIKNGTYGICESCDDEIDSQRLKVKPHARYCITCRQIAEQGKKHEN

SEQ ID NO: 54236 - protein, 153 aa, Campylobacter jejuni
MENNLQVNIFCIQKSDEFKTCSEKYSKLISKYATLKEINVFNKKIALAQNLNAIEAKKSYEEAFMPYKKGYCIALDEKGKDLTSIEFAKLIQDKNELSFFIGGAYGLREEFNQSLDFRLSLSKLTLAHQFVKTLLLEQIYRAFCINNNHPYHK

SEQ ID NO: 54237 - protein, 280 aa, Campylobacter jejuni
MNFADIFSKIRRQQPSVKEAPNHWVKCQSCHALMYYKEIESCFNVCPKCNYHMRISADERIKLLSDEGSFIEYDANLEAIDPLKFVDSKSYKKRLSEGESKTGRKSSVISGECEINGLKTQLVVFDFSFMGGSLGSVEGEKIVRAIQRAITSKTSLVIVSASGGARMQESTYSLMQMSKTSAALKLLSKEKLPYISILTDPTMGGVSASFAWLGDLIIAEPEALVGFAGARVIKQTIGADLPEGFQKAEFLLEHGLIDAIVERGEQKQYLSDVLKFFSGK

SEQ ID NO: 54238 - protein, 294 aa, Campylobacter jejuni
MKQLTLAKTVKGVGIGLHKGEPIEITLEPLEANSGIVFFRSDLNASYKASPENVINTQMATVLGDDRGFISTIEHLMSAINAYGIDNVRIVLNANEAPVMDGSSISFCMMLDEAGVKELDAPKKIMVIKKPIEVRDGNKFVRLTPTKEPRINYTIKFDNAVIGEQSYNFEFSKKNYIENIARARTFGFLKDVQALRSMNLALGGSLENTIVVDENRILNPEGLRFKDEFVRHKILDAIGDLTLLGYRVFGDYTSYAGSHHLNHLLTKEVLKDKDAYEIVSLEKTTQKAYEKVFA

SEQ ID NO: 54239 - protein, 292 aa, Campylobacter jejuni
MKILVPATSANLGPGFDCLGLSLKLFNETQIQKSGVFSISIGGEGSDNIFLKKNNIFVNIFYEIYEKLSGKKDNFRFIFQNNIPLSRGLGSSSAVIVGAIASAYYMSGFKVEKECILDEALIYENHPDNIAPATLGGFVCSLVEKNKVYSIKKEIDKDLAAVVVIPNLAMSTEQSRQALAKNLSFNDAVFNLSHASFLTACFLEKKYEFLKFASQDKLHEINRMKNLPELFEVQKFALENKALMSTLSGSGSSFFSLAFKDDALALAKKIQTKFKDFRVQYLEFDDNGFEIC

SEQ ID NO: 54240 - protein, 871 aa, Campylobacter jejuni
MAKIRIHEIAKELGYDSKEIIEKANELGLGIKTASNAVEPEIAAAIYEYIQTREIPEAFKKNIKTPTAKKPKKENIKEQEKLNESEKKEPKKEEKLKQEVKKEELKIEKENAKEEEKQEIIDAHKPQSLASATLAKRRGLVIVKKKKDEEEIQVKKEEVKNSNDISINNEERLSLKTMFSNADESLKKKKKEKKSFVASKKESTEKMNFLDEHDFGDISLDDEDEVVLPDFSVKEQEKPQNINKKQPNFIRQAVGNSAGFGFEGGIQRRSRKKPSKKIEKKEVEEVGSVAISKEIRVYEFADKIGKSTSEVISKLFMLGMMTTKNDFLDEDAIEILAAEFGIEINIINEADEFDYVKDYEEETDEKDLVTRAPVITIMGHVDHGKTSLLDYIRKSRVASGEAGGITQHVGAYMVEKNGRKITFIDTPGHEAFTAMRARGASITDIVIIVVAADDGVKPQTKEAINHAKAAGVPIIIAINKMDKEAANPDMVKTQLAEMEIMPVEWGGSYEFVGVSAKTGMGIEDLLEIVLLQADILELKANPKSFAKASIIESSVQKGRGAVATVIVQNGTLTVGSTVVAGEAYGKVRAMSDDQGKALKEIKPGECGVIVGLSEVADAGEILIAVKTDKEAREYANKRHEYNRQKELSKSTKVSIDELGAKIKEGNLKALPVILKADVQGSLEALKASLEKLRNDEIKVNIIHSGVGGITQSDIELASASENSIVLGFNIRPTGEVKERAKDKGVEIKTYNVIYNLLDDVKALLGGMMSPIISEEQLGQAEIRQVINVPKIGQIAGCMVTEGVINRGAKIRLIRDGVVVYEGNVSSLKRFKDDAKEVAKGYECGVGIEGCDDMRVGDYIESYKEVEEQASL

SEQ ID NO: 54241 - protein, 400 aa, Campylobacter jejuni
MFDEIRFNTIERLPNYVFAEVNAIKMAARRAGEDIIDFSMGNPNGKTPQHIIDKLCESANKDKTSGYSTSMGIYKLRLAICNWYKRKYNVNLDPENEVVATMGSKEGFVNLARAIINPGDVAIVPTPAYPIHTQAFIIAGGNVAKMPLAYNEKFELDENQFFENLHKTLNESIPCPKYVVVNFPHNPTTVTCEKSFYERLIATAKKERFYIISDIAYADLTYDDYKTPSILEIEGAKDVAVETYTLSKSYNMAGWRVGFVVGNKRLVSALKKIKSWFDYGMYTPIQVAATIALDGDQTCVDEIRATYDKRMHILLEAFENAGWKLQKPRASMFVWAKLPESKRHLKSLEFSKQLLQRASVAVSPGVGFGEAGDEYVRIALIENENRIRQAARNIKKYLKE

SEQ ID NO: 54242 - protein, 274 aa, Campylobacter jejuni
MLYFIPTPIGNLSDISFRALELLKTCDLVFCEDTRVSKSLISLLNTKFHTDIHISKFIALHSHNEKEVLASIDLKIFEKNVAYLSDAGMPGISDPGKALVEFAQENNITYEILPGANAALVALVSSAFCQKEFIFIGFLANKGKERQKDIEKILNFPYPSIIYESPKRILSLVEQIMILDNQREIFLIKEISKKFEKKFKGNAKELSEILKKSNLNGEWVVVLQSKEQNFLQNTLCEKDIMDLELSLKAKAKLLSKINGKNAKEIYQKLLLSQD

SEQ ID NO: 54243 - protein, 66 aa, Campylobacter jejuni
MKKEIHPEYVECKVSCACGNTFTTKSNKAELRVDICSNCHPFFTGSEKIVDAAGRVEKFKKKYAMQ

SEQ ID NO: 54244 - protein, 218 aa, Campylobacter jejuni
MQFLYNKQAGEEFIQLQGENFNHLKVRRVKENSELNLRNLQDNFLYNYTITNLTRNSCTLKFLNKKSQNIKQSELNLALAIIDIKILEKTLPFLNELGVKKLHLVFTNFSQRNFKIDLERFEKIIISSCEQCGRNTKMDLIIHQSTQEFVQKFPNAIMVDFQGEQQSHFDEKELYFIGPEGGFNNDERLLFNRKISLKSSNILKSQTAIIAIASKILL

SEQ ID NO: 54245 - protein, 193 aa, Campylobacter jejuni
MIIRKLFEFENAHIVRFCSSKRCKSSIHGHSYKVEVLLESKYLDNAGMVYDFGLLKTYIRQIIDSFDHAITLFKYDDAKYLEEMKKYSSRWICLPVNVSAENFCRVFFILIDALLKQTKMVNGEQGVTLQSIIVHETRTGYAQGFREDAYSELMPKISLQDIEFSNGIKAEWNDIDFYNKLKNEEIFINPKEI

SEQ ID NO: 54246 - protein, 320 aa, Campylobacter jejuni
MLIDQFGRKINYLRISVTQRCNFRCLYCMPKIPFDYQPKENLLSFEELFLFVKAAIDEGIEKIRITGGEPLLRKDLSIFIKMISDYKSDIDLAITTNGFLLKDFAKDLKNAGLKRLNISLDTLDHKKAKTLAQKDVLDSVLSGIDEALNLDLKVKLNTVALKNLNDDELISLLEFAKSKKAQIRFIEFMENTHAYGKLQGLKRDEIIQILSQKYQIQLIKKDEKAPVSIYKADDYEFGIIDPHSHEFCDSCNRIRLSAEGLLIPCLYFDEALSIKEAVRKGDIKAAVEILQEVLRNKPEKNKWSVVDNETSSRAFYQTGG

SEQ ID NO: 54247 - protein, 334 aa, Campylobacter jejuni
MKKIFFMFLTAVSFLGASELNIYSARHYNADFEIIKKFEEKTGIKVNHTQAKASELIKRLSLEGSNSPADIFITADISNLTEAKNLGLLSPVSSKYLEEFIPAHLRDKDKEWFAITKRARIIAYNKNTNIDISKMKNYEDLAKAEFKGEIVMRSATAPYSKTLLASIIANDGNKEAKAWAKGVLENLATNPKGGDRDQARQVFAGEAKFAVMNTYYIGLLKNSKNPKDVEVGNSLGIIFPNQDNRGTHINISGIAMTKSSKNQDAAKKFMEFMLSPEIQKILTDSNYEFPIRNDVELSQTVKDFGTFKEDQIPVSKIAENIKEAVKIYDEVGFR

SEQ ID NO: 54248 - protein, 452 aa, Campylobacter jejuni
MDPSQVLDLNQTSTASFDAGYSILMVVVALALVFLNGFFVLSEFSIVKVRRSKLEEMVKEKKAGAKKALEVTSRLDTYLSACQLGITLSSLALGWIGEPAIAKMLEIPLINLGFSTVIIHTMAFIIAFSIITLLHVVLGELVPKSIAIAVADKAVLFIARPLHWFWMLFLPCIKIFDFLAAISLKLFGIKPAKESELTHSEEEIKIIASESQKGGVLDEFETEIIRNAVDFSDTVAKEIMTPRKDMICLNKQKSYEENMQIICEHKHTRFPYIDGSKDTILGMIHIRDIIQNELNHKSQNLDTFVKPLILVPENISISKVLVMMNKERSHTALVVDEYGGTAGILTMEDIMEEIIGEIKSEHEEDSYKKLAENIYEFQGRCDIETVEEMLVINYDEDLEQVTIGGYVFNLLGRLPMVGDRIEDELCYYEVKKMDGNSIERVKVVKKTNKDEE

SEQ ID NO: 54249 - protein, 242 aa, Campylobacter jejuni
MIKIGIYGAKGRMGKQIEECLKSETQARISILYDKGGNLGELFEKSDVIIDFSSPSGTHELLNYARTMPKPLVIGTTGLDEKILHLMQSASEVMPIFYATNMSLGVAVLNYLASKASQMLRNFDIEILEMHHRHKKDAPSGTAMTLAQSVAKARNLELEKVRVSGRDGIIGERSKDEIAVMSLRGGDIVGRHTVGFYEDGEFLELNHTATSRATFAKGAIKIAIWLSKQEAKMYSINDFLGI

SEQ ID NO: 54250 - protein, 393 aa, Campylobacter jejuni
MSLALTFRPENFDDILGQYELIEIFKKFTALQKLPHSIFFGTAGSGKTTFARVVAKEFGLDFYEFDGGNFKLEELRKILDNYKNSLYKPLIFIDEIHRLSKTQQEMLLIPMENYRLILIGASTENPYFVLSSGIRSRSMLFEFKSLGAKELETLLLRVQEKMKFSIDKEAKDFLLKSADARAMLNLLEFVLVLDEKHISLENLKKLRNTINSEGVSSKDTHYILASAMIKSLRGSDVDAAIYYLARLIDAGESADFIARRLVIFSSEDVGNADPNALNLAVSTLDAVKNIGYPEARIILAQCVVYLASTIKSNASYKAINEALNYVKNNEALEIPNYLNNNHQEKQNYLYPHDFGGWVEQKYLGKNLKFYHSKGLGEEAKLLDNLYKLKNHKA

SEQ ID NO: 54251 - protein, 201 aa, Campylobacter jejuni
MFYLNKILYFFLILFLLIGILGFFINSNPSNQIIKKPYLPFLEIGDLVFRAGIGSESFLIENLSQSPYSHIAMVVKTSPTILIHATTDDDKNAKNQVILSSMDDFLKLSHKIAIKRLKFDEKTKQKIVAKDLEHLGRKFIISTDKDAFYCTTFLEQSINSITPFHLQYTLIKAPFNEGLYLFPQTFFENNQSVLIYESQNF

SEQ ID NO: 54252 - protein, 665 aa, Campylobacter jejuni
MMYKKQNLPELTLRGLILGSILTIIFTASNVYLGLKVGLTFSSSIPAVVISMAVLSLFKTSNILENNMVQTQASAAGTLSSVIFVIPGLFMCGYWSEFPLWQTFMICLCGGGLGVLFTIPLRRTMVVESKLAYPEGRAAAEILKVANKDQSSKKGKQGIKEIALGSFIAAIFSLLSNGFKLAASESNFAFIWNKMAFGFSMGYSLALLGAGYLVGLAGAIALFVGMFLAWGIFTPYLSNFEFDSTKNAVDLASSVWSSKVRLIGTGAIAIAALWTLIELLKPVIEGIKEIVKNVKITNQEKNERTNIDLSLKSIFILFVLMVVGLFITFYSFVEDANLSIYYQMLFSFVGTLVSVLIGFFVAAACGYMAGLVGSSSSPISGIGLIGVIISSIVFLVLGVELFQDPMLSKFAVALAIFTTSVILATAAISNDNLQDLKTGHLVGATPWKQQVALLVGCVFGALAIVPVLNLLYQAYGFVGAMPREGMDASSALAAPQANLMSTIAQGIFHHNIEWGYMAFGVFVGILMIIIDKILKGTQKMSLPPLAVGIGIYLPPAVNIPLVIGGILKYIVMQHLTKKYAKNSHKEEKLASCEQRGTLFASGLIVGESIFGVIIAGITVFSVSMGGSENPLALNLANFHDSELFALIFFVGVVLYFIKRIVKKDA

SEQ ID NO: 54253 - protein, 602 aa, Campylobacter jejuni
MEKEVIAYLDNETIIDSQSVKNTNLKEIYFDNSKESLEVIRHSCAHLMAQAIKSLYPEAKFFVGPVIEDGFYYDFRVESKIGEEDLVKIEKKMKELAEAKIEISKYEITKSEALAKFQNDDLKQEVLLRIPDRAVSIYKQGEFEDLCRGPHVPNTKFLRFFKLTRVAGAYLGGDEKREMLTRIYGTAFADKESLKEYLTIIEEAKKRDHRKLGTELKLFTFDDEIGGGLPIWLSNGARLRSKLEHMLYKIHRLRGYEPVRGPELLKADAWKISGHYANYKENMYFTQIDEQEYGIKPMNCVGHIKIYQSDVRSYRDLPLKFFEYGVVHRHEKSGVLHGLFRVREFTQDDAHIFCMPSQIKEQVLEILAFVDNLMKLFDFSYEMEISTKPEKAIGDDEIWEIATKALKEALDEQGLKYGIDEGGGAFYGPKIDIKITDALKRKWQCGTIQVDFNLPSRFKLEYTDSDNEKKQPVMLHRAILGSFERFIGILTEHCAGEFPFFIAPTAVGIVPIGEAHIAYAKEIQKELLELNIDSEVYEKNESLSKKIRIAEKQKLPMILVLGDDEVAKRSVALRDRRAKEQKNLSLDEFIKLVKEKMSEVHF

SEQ ID NO: 54254 - protein, 172 aa, Campylobacter jejuni
MSKEKEVLLNEEIRADEIRCVGDDGKVYGIISSDEALEIANRLGLDLVMIAADAKPPVCKIMDYGKFRYQQEKKQKEAKKKQKVIDIKEIKLSVKIAQNDINYKVKHALEFLEQGKHVRFRVFLKGREMATPEAGVALLEKIWTMIENEANRDKEPNFEGRYVNMLVTPKKA

SEQ ID NO: 54255 - protein, 395 aa, Campylobacter jejuni
MKMDYKEQSHIIPTYKRFDIVLEKGQGVYLFDDKAKKYLDFSSGIGVCALGYNHAKFNAKIKAQVDKLLHTSNLYYNENIAAAAKNLAKASALERVFFTNSGTESIEGAMKTARKYAFNKGVKGGQFIAFKHSFHGRTLGALSLTANEKYQKPFKPLISGVKFAKYNDISSVEKLVNEKTCAIILESVQGEGGINPANKDFYKALRKLCDEKDILLIADEIQCGMGRSGKFFAYEHAQILPDIMTSAKALGCGLSVGAFVINQKVASNSLEAGDHGSTYGGNPLVCAGVNAVFEIFKEEKILENVNKLTPYLEQSLDELINEFDFCKKRKGLGFMQGLSLDKSVKVAKVIQKCQENALLLISCGENDLRFLPPLILQKEHIDEMSEKLRKALKSF

SEQ ID NO: 54256 - protein, 182 aa, Campylobacter jejuni
MLIKFKNHSPKLGQNVFVAEGAKIIGEIEIGDESSIWFNCVLRADVNFIKIGKRTNIQDLSTVHVWHREFDEKGKLKDAGFPTIIGDDVTIGHNCVIHACVIKNRVLIGMNAVIMDNALIEEDSIVGAGSVVTKGKKFPPRSLILGNPAKFVRELNDEEVSFLKQSALNYVDFKNEFLKDLQ

SEQ ID NO: 54257 - protein, 457 aa, Campylobacter jejuni
MMTSKTSLALLCDFYEFTMSQGYFKNNKKDQICYFDIFFRKIPDSGSFAIFAGLEDILDFVENLSFDAEDIEFLRKQGIFDTEFLDFLANFKFKGEIYAMREGEVIFPNEPLLCIKATTIEAQLLETFLLLSLNHQSLIATKTNRIVRAAKDSKILEFGSRRAQGSEAALKGARAAFIGGCIGSACTLAGKIYNIPINGTMAHSWVQMFENELEAFKAYVKIYPKNPVFLIDTYDCLNSGLKNAIKVFKEFGIQEGGVRIDSGNLLELSLKIRQELDQAGLQKCKIIVSNALDEWSIKKLKEQNAPIDIFGVGERLITASSDPIFSCVYKLAALEDQGIKPKIKISENNEKSTLPHFKKLFRVYDKNTQKILFDELYVFDENPNQDENLERKELLELVYKEKRLLKKSSLNTIQDYTKEQISKLDESFLDLDRFVKFEVKLSPKLQNITEDLLKTRF

SEQ ID NO: 54258 - protein, 340 aa, Campylobacter jejuni
MQRKRIYNPSSNETLGDRKVFDGNPHGILNFTKAKYTWALKLWDLMEANTWFPKEVDTTKDALDYRCNLTAGEKRMYDLVWSQLISMDSFQTNNLADNINPYITAPEINAVLARQAYEEANHSKSYAVMVEAICDNTDLIYEMEKHDETLREKNDFISSIYEELAGDVDDNKLLLAMVANQILEGVYFYSGFTAIYALARAGKMLGSAQMIRFIQRDEITHLLLFQNMINSVRKERPDLFHDENINKIYDMFKKAGDLEIKWGKYITQNQIMGFTDDIIEEYIHYLVDQRLSAINLDKLYNAKHPIKWVDDFSKFNDQKSNFFESKVTNYSKGSISFDDF

SEQ ID NO: 54259 - protein, 202 aa, Campylobacter jejuni
MNLEQIYKDCGAYLEGHFLLSSGKHSQFYLQSAKVLEDPKLAAKLCDELAKIIASYKIEFDSICSPALGGILAGYELARACSKRFIFTERVNKEMTLRRGFEVKKGEKFIICEDIITTGGSALESAKIIESLGGIVVGFAALANRGFCAVENLKSPRKDNAKLPENLPLFTLGNFEFEIYDETNCPLCKKGNKAIKPGSRGN

SEQ ID NO: 54260 - protein, 187 aa, Campylobacter jejuni
MIMLNEIFNKQKTQSEKSLEALKKDFTTLRTGKVNIHILDHITVDYYGTQTPLNQVATVLASDASTISITPWEKPLLKTIESAIAAANIGVNPNNDGESVKLFFPPMTREQREENVKQAKAMGEKAKVSIRNIRKDANDAVKKLEKDKAISEDEAKKAYDEVQKLTDTYTTKIDEGVKSKESELLKV

SEQ ID NO: 54261 - protein, 627 aa, Campylobacter jejuni
MKKIIFSLCFFILHLGAQEFKFIDANISKEDEGIYALVEKYVDLNNQIKEFKKNNDENSSTFNGILSEFEKDKKTILAKIPDMIVGQKINEEAVARFLKAKEKLLDVQKKNINKPYIYTDATLNLVYFNIVESFYSSLFEVEKLFKNTASSEDLIATVDKAMENLQNSSNVNLDSFKSKITNPEELEKITLKERYISNAVDSYSEILKYLRSNADLLESNYIFSLLELQVWIDRINEAIGVSFVNIGKIVISALVLVFFISLRRFFANIVYFFLVQLFYRNKNDVDDIKVIFIENIKKPVGFLLIVYAISLCLTIATYPAPLSVNLSNFFHIVYAVLIAWLILRMLDGYGVVLVSKLAQKSGKKEVVNLIIKILYFVIIIIALLYILAQLGFNISAIIASLGIGGLAVALAAKDIIANFFASILLLFDNSFNQGDWVEVSGIEGTVVETGLRKTTIRTFDNCLVFLPNSTIMGANIKNWSKRRMGRHVRMYLGVGYDATPEKLEQCVKDLREFLHTSDLVAHDEDSALKYGDHTTKYRQNLVSINDLEGYKNACYVALSEFADSSINIELYFYIKEIGGKDFREARQSLMLEFMRIIEKNGLTFAFPSRSIYIENLPPLDLQAKAIK

SEQ ID NO: 54262 - protein, 323 aa, Campylobacter jejuni
MGKNSLIGGSIWDEYSQKVQDRMNNPQHMGEFSEEDAKARNAKLIVADFGAESCGDAVRLFWLVDEKTDKIIDAKFKSFGCGTAIASSDTMVDLCIGKTVDEAVKITNLDVEFAMRDNPETPAVPPQKMHCSVMAYDVIKQAAAHYKGISPEDFEDQIIVCECARVSLGTIKEVIKLNDLHSVEEITQYTKAGAFCKSCIKPGGHEKRDYYLVDILAETRAEIDREKLKNTMKSDVAFDEMTVVGQLKAVESVLDAEIRPMLHNDGGDLEVIDIQKAEGAAIDVYIRYLGACSGCSSGSGATLYAIETILQEELSPNIRVMPV

SEQ ID NO: 54263 - protein, 133 aa, Campylobacter jejuni
MTYNEKIISMNNDLLDHQHKELFEISKKLSLMNQRHVGTKELKIVLRELLIMINRHFSDEEAFMREIEYPYINHHTRIHRKIILEIEEIIISEAKFVNIMTEKLNLVVQDFIFKHTAKEDSKIVKYYEEKFKK

SEQ ID NO: 54264 - protein, 63 aa, Campylobacter jejuni
MPKMKSVKSAVKRFKVGKNKIKRGSAFRSHILTKKPAKRMRGLRTAKYVHSTNVKAVEKMLGI

SEQ ID NO: 54265 - protein, 117 aa, Campylobacter jejuni
MARVKTGVVRRRRHKKVLKLARGFYSGRRKHFRKAKEQLERSLVYAYRDRRRKKRDFRRLWIVRINAACRLNDLSYSRFINGLKKAGIELDRKILADLAMNDAAAFAKIAEAAKKAL

SEQ ID NO: 54266 - protein, 118 aa, Campylobacter jejuni
MKPKYHFLNNARYALEGLFALFKNEMAFRIELCIIIPAIVFSFFLKISFLEHLLLISVLILILIVEALNSAIEACVDLITNEWHEKAKIAKDCASAAVFFSVLLALFVWGFILYNIYL

SEQ ID NO: 54267 - protein, 335 aa, Campylobacter jejuni
MKLKNPLDMHLHLRDNQMLELIAPLSARDFCAAVIMPNLIPPLCNLEDLKAYKMRILKACKDENFTPLMTLFFKNYDEKFLYSAKDEIFGIKLYPAGITTNSNGGVSSFDIEYLKPTLEAMSDLNIPLLVHGETNDFVMDRESNFAKIYEKLAKHFPRLKIVMEHITTKTLCELLKDYENLYATITLHHLIITLDDVIGGKMNPHLFCKPIAKRYEDKEALCELAFSGYEKVMFGSDSAPHPKDTKECCGCAAGVFSAPVILPVLAELFKQNSSEENLQKFLSDNTCKIYDLKFKEDKILTLEEKEWQVPNVYEDKYNQVVPYMAGEILKFQLKH

SEQ ID NO: 54268 - protein, 304 aa, Campylobacter jejuni
MISADKIWMDGKLVDFKDATLHFLTHSLHYGNAVFEGTRAYKTDKGLAIFRLEDHTKRLLESAKITLLNCPFSQKELENAQIELLKANNFKSNVYIRPLIFLGDGVMGLYHIKAPVRVGIAAWEWGAYLGEEGLEKGIKVKISSFARNSVKSCMGKAKASANYLNSQIAKFEAIEAGYEEALMLDEEGFIAEGTGECFFIVKDGVLITPPNDFSLKSITQDTVLKIAHDLGITVLRQRISRDEVYTADEAFFTGTAAEITPINNIDARIIGNGLRGSVTKKLQDAYFDVVYGRNEKYASMLTYI

SEQ ID NO: 54269 - protein, 146 aa, Campylobacter jejuni
MIDVMQIQEILPHRYPFLLVDKITELKVKEVVLGYKNISISDHVFMGHFPGHPIYPGVLILEGMAQTGGVLAFESMEDKVDPKSKVVYFTGIDGAKFRNPVRPGDRLDYEMSVVKNRGNMWIFKGQAFVDGNLVAEAELKAMIVDK

SEQ ID NO: 54270 - protein, 417 aa, Campylobacter jejuni
MEFLSIGVKIMPRKCSFCNEVENPQRRILANENDDAFICEYCVEGAYSIIYGEEKEFKEPKQSHNTEFKDITPKELKAYLDRYVIGQDRAKKVFSVGVYNHYKRLFKAELQDDDTELFKSNILLVGPTGSGKTLLAQTLAKFLDVPIAICDATSLTEAGYVGEDVENILTRLLQAADGDVQRAQKGIVFIDEIDKIARMSENRSITRDVSGEGVQQALLKIIEGSLVNIPPRGGRKHPNQEFIQIDTSNILFVCGGAFDGLETILKRKLGDKVVGFFDDAKEENKALLEKIEPDDLVHFGLIPELIGRLHVIASLNELNEEDMVRILTEPKNAIIKQYQKLFAIDGVNLKFEEDALRAIAQLALERKTGARGLRSIIEEMMVDLMFELPEYKDYDIVITKEVVKDNAKALLIKRKIS

SEQ ID NO: 54271 - protein, 346 aa, Campylobacter jejuni
MILDQLIGFFSSDMGIDLGTANTLVLVKDKGIVINEPSVVAVERERYDSKAKILAVGKEAKDMVGKTPGNIEAIRPMKDGVIADFDMTEKMIRYFIEKTHRRKSFLRPRIIISVPYGLTQVERKAVRESALSAGAREVFLIEEPMAAAIGASLPIQEPKGNLVVDIGGGTTEIGVISLGGLVISKSIRTAGDKLDMSIVNYVKEKYNLIIGERTGEEIKITIGSAIQLPKELSMVVKGRDQVSGLLSRIELTSEDVREAMREYLKEIADALKMVLEMMPPDLASDIVENGVVLTGGGALIRGLDKYLSEIVRLPVYIADEPLLAVAKGTGKALEEISLLQQLTNEE

SEQ ID NO: 54272 - protein, 1089 aa, Campylobacter jejuni
MPKRTDIKSILLIGSGPIVIGQACEFDYSGTQAAKTLKELGYRVVLINSNPATIMTDPEFADATYIEPITKESILSIIKKEKIDAILPTMGGQVALNVAMEVYESGLLGDVKFLGANPEAIKKGEDRQVFKECMKKIGMDLPKSMYAYNYDEALKAVDEIDFPLMIRASYTLGGAGSGVVYNMDEFKELTNTALALSPIHEILIEESLLGWKEYEMEVIRDRADNCIIVCSIENIDPMGVHTGDSITIAPALTLTDKEYQVMRNASFAILREIGVDTGGSNVQFAINPKNGRMIVIEMNPRVSRSSALASKATGYPIAKVATLLAVGFSLDEIKNDITGTPASFEPVIDYIVTKIPRFTFEKFPGANTTLGTAMKSVGEVMAIGRTFKESIQKALCSLERSLSGFDRVKFEDRNDLVFKIRNANEKRLLYVAQAFREGFSVEELYELCKIDPWFLTQIKEIVDFEEQIDMDILNNKALLRKAKTMGFSDKMIALLVNLKDNLELSQNDIYYVRMKQKIIAEFSEVDTCAGEFEALTPYLYSSINVSELTQSKNDAKDKKEKKVMIIGGGPNRIGQGIEFDYACVHASFALKDMGIKTIMYNCNPETVSTDYDTSDILYFEPIDFEHLRAVIEREKPDGVIVHFGGQTPLKFAKRLSAFGAKIIGTSARVIDMAEDRKKFAEFITKLGINQPKNSTATSVEEAVLKASDIGYPVLVRPSYVLGGRAMRVVNDEAELRLYMQEAVDVSDKSPVLIDQFLDNATEIDVDAICDGKDVYVAGIMEHIEEAGIHSGDSACSLPPCNIDEKMQEFIAQKTADIALNLGVVGLLNIQFALHNNELYMIEVNPRASRTIPFVSKATGIPLAKVATRVMWQGNLKEALKFYDTFKVVNFDTKILRPKTPKYMSVKEAVFPFAKLSGSDLELGPEMRSTGEVMGISKDFANSYAKSQIASFNHLPEQGVVFISLKDKDKKYTKKIAAEYVKLGFKLMATGGTCKEILESGFECELVHKISEGRPNVEDKLKNGEIHLVINTSDSHSFKGDTKKIRENIIRFKIPYFTNLRSALAGAKSIKAIQSKSCLDVKSLQEWLKS

SEQ ID NO: 54273 - protein, 325 aa, Campylobacter jejuni
MKNFSLWCDFIENSFLDNEFLNLLSHGINGATSNPAIFKNAILNSPIYKDKILKLKEKKTKDIYEELAISDIQKAADKLAPLFYQKNDGFISIEIDPRLHDNTTLSLGEAKRLYSAIGKENIMIKIPATKASYEVMYELMKNGISVNATLIFSLEQSQKCFEALNAGLVEFRKNNIALKEQNTRTPQAVISIFVSRFDRLLNPKAKEQNRIGILNANLAYNNIYSKNEPNIRALFASTGVKGDDLPKDYYIKELLFENSVNTAPLDAIEAFKGKMHFKKPLMNFEIYTELNQIISQSEREKACNDLLSDGLEQFCIAFEDILKAL

SEQ ID NO: 54274 - protein, 173 aa, Campylobacter jejuni
MSNEKLEQILQKQQTQMAGPDVDQREDDIIQLVGFVVGDEEYAIPILNIQEIIKPIEYTRVPSVPDYVLGVFNMRGNVMPLIDLAQRFHLGSSKMTPQTRYIVLRGETNGTGVGGNAGFVIDRLTEAIKIHRNRIDPPPETLVKDKGMIYGIGKRDENILTILKVEALLKREF

SEQ ID NO: 54275 - protein, 364 aa, Campylobacter jejuni
MKTFLVCALEPSANLHLKEVLKAYKKDFGEFELHGIYDESLCKEFDLNSKPLYSSHEFSAMGFIEVLPLIFKAKKAIKELANLSFTQKINGILCIDSPAFNIPFAKALKKAGSKIPRIYYILPQVWAWKKGRIPIIESHFDILASILPFDNQFFNKSTYIGHPLLDEIKEFKNQEDINHTFSKKDDEKTIAFLPGSRRSEIRRLMPIFKELSQKFKGKKILCVPSFNLEKLEVYGDISEFKIESNTPKVLKKADFAFICSGTATLEAALVGTPFVLAYKAKAIDIFIAKLFVKLKHIGLANIFCDFAGKEALNPEFLQDKVNVLNLYEAYNKYDYKAFFAKVDFLKEYLQFGSAKNLAKILNEI

SEQ ID NO: 54276 - protein, 274 aa, Campylobacter jejuni
MRKSMISFLEKKAKNEKITMVSAYDYHSARILDNSDIDIILVGDSLAMTVLGMQDTLSVTMDEMLIFTKAVSRGAKKSFVLADMPFMSYQSSDRDAILNASRFIKESHANGVKVEGGIEIASKIKLISQSGIPVVAHLGLTPQAVNMLGGYRVQGKDLQSAQKIIDDAKAVQDAGACMLVLECVPVKLAQKISSILEIPTIGIGSGKYCDGQVLVYHDLLGLNKDFKAKFVKHFDKIDPQVGVEKYRDEVKSGIFPSQEHSFDYLDDELLDKLY

SEQ ID NO: 54277 - protein, 249 aa, Campylobacter jejuni
MKKFVVFFGILLFVSCLNAQNLSIFVASSASKAMSEVKDEFLKTHPEDKIELVFGASGKYYELLKQGREFDLFFSADTKYAKAIYDDKNALIKPKVYVLGVLALYSLDENLLQGGVENLKEKANKITHLSIANPKVAPYGVAAKEVLENLGLNELLKDKIVLGENISVPVLHVDSKNSDIAIVAYSLVSSINHPKGKAVIIDAKYFSPLEQSYVITKYAKDKKLAFEFNEFIGSSKAKEIFKKYGFSTP

SEQ ID NO: 54278 - protein, 380 aa, Campylobacter jejuni
MKLEKILQDLEQNHNLRTLTPLKHENKFVYKQDHKLLNLVGNDYLYLASSKELKAEFLNTLKEQDLFFSSSSSRSLSGNFEIYEKLESFLKTKFKDKEILHFNSGYHLNISCIAALSSVSKTLFLTDKFIHASMIDGLRLGRADFFRFHHKDMNHLESLIQKHYENYENIIVLSEALFSMDGDFSDFKTLCELKRRYDKIKLYIDEAHSVGCFDEEGLGLVKKLALENEVDFLVFTFGKALASMGACIICDEKYKKFFINKARAFIYSTALPPINVAWTQFIFKKMPYFKKEREKLELLSTFFKSKLQEKNHIVLGDAYIICLLLGENKKALEISQKLQKAGFFAPAIKEPTVPKNTARIRFSLHAGLNTEELERIIELL

SEQ ID NO: 54279 - protein, 427 aa, Campylobacter jejuni
MQNQILKNLDLKHIWHPCTQMKDHETLPLIPIKKAKGVWLYDFDDKAYMDCVSSWWVNLFGHCNEKIANAIKKQVDELEHVILAGFTHEPIIKLSARLCEKVGRNFNKCFYADNGSSAIEVALKMSFHYHLNKGVKKSKFLSLSNSYHGETLGALSVGDVALYKDTYKALLLECLSTPVPQGKDYTKELEILKDILEKNASEICAFILEPLVQCAGNMHMYEARFIDEAIKLCHKFGVQVIFDEIAVGFGRTGTLFALHQCKQSPDFICLSKGITGGFMPLSVVLTRDEIYNAFYDTYESQKAFLHSHSYTGNTLACAAANAVLDIFEDENILVKNQILSEFIKKEFSRLEKFDFLGNFRTCGMISAFDILSTKYKRVGLFVFQKALEKGLLLRPLANTIYFMPPYIITKEQIVYVLESLEQIFKEF

SEQ ID NO: 54280 - protein, 178 aa, Campylobacter jejuni
MLEGIVRESIGRKAAKALKRDGYLIANIYGKGLENINAAFKVNEFIKEVRKKTTLIFDVKVGSQTLSVVVVDYQKDPVTAELKHVDLKVAQKGVISKYMVPVKITGTAIGLKNKGVLIQSKRRLKVKCAAENLPNFFELDVSKLDVGDALLVRDIVVPAGVTMIDADRVAVVGVEKAR

SEQ ID NO: 54281 - protein, 342 aa, Campylobacter jejuni
MIKLSEEQKMVYDDLSMPEKVAIFLIQLGEDATTSVFSHMEIDVITEISRYIAMAKNVDRSVATAVLEEFYTLLQSNQYIKSGGLEYAKEILFRTFGPEIANKILEKLTKSMENNQNFAYLAQIKPQQLADFITKEHPQTIALILAHMDSIHAAETLEYFSDELRAEVVIRMANLGDISPSIIKRVSAVLESKLESLTSYKVEVGGPRAVAEVLNRLGQKASKSTITYIEQSDERLAETIKELMFTFDDIQKLSTQAIREILKVADKRDLMIGLKGASEELKQKFLANMSTRASEAFLEEMGFLGAVRVKDVEDAQRKVVEVVQKLAEQGLVQTGDADEMIE

SEQ ID NO: 54282 - protein, 615 aa, Campylobacter jejuni
MSKKFAHTQEELEKLSLKELENLAASMREKIIQVVSKNGGHLSSNLGAVELSIAMHLVFDAKKDPFIFDVSHQSYTHKLLSGKEEIFDTLRQINGLSGYTKPSEGDYFVAGHSSTSISLAVGACKAIALKGEKRIPVALIGDGALSAGMAYEALNELGDSKFPCVILLNDNEMSISKPIGAISKYLSQAMATQFYQSFKKRIAKMLDILPDSATYMAKRFEESFKLITPGLLFEELGLEYIGPIDGHNLGEIISALKQAKAMQKPCVIHAQTIKGKGYALAEGKHAKWHGVGAFDIDSGESVKKSDTKKSATEIFSKNLLDLASKYENIVGVTAAMPSGTGLDKLIEKYPNRFWDVAIAEQHAVTSMAAMAKEGFKPFIAIYSTFLQRAYDQVIHDCAIMNLNVVFAMDRAGIVGEDGETHQGVFDLSFLAPLPNFTLLAPRDEQMMQNIMEYAYLHQGPIALRYPRGSFILDKEFNPCEIKLGKAQWLVKNNSEIAFLGYGQGVAKAWQVLRALQEMNNNANLIDLIFAKPLDEELLCELAKKSKIWFIFSENVKIGGIESLINNFLQKYDLHVKVVSFEYEDKFIEHGKTSEVEKNLEKDVNSLLTKVLKFYH

SEQ ID NO: 54283 - protein, 235 aa, Campylobacter jejuni
MQKQEKIIEMFNQIAPTYDKANRILSFGADVAWRKKACQRVMSLYLKKDLKIADIACGTGDMIEIWQESALKMEKNILNIKGIDPSSGMLNVAKEKFPNVEFIKAGAQNLPLESQSLDILSISYGIRNVVERQKALSEFARVLQKDGILVVLEFTKREKGGFIAACRDFYLKNILPSIGGIISKNKSAYEYLPNSIEGFLSKKEFILELKNAGFEMLDYKSFSFGVSSMFIAKKL

SEQ ID NO: 54284 - protein, 387 aa, Campylobacter jejuni
MTPTELNLKAKALLETHFDDIVLSGEISKITLHGSGHWYFDLKDERSSIACAMFKGANLKVGFKPAVGDFLELCGSVSLYPESGRYQFIATSMKKAGFGDLEAQFLALKERLQKEGLFDPRFKKSLPKFPKKVGIITSKTSAALQDMLKLIHQKEYFLAKIYIFDALTQGNNAPFSLIQALKKADDMDLDVLIIARGGGSREDLFCFNDENLAREIFKAKTPIISAIGHEIDYVISDFVADFRAPTPSAAIDTLFYSKLDIEQSLDLMEEKLMQLWNYKIQNYENLLLNLSKFFKFNSLPKIIDEKIKQSHNIEKQLNHLLANQMRYNELKLDKLQNAYLQHENFFNKSKKFICIRKNGKIANLEDLKSDDIVILSSQTSQKEAKIL

SEQ ID NO: 54285 - protein, 324 aa, Campylobacter jejuni
MLKASLKSIASYIPEKILSNADLEKMVDTTDEWITRRTGIKERRIASENENTSDLGTKAALKAIERANLKPEDIDAILVATLSPDYFTMPSTACKIASNLGLVNISAFDISAACSGFIYLLEQAKALVESGLKKNVLIIGAEKTSSIMDYNDRSICILFGDGAGAGVVSLDNENHILDVHTASNGNYGDLLMTQRSQKSSLCQTLSMQMKGNEVFKIAVNTLSNDVVEILAKNNILAQEIDLFIPHQANLRIIKAVQEKLNLSDEKCVITVQKYGNTSAASIPMAMNDAYEEGRLKKGNLILLDAFGGGFTWGSALLKFGGENF

SEQ ID NO: 54286 - protein, 198 aa, Campylobacter jejuni
MIVTKKALDFTAPAVLGNNEIVQDFNLYKNIGPKGAVVFFYPKDFTFVCPSEIIAFDKRYQEFKNRGIEVIGISGDNEFSHFAWKNTPVNQGGIGQVKFPLVADLTKQIARNFDVLYAEAVALRGSFLLDADGTVRHAVVNDLPLGRNIDEMLRMVDTMLFTNEHGEVCPAGWNKGDEGMKANPKGVAEYLGKNEAKL

SEQ ID NO: 54287 - protein, 362 aa, Campylobacter jejuni
MAGEDQEKTEEPTSKKIEDARKEGNVPKSQDAAAIVTLIIGVTITLFMMSFMGERIVNLYRYYQSFIGVEFDLRIIQAIMIKSIFEVLIILAPIVLSIMIAGVLGNIMQFGFIFTTKPIMPNLGKINPLKGLKNLFSLKKIVESIKIILKVGIVFTIAFIVLLKFMQELPRVELYTMVAQLTWLRDRAIVLAAIVIVAFLIIAVLDVFLVRFQYFKGLRMSKQEIKDEYKQMEGDPQVKGRIRRLQMEAARRRMVQDVAGADVVITNPTHYAVAIRYDTGKEQAPRVVAKGVDFLALRIKQVAYENNVVVYENPPLARELYKACDVNDLIPREMFKAVAEVLGFVYNTNNKSRLAGQVKKGN

SEQ ID NO: 54288 - protein, 879 aa, Campylobacter jejuni
MKTLTIVDTFGFFFRLYYALKGFKNSQGQASGMISGFANFIYSLKNEYKSDYIVFALDSKGKTFRSEIDPNYKQNRTPPPPELLEQIPICIKMIEKMGFISVSQEGYEADDIIASFVKTCENRDIFVRIITQDKDLYQLIKDGKTSIYSPISKNDYDEAACLEKYGVKPNQIRDFLALCGDSSDNIPGVKGIGAKGAKTLLDEFGSIEGIYENLTLVRNERSRNLLLEGKENAFLSKKLASLYDNLEVQNLIEKATYPDEEPLLKILEILEHYELNTLLKKLRQNPDNKDKNLGFKATLVQDENKLFEILNTLDKESIIAFDTETTGLDTKEAKIVGFSFCMNENEAFYVPLTHNYLGVGEQISLQSAKKAIEVIFNHFVIGHNLKYDFKIIQNNFDLNLPQKYADTMILAWLKNPSLRVNMDDLALRLFNYETLHFESLVKKGENFASVELEKACKYAAEDAYITLRFYLYFLKNLETPLLELAKNCEFDFIKIIMMMEENGIKLDTNALEILMKKFENEIKNLSEEIYTLCEDRFNLNSPKQMGDILFEKLKLPSGKKGKTGYSTDEKVLNILLDKHPVIAKILDYRELAKLYSTYCEPLLKLALKDKNSRIYSSFLQTGTATGRLSSKDPNLQNIPAHGQYAKDYKSCFVAKDGFSFISLDYSQIELRILAHFSEDEKLLNAFANDEDIHARTAIMIFGESNYETRSVAKSINFGLIYGMGYKTLSQNLKIEANLAKSYIEKYFENFTSIKKYFEKVKNEAKQNGFIVTLSGRKRYFDFENAKPMQIAMYERESINSILQGSAADVIKLAMLEINKELNEDKKLILQIHDELIFEVKDDLCENFVKKTRDIMENIVKLKVKLKTSSSIAKNWGDLK

SEQ ID NO: 54289 - protein, 335 aa, Campylobacter jejuni
MRLILDTDIGNAIAGANTDDGLALALILSSKEIKLEMLSTVCGNVPSLVAYSVAKDLFQRLNLNIPVYLGANEALKEPSKAWRQRLDESVKNFKLEYLWENIKSPEILENINPDAIFKMGELVSKNPKEISICAIGPLTNIAMTMKIFKDFDINLKELFIMGGSFDMPYYTKDTNFGFDPEAASIVLNSRAKITLIPYNATMQTLLTHEDLKELQGKNILCDFIVETLGVWIDYASKTRGTKGTWIHDALTIACALDSSIADFDECYADVICDSSLARGMSWRCFREPKMSMGVDLSTKNCVKILKNVDNARLLKLIKERLLKGVCYENYESITT

SEQ ID NO: 54290 - protein, 941 aa, Campylobacter jejuni
MNDTIKIIGARENNLKNIHLEIPKNKLIVFTGLSGSGKSTLAFGTLYAEGQRRYIESLSAYARQFLDKVGKPDVDKIEGLTPAIAIDQKTTSKNPRSTVGTITEIYDYLRLLYARVGIQHCHRCGQKISSMSVSDIVSEILKFPKGAKIIIYSPLIREKKGTYADLLENLRNKGYVRAQIDGVLVRLDEEIELAKTKKHTIKLVIDRLEIQEDLLSRLASDIEKGLQESFGEIEIEVLNHEEINLNKHYHFSEHSACFDCKISFVPLEPLSFSFNSPKGACEACDGLGIRYTLDMKKIIDENLSLENGAVKIMYGFNKSYYYKFLIAFCEQNEIPIKIPFMQLNEVQKRLVLYGNAKTIEFLWKRNRLKRTFEGVVKMAYEMLKDEKDLAEYMSEKICKDCGGHRLKPESLAVKVAKKSLGEILDMSIEDSTAFFADEKNFSYLSEQQKLISKPILKEINERLFFLYDVGLGYLSLGRDARTISGGEAQRIRIASQIGSGLSGVMYVLDEPSIGLHERDTAKLIKTLRNLQQKGNTLIVVEHDKMTIEEADFIVDIGPKAGKFGGEVVFSGTYKELLKSKSETALYMNGKKQISQLQNRTQKEWLELKNVNINNIQDLSVKFPLQNLVAITGVSGSGKSSLILQTLLPFAQEELNRAKKVKKLGGVQIEGLEKLDKVIYLDQSPIGRTPRSNPATYTGAMDEIRNLFAATKEAKMRGYKAGRFSFNVKGGRCEKCSGDGEIKIEMHFLPDVMVVCDTCGGKRYNDATLEIKYKGKNISEILNMSVLEASEFFTAVPKIKQKLDTLVKVGLDYLTLGQNATTLSGGEAQRIKLAKELSRSDTGKTLYILDEPTTGLHFEDVNKLILVLQHLVDLKNSVFVIEHNLDVIKNADYIIDMGPEGGVKGGKVISTGSVEKVAKEHKKTRSYTGYYLDLELKNTQKS

SEQ ID NO: 54291 - protein, 533 aa, Campylobacter jejuni
MILLIDNYDSFVFNVKSMLEQLSNDEILVRRNDAISLSEIKNLNPTHIILSPGPKHPSQSGICLEIFKARLNIPVLGICLGHQALALAFDSLVVKMQEPMHAKNSLIKQCRENELFSNLPSNFSVMRYHSLEVKQLSDELEILALDEKGVIMALGHKNLPYYGVQFHPESYFSEYGLQLFSNFLKQDIKKPQKQENPLSFYLQKMSENHFLQSDDFEQICKIIMSKDYEILQVVALLILITEKSLNEKSLSAFVRQILRYSQTFSDESEMIDICGTGGDGFKSINVSTTSAFILAALGVKVAKHGNRAISSSSGSTDVLEALNITTPNTLESVLKQLNNQGLSFLHAPFFHPLVGELKEIRSRLGVRTVFNVLGPLLHPNLKLKYQLMGNYHAPVHRLLIEVLKNLGRKKALVVRGNDGMDELSICDESKIYELCEGEILEYSICPEQFGFKRAFHSEIIGSSAYDNAKDLKDILSGRMQGAKFDLVVLNAMFALYTANKASSPLVAKDMILEAIYSGKVIEYFKEYQAYAKA

SEQ ID NO: 54292 - protein, 392 aa, Campylobacter jejuni
MKKAYYGDFGGQFLPESAMFALNELEGAFLKFSKDKLFKKELNELLKTYVGRPTPLYFARNLSKKYQHEIYLKREDLNHTGAHKINNAIAQALLAKKMGKKKIIAETGAGQHGLATATAAALLGLECEIYMGATDVQRQALNVYKMELLGAKIHAVQSGLKTLKEATTAAIQAWVGDIKNIFYVVGSAVGPYPYPKMVMHFQSIIGKECKMQLQKLNKKVDYIIAAVGGGSNAAGIFYDFIKDENVKLIGIEAGGLGIDTPYHAATLNKGKTGIIHGMKTKVLQDDLGNILPVHSVSAGLDYPGIGPLHAFLFESKRAQYHAISDEECMQALKLLCKEEGIIAAIESSHALAFLEKLCPTLKKKSVIVVNLSGRGDKDMQMIRDYKKGVIYG

SEQ ID NO: 54293 - protein, 81 aa, Campylobacter jejuni
MSLLITKDCVCCDACREECPDEAIYENSPIYVIDPDLCSECVNDFSEPACIVACPYECIIPDPDNVETIEELKLKHRDREF

SEQ ID NO: 54294 - protein, 202 aa, Campylobacter jejuni
MENLIIYAFIYLLGSIPFGLILAKFFAKTDIKKEGSKSIGATNVLRVVKEKNPKLAKKLAIATIILDFAKAAIPLLTLKFLHYDQALLWSVAVLAILGHCFSIYLLFEGGKGIATGAGAMIVLLPLEVLTAFIVWVVIGKIFKISSLASLAALLAFVVSSFIFNYDLEIHTHAPVFIIAFIIVYKHLPNIKRLIFKEECKVI

SEQ ID NO: 54295 - protein, 445 aa, Campylobacter jejuni
MKLFGTDGVRGKAGEFLDSFLAMRLAMAAGIYFKDKSITNNILVGKDTRRSGYMIENAIVSGLTSIGYNVIQIGPMPTPAIAFLTEDMRCDAGIMISASHNPYYDNGIKFFDAHGNKLSEDIEKKIEEIYFDDKLIQASKVDMEKIGQAKRIDDVIGRYIVSIKNSFPKDLTLKSLRVVLDVAHGAAYKVAPTVFKELGAEVIVMSDKPNGLNINENCGALHPANLAAEVKRLRADVGFAFDGDADRLVVVDEKGEVANGDSLLGVLALYLKEQGKLQSSVVATIMSNGALKEFLNKHGIELDTCNVGDKYVLEKLKANGGNFGGEQSGHIIFSDYAKTGDGLIAALQFSALMLSKKKSASSILGQVKPYPQLLTNLKIAEKKDLDKIKGLKELKKDLENKNINTLFRYSGTENLIRLLLEARDIKLLEKEMKNVVEFFKKALNG

SEQ ID NO: 54296 - protein, 1040 aa, Campylobacter jejuni
MFSKFFIERPVFASVVAIIISLAGAIGLTNLPIEQYPSLTPPTVKVSATYTGADAQTIASTVASPIEDAINGADNMIYMDSTSSSSGTMSLTVYFDIGTDPDQATIDVNNRISAATAKMPDAVKKLGVTVRKTSSTTLAAISMYSSDGSMSAVDVYNYITLNVLDELKRVPGVGDANAIGNRNYSLRIWLKPDLLNKFGITATDVISAVNDQNAQYATGKIGEEPVTQKSPYVYSITMQGRLQNPSEFENIILRTNNDGSFLRLKDVADVEIGSQQYSSQGRLNGNDAVPIMINLQSGANALHTAELVQAKMQELSKNFPKGLTYKIPYDTTKFVIESIKEVVKTFVEALILVIIVMYMFLKNFRATLIPMIAVPVSLLGTFAGLYVLGFSINLLTLFALILAIGIVVDDAIIVVENIDRILHENEQISVKDAAIQAMQEVSSPVISIVLVLCAVFVPVSFISGFVGEIQRQFALTLAISVTISGFVALTLTPSLCALFLRRNEGEPFKFVKKFNDFFDWSTSVFSAGVAYILKRTIRFVLIFCIMLGAIFYLYKAVPSSLVPEEDQGLMIGIINLPSASALHRTISEVDHISQEVLKTNGVKDAMAMIGFDLFTSSLKENAAAMFIGLKDWKDRNVSADEIAMELNKKFAFDRNASSIFIGLPPIPGLSITGGFEMYVQNKSGKSYDEIQKDVNKLVAVANQRKELSRVRTTLDTTFPQYKLIIDRDKLKHYNLNMQDVFNTMNATIGTYYVNDFSMLGKNFQVNIRAKGDFRNTQDALKNIFVRSNDGKMIPLDSFLTLQRSSGPDDVKRFNLFPAAQVQGQPAPGYTSGQAIEAIAQVAKETLGDDYSIAWSGSAYQEVSSKGTASYAFALGMIFVFLILAAQYERWLIPLAVVTAVPFAVFGSFLLVYLRGFSNDIYFQTGLLLLIGLSAKNAILIVEFAMEERFKKGKGVFEAAVAAAKLRFRPIIMTSLAFTFGVLPMIFATGAGSASRHSLGTGLIGGMIAASTLAIFFVPLFFYLLENFNEWLDKKRGKVHE

SEQ ID NO: 54297 - protein, 367 aa, Campylobacter jejuni
MKLFQKNTILALGVVLLLTACSKEEAPKIQMPPQPVTTMSAKSEDLPLSFTYPAKLVSDYDVIIKPQVSGVIENKLFKAGDKVKKGQTLFIIEQDKFKASVDSAYGQALMAKATFENASKDFNRSKALFSKSAISQKEYDSSLATFNNSKASLASARAQLANARIDLDHTEIKAPFDGTIGDALVNIGDYVSASTTELVRVTNLNPIYADFFISDTDKLNLVRNTQNGKWDLDSIHANLNLNGETVQGKLYFIDSVIDANSGTVKAKAIFDNNNSTLLPGAFATITSEGFIQKNGFKVPQIAVKQNQNDVYVLLVKNGKVEKSSVHISYQNNEYAIIDKGLQNGDKIILDNFKKIQVGSEVKEIGAQ

SEQ ID NO: 54298 - protein, 210 aa, Campylobacter jejuni
MNSNRTPSQKVLARQEKIKAVALELFLTKGYQETSLSDIIKLSGGSYSNIYDGFKSKEGLFFEILDDICKKHFHLIYSKTQEIENGTLKEILTSFGLAFIEIFNQPEAVAFGKIIYSQVYDKDRHLANWIENNQQNFSYNILMGFFKQQNNSYMKKNAEKLAVLFCTMLKEPYHHLNVLINAPLKNKKEQKEHVEFVVNVFLNGINSSKA

SEQ ID NO: 54299 - protein, 70 aa, Campylobacter jejuni
MPGIKVHPNESFDEAYRKFKKQVDRNLVVTEVRARRFFEPMTEIRKKQKISARKKMLKRLYMLRRYESRL

SEQ ID NO: 54300 - protein, 179 aa, Campylobacter jejuni
MQTKYFKFLAYFSFIISLIYGFYHIIKAFDFVKEAYIYTGIFALIFLNLSLLFSLLKFKKTKNYPKILGIFAAFWAILHFLNYFIFDRNAQILRLFDDISHRLLEAIGFIAFLIIFLMLLSSFKIFKKLSKIRKLGYLCLILASYHYFLTPKIPMFWEWSALIIALFYFIVRYTKTLKS

SEQ ID NO: 54301 - protein, 132 aa, Campylobacter jejuni
MATRHQVRQSVISLLYAFELNSQNNVFVDEILDEKKIRNEQKNFTLNLYNGILDNLNNIDETLNSFLNDNQITALGHVERAILRLGAYELLFTDTPSAIVINEAIELAKELANDNSPKFINGVLDALIKAKK

SEQ ID NO: 54302 - protein, 154 aa, Campylobacter jejuni
MNIIEGKLNLDSNTKIAIINARFNHIITDRLVEGAKDAFLRHGGKEENLSLILVPGAFELPYALKKAIESKKFDAICCVGAVIRGSTPHFDYVSAETTKGIANVSLNHNIPVSFGVLTTDTIEQAIERAGSKAGNKGFEAMTTVIEMLNLSKEL

SEQ ID NO: 54303 - protein, 271 aa, Campylobacter jejuni
MKKMILIAGPCVIESKDLIFKVAEQLKNFNENPNIEFYFKSSFDKANRTSINSFRGPGLEEGLKILQSVKDEFGMKILTDIHESNQANPVSEVADVLQIPAFLCRQTDLLVAAAKTKAKINIKKGQFLNPSDIKYSVKKVLQTRGIEDEGYEAAQRNGVFVAERGASFGYGNLVVDMRSLVIMREFAPVIFDATHSVQMPGAAGGSSGGKSEFVEPLARAAAAVGIDGFFFETHINPCEALCDGPNMLNLTRLKNCVNTLLEIQNIIKENK

SEQ ID NO: 54304 - protein, 460 aa, Campylobacter jejuni
MQSIILIGKPNVGKSSLFNRMARQRIAITSDISGTTRDTNKTQIHIHSKKAMLIDSGGLDESDELFKNVKKNTLKVAKESDIILYLVDGKLAPDDEDRQFFYSLKKLGKPIALVINKVDNKKDEERAWEFANFGVKEIFNLSVTHNVGLDELYEWLEKFLHEEFLIPDEEENLEDFLEYYEEGKEFQFKEVDQNHIRVGIVGRVNVGKSSLLNALVKQERSVVSSIAGTTIDPVNESVVHKDKVIEFVDTAGIRKRGKIQGLERFALNRTEKILSHSQIALLVLDAHEGFNELDERIAGLVAKHYLGVIIVLNKWDKSEMDFDKTVKELRLDRFKFLAYAPVISVSALSGKRVHVLLDKILQIFENFTQKIQTSKLNTLIENATRAHPLPHDYGKLVKIYYAVQYDLAPPKIALIMNRPKALHFSYKRYLQNQIRKEFNFEGVPLVIASRKKGSKENDES

SEQ ID NO: 54305 - protein, 319 aa, Campylobacter jejuni
MRVLTGLQPSGDLHIGNYFGAIKQMVDAQEKSQMFMFIANYHAMTSSQDGEKLKQNSLKAAAAFLSLGIDPQKSVFWLQSDVKEVMELYWILSQFTPMGLLERAHSYKDKVAKGLSASHGLFSYPVLMAADILLFDTRIVPVGKDQIQHVEIARDIALKVNNEWGEIFTLPEARVNEEVAVVVGTDGAKMSKSYQNTIDIFSSEKTLKKQISSIVTDSTALEDPKDHENCNIFKIAKLFLDESGQKELQIRYEKGGEGYGHFKIYLNELVNAYFKEAREKYNELLEKPSHLKEILDFGATKARKIAQEKMQKIYEKIGL

SEQ ID NO: 54306 - protein, 411 aa, Campylobacter jejuni
MLDLKNLQNNFDEVAKKLKNKKVDENILKKLAELFASLKKEKIALEEFQAFQNKFSKELATAEDKESLKAKLSENKSKINEQSAKVNALENELEEIAHAIPNIPDECVPVGEDENENVELKKVLNPPSFDFTPKEHFELGESLNWLDFMRGVKISQSRFCVLKNEGALLSRALVNYMIDFNRSRGFEFVNVPFLVNGATMFGTGQLPKFKEDMYKVDDEDLYLISTSEIPVTNLYSGEILASETLPIKMTCYSACFRKEAGSAGRDTRGIIRQHQFEKVELVSITKPEQSDSVFNEMLECASDLLSSLGLAHRHLMLCTGDLGFSAAKTVDLEVWLPGQNKYREISSVSNCRDFQARRAKIRYKNEQGKNELVHTLNGSSLAVGRTLVAIMENYQDKEGKIHIPDVLKKYF

SEQ ID NO: 54307 - protein, 480 aa, Campylobacter jejuni
MLKKTKIVATVGPASEKEEILRQMIINGVNVFRLNFSHGTHEYHKKNLDTIRRVAKELHTRIGILQDISGPKIRTGELKEPFELKKGDRLDFYRETILGEKIAQNHYKISINQKSILDMLKIDEYIYLYDGSIRAKVVNIDNQKIETIIENDGFLNSNKGINFPNTKINIDVITQKDKNDLLWGIKNEVDFLAISFVQNAHDIDEVREILAQNNAKISIFAKIEKFDAVENIDEIIKSSDGIMVARGDLGIEVPYYKVPNIQKEIIQKANNASKPVITATQMLFSLAKSKTATRAEISDVANAVLDGTDAVMLSEESAVGIDPANAVDIMCQTIIETEKRYPYNKFNDFNDLDNTDKIMRSSAHLATDLNADAIFSLTSSGKSAIKIARYRPNIEIIAVGHSEKTLNSLSIVWGVNPAILVNKSNELTELLKDSVRSSVEKGFMDEDKCYLLTAGFPTGVEGTSNLIRILNKEQIAYYLQ

SEQ ID NO: 54308 - protein, 448 aa, Campylobacter jejuni
MSQQEFDVLVIGAGISGAALFYELARYTNIKNIALIEKYNTAATLNSKGTSNSQTIHCGDIETNYTLEKARKVKRTADMIVKYGLMQNAQNNFMFSHQKMALAVGDIECDYMKKRYEEFKELYPYIKFFDKAKIKQIEPKVVLGEDCNQDRPENICAMGVESGEVFTTVDFGKMSINLIEQAQKQNKNTFVAFNQEIIHIEKKDDIFILKTSNHQEYHAKSVVVNAGAHSLYLAHKMNLGMDKSCWPVAGSFYLTKQKLLNGKVYMVQNPKLPFAALHGDPDLLADMNTRFGPTALVIPKLERYHGLKSVPEFFEALKLDKTVLKVTFNMFKDATIRNYIFYNYLFELPFVDKSLFVKDAKKIVPSLKASDIYYAKGFGGVRPQVIDKTKGELMLGEASITETPGIIFNMTPSPGATSCLGNAERDAKLVCNYLGMEFNEDKFSSELL

SEQ ID NO: 54309 - protein, 501 aa, Campylobacter jejuni
MFDNILEQQRIEKAKELKNLGINPYPHFLEKEMSLKTFKDKFSYILEQVEKRDESVNAVVAGRLKLLRIAGKSIFANIEDEDTNLQIYFSKDSVGEELYTILKKNLEVGDIVLVKGFPFVTKTGEFSLHASEVKLATKAIVPLPEKYHGLTDIEQRYRKRYVDMIMNVEVRKDFLVRSKVVSLIRHFFENKGFLEVETPMMHPIAGGANAKPFVTFHNSLGVERFLRIAPELYLKRLIVGGFEAVFEINRCFRNEGMDLTHNPEFTTIEFYWAYHNYKDLMDLTEELFALLLDKLNLGKTIEFDGKMINFSKPFERITYKDALCKYGGLDRDLIEDKEKILTKLKADGFEANEKLELGHLQAELFDNYVEEKLINPTFVIDFPISISPLSRRSDEDSQIAERFELFICGRELANGFNELNDPLDQYERFLKQIEAKNAGDEEACEMDEDFVNALGYGMPPTAGQGIGIDRLVMLLTNKKSIRDVILFPAMRPLKSELKEKE

SEQ ID NO: 54310 - protein, 414 aa, Campylobacter jejuni
MSLEMFDKEIFDLTNKELERQCEGLEMIASENFTLPEVMEVMGSILTNKYAEGYPGKRYYGGCEFVDEIETLAIERCKKLFNCKFANVQPNSGSQANQGVYAALINPGDKILGMDLSHGGHLTHGAKVSSSGKMYESCFYGVELDGRIDYEKVREIAKKEKPKLIVCGASAYARVIDFAKFREIADEIGAYLFADIAHIAGLVVAGEHPSPFPYAHVVSSTTHKTLRGPRGGIIMTNDEELAKKINSAIFPGIQGGPLMHVIAAKAVGFKFNLSDEWKVYAKQVRTNAQVLANVLMDRKFKLVSDGTDNHLVLMSFLDREFSGKDADLALGNAGITANKNTVPGEIRSPFITSGLRLGTPALTARGFKEKEMEIVSNYIADILDDVNNEKLQENIKQELKKLASNFIIYERAMF

SEQ ID NO: 54311 - protein, 278 aa, Campylobacter jejuni
MENQKNEFDDIILEKSNKSEKVKKILLRVIALVILFLAIMIVMKLINGSGDENTQNQSVLPSEPIATQDNNNDTSFESMPITDNTSAEDQFEALRKQFQDEQNTTQNTTTSSSNNNDTTNFAMPDQEVPAEPTATTSANTTPQASTPKQEVTQTAKSKEEAKKQTAVKKEKESAKQTPKKEQNANDLFKNVDAKPVHPSGLASGIYVQIFSVSNLDQKSKELASVKQKGYDYKLYKTTVGSKEITKVLIGPFEKADIAAELAKIRKDIAKDAFSFTLK

SEQ ID NO: 54312 - protein, 262 aa, Campylobacter jejuni
MKFLAVIGDPISHSKSPRMHNNAIKALGLDSIYTRYHLRNANCLREDFFKLGLSGANITLPFKEKALDIADVKDDFARNIGSANTLCLKEDKIYAYNTDALGFLEAIKDFDNIKKALILGAGGTALALAYVLKQKGVEVYIANRSKERFKDFLAYPTYLYKNLQDFDFDLVINSTSAGLKDENLPCDRELLDRILPKAKFAFEVIYGRETPFYRLCKEYHLKIKDGLDMLLWQGVFAFELFFEIQDKREMIKNAMQQALILK

SEQ ID NO: 54313 - protein, 234 aa, Campylobacter jejuni
MRIFLTLFLFFNSLFALSELEEGLKLYEANKFDKAYEIFKSLCEKDISKACFSLAFMHESARGVSKDLNQAYKFYDKACKLGLANACSNMALLLQNQGYENEALLAFNKACTLGESLSCNNIALFYEKEKDGQMASSFYKRSCDLKNARACYQLGSLYDKGELVKASVKSALAFYSKSCTLGFGEACYLLGRYNQLEKQDLTKAKRYFGMACDQKHQEACAAYKELNSKDIELY

SEQ ID NO: 54314 - protein, 573 aa, Campylobacter jejuni
MAEVLKKVDVVTVGAGWTGGIVAAELTKAGLNVLSLERGHMQSTENFNYIHDEWRYGINYGLMQDCSKDTVTFRHDPSGLALPYRKMGSFLLGNNVGGAGVHWNGWTFRFMPYDFEIQTLSKQRYGNKLGNDYTLQDWGVTYKDMEPYYDRFEKTCGVSGEPNPLAEKMGAFRSSPYPQEPLENTKMLKRFESAAKSSNLHTYRLPASNSKGGYTNPDGQDLAPCQYCAYCERFGCEYGAKASPLNTVIPKAMSTGKYTIRTYSNVTQILKKDGKVTGVKFVDTRTMKEYIQPADIVVLTSYMFNNAKLLMVSNIGEQYDPKTGKGTLGRNYCYQMNMGTTAFFDEQFNTFMGSGALGTTSDDFNGDNFDHSKEKFLHGAMIYSVQLGTRPIQSAPLPAGAPTWGAEFKKALNYNFTRAITVGGQGASLPHKNNYLSLDPTYKDAFGMPLLRLTYNFTDQDRALHKFITDKTAEVAKRMQGVKSIKKGAYLKDYSVVPYQSTHNTGGTTMGADRETSVVNTYLQHWDADNLFVVGAGNFQHNSGYNPTDTVGALAYRCAEGILKYHKSGKSLA

SEQ ID NO: 54315 - protein, 190 aa, Campylobacter jejuni
MKKVLLSSLVAVSLLSTGLFAKEYTLDKAHTDVGFKIKHLQISNVKGNFKDYSAVIDFDPASAEFKKLDVTIKIASVNTENQTRDNHLQQDDFFKAKKYPDMTFTMKKYEKIDNEKGKMTGTLTIAGVSKDIVLDAEIGGVAKGKDGKEKIGFSLNGKIKRSDFKFATSTSTITLSDDINLNIEVEANEK

SEQ ID NO: 54316 - protein, 525 aa, Campylobacter jejuni
MVEVKNLTMRFANQLLFENVNLKLVRGQRYGLIGANGAGKSTFLKILSGEIESSSGEIVFDEGLKIAVLGQDQFAFENYTIKDAVMCANKRLYEALKEKEKLYMSEEFTDEINERLGELEIITAEEDPNYDCETRCEKILSSLKIKDFDALMSTLQSADKFKVLLAQVLFLGADALFLDEPTNNLDLEAISWLENELLRHEGTLVVISHDRHFLNKICTRILDVDFKQIRDFAGNYDDWYMASTLLAKQAELKRDKTLKEREELENFIRRFSANASKAKQATSRAKALEKLELEEIKISSRRDPSIVFRTNREIGNEVLEIKGIGKAYDKQLFSNLELKIEKNDKIALIGANGVGKSTLAKIIAHAISPDSGSIHLGATIELGYFPQDTSNLICENLKLYEWLMSEKFKDLDEIRKCLGRMLFSGSDQEKMAASLSGGEKHRLMLSRLMLERPNFLLLDEPDNHLDLESIIALGEALYNFKGVVLCISHDRELVSAFANRIWHLENGKLTDFRGTYQEFLGENDG

SEQ ID NO: 54317 - protein, 408 aa, Campylobacter jejuni
MEKIKNYKLIIILLSLDLLALLYGTSTLSISADEADIYFGEQGKSLIFSHSLLYYISHFGTFIFGQNDFGLRLPFLFFHFLSCLLLYLLALKYTKTKIDAFFSLLLFVLLPGTVASALLVNAASLVIFLTLAILCAYEYEKKWLFYILLIIVLFVDKSFNILFLTFFFFGIYKRNAILFTLSLVLFGASISFYGFDTGGRPRGYFLDTLGIFAACFSPLVFVYFFYTIYRLTFQKYKNLLWFLMSVTFVFCLLLSLRQKLFLDDFLPFCVICTPLLIKTLMQSYRVRLLVFRLRYKIFIECSIIFLIFCYFLIVANQLLYYFINNPNRHFANNYHFAKELALELKKQDVLELATAPSLQKRLRFYGIKNSNKFYLKALKQADKHDMDKKIVKVKLGKYEKVYQILNYD

SEQ ID NO: 54318 - protein, 402 aa, Campylobacter jejuni
MKISLFGYGKTTRAIAENLVDKFGPFDIYDDHFTETKKDTLGNLLLNPNDFDDNLSDIEIPSPGFPPKHKLIQKAKNLQSEYDFFYDIMPKSVWISGTNGKTTTTQMATHLLSHIGAVMGGNVGTPLAELNPYAKLWILETSSFTLHYTHKAKPEIYALLPISPDHLSWHGSFDNYVQDKLSVLKRMNECDVVILPKIYANTPTKAHKISYEDEKDLAVKFGIDTEKISFKSPFLLDAIMALAIEKILLDTLSYKLLNSFVMEKNKLEELKDSQNRLWVNDTKATNESAVMAALSRYKDKKIHLIIGGDDKGVDLSNLFDFMKGFDIELYAIGISTEKMLDYAKKANLKAYKCEVLSKAVNEISNHLRVNEVALLSPACASLDQFNSYAERGKVFKECVNKI

SEQ ID NO: 54319 - protein, 353 aa, Campylobacter jejuni
MYYLSDLSHYAFFTYISVRAGFAFFIALCLSLFLMPKFITWAKAKNASQPIYEYAPETHKTKCHTPTMGGLIFISSAVIASLFCIKFDNIFAISALLCLILFCLIGLIDDLGKVLKKDNHSGLSPRMKLLAQIIAGLICILPLYFSSELSTELFIPFYKHPLFDMEIFAIAFWILVLISSSNAVNLTDGLDGLATVPGIFSLSTLGIFLYLSGNLNYSEYLLLPKIQGLGEVVIICAALIGALMGFLWYNCYPAQVFMGDSGSLALGGFIGFLAVISKNEILLLLIGFVFVLETVSVILQVGSFKIFNKRVFKMAPIHHHFEKVGWVENKIIVRFWMIALLSNLLALASIKLR

SEQ ID NO: 54320 - protein, 247 aa, Campylobacter jejuni
MKFSGKNVLITGASKGIGASIAKTLAGFGLKVWINYRSKPELADALKDEIIASGGVAAVIKFDASKEDEFENGVKTIVESDGELSYLVNNAGVTNDKLALRMKLEDFSGVVDTNLSSAFLGCREALKTMSKKRFGAVVNIASIVGEMGNAGQVNYSASKGGMIAMTKSFAKEGASRNLRFNCVTPGFIKSDMTEVLSNEIKQTYQDNIPLKRFAEPEEVANCVAFLLSDYASYVTGDVLKINGGLYM

SEQ ID NO: 54321 - protein, 222 aa, Campylobacter jejuni
MMLFSNLIKENQKIWNAYLHHDFVKKLEDKSLKQENFLFYLKQDYIYLLNYAKCYARLALNSNTAKELRFAMKFQNYIVEGEMELHRAILSLGINADELDIKDESLVNIAYSRYMLSVGENGDFLDMLVALSACAIGYAKIGAEIINRLKNENLKDHPYKEWILTYGSENFQNEAKEFEDFVNSYTSSVGAQKFQKLSEIFHTVTRLEVAFWEHSLRMELNL

SEQ ID NO: 54322 - protein, 77 aa, Campylobacter jejuni
MATFDDVKAVVVEQLSIDADAVKMESKIIEDLGADSLDVVELIMALEEKFEVEIPDSDAEKLIKIEDVVNYIDNLKK

SEQ ID NO: 54323 - protein, 404 aa, Campylobacter jejuni
MKRVVVTGIGMINALGLDKESSFKAICNGESGVNKITLFDATDFPVQIAAEVKNFDPLEVVDGKEVKKIDRFIQLGIKAAREAMQDAGFSEELDKEEFGIVSASGIGGLPNIEKNSIICSERGPRKISPFFIPSALVNMLGGLISIEHGLKGPNISCVTACAAGTHAIGEAYKSIALGNAKKMLVIGAEAAICPVGIGGFASMKALSTRNEDPQHASRPFDKERDGFVMGEGAGALVFEEYEEAKKRGATIYAELIGFGESADAHHITSPTLDGPLRAMKKALNMAGNPKVDYINAHGTSTPVNDKNETAAIKELFGNNIPLISSTKGQTGHCLGAAGAIEAVVSVMVLRDGVVPPTINQLVKDDECDLDYIPNISRKVDLKVVMSNSFGFGGTNGCVVFKKVD

SEQ ID NO: 54324 - protein, 312 aa, Campylobacter jejuni
MASYLDFEKNIQQIDEDIINAQIKGDTEAVSILKKNLEKEISKTYKNLSDFQRLQLARHPDRPYALDYIELILNDAHEIHGDRAFRDDPAIVCFMGYLGEKKIIVIGEQKGRGTKDKIARNFGMPHPEGYRKALRVAGLAEKFQIPILFLIDTPGAYPGIGAEERGQSEAIARNLYELSDLKIPTIAIVIGEGGSGGALAIGVADKLAMMKNSVFSVISPEGCAAILWNDPAKSEAATKAMKVTADDLKSQGLIDDVIDEPTNGAHRNKEAAAVAIADYVKKSLNELENIDVRELSANRMQKILKLGAYQEA

SEQ ID NO: 54325 - protein, 64 aa, Campylobacter jejuni
MARVCQITGKGPMVGNNVSHANNKTKRRFLPNLRTVRVTLEDGTTRKMRIAASTLRTLKKQNSK

SEQ ID NO: 54326 - protein, 362 aa, Campylobacter jejuni
MEKIADIIESIANEKNLNLENVREKVATALINTAKRIYGQEYEFFVDPKNLNLYQKITIVADNDERLQNKSESFIALSKAKSEAPDVEIGDELTYECSLENLGRTAVNTLHKELEYHIQKLLEQTIFEKYKNKVGQMVFGTVVRVDNEENTFIEIDELRAFLPRKNRIKGEKFKIGDVVKAVIRRVYTDKGIKIELSRTSPKFLECLLEAEVPEIKDGYVNIIGCARIPGERAKIILQANGTNIDPVGATVGVKGVRINAVSKELHNENIDCIEFTNESEILISRALAPAIVNSVKIEDKKAIVSLNSEQKSKAIGKNGINIRLASMLSGYEIELNELSSSQLNNAISNEEAMKNLQDLFKI

SEQ ID NO: 54327 - protein, 127 aa, Campylobacter jejuni
MKFETINQESIAKLMEIFYEKVRKDKDLGPIFNNAIGTSDEEWKEHKAKIGNFWAGMLLGEGDYNGQPLKKHLDLPPFPQEFFEIWLKLFEESLNIVYNEEMKNVILQRAQMIASHFQNMLYKYGGH

SEQ ID NO: 54328 - protein, 399 aa, Campylobacter jejuni
MAKEKFSRNKPHVNIGTIGHVDHGKTTLTAAISAVLSRRGLAELKDYDNIDNAPEEKERGITIATSHIEYETDNRHYAHVDCPGHADYVKNMITGAAQMDGAILVVSAADGPMPQTREHILLSRQVGVPYIVVFMNKADMVDDAELLELVEMEIRELLSSYDFPGDDTPIISGSALKALEEAKAGQDGEWSAKIMDLMAAVDSYIPTPTRDTEKDFLMPIEDVFSISGRGTVVTGRIEKGVVKVGDTIEIVGIKDTQTTTVTGVEMFRKEMDQGEAGDNVGVLLRGTKKEEVIRGMVLAKPKSITPHTDFEAEVYILNKDEGGRHTPFFNNYRPQFYVRTTDVTGSIKLADGVEMVMPGENVRITVSLIAPVALEEGTRFAIREGGKTVGSGVVSKIIK

SEQ ID NO: 54329 - protein, 52 aa, Campylobacter jejuni
MRIKVGLKCEECGDINYSTYKNSKNTTEKLELKKYCPRLKKHTLHKEVKLKS

SEQ ID NO: 54330 - protein, 177 aa, Campylobacter jejuni
MSTHKWYAIQTYAGSEMAVKRAIENLVKDNGIEEQLKEIVVPTEDVIEFKNGKEKISERSLYSGYVFALLDLNTELWHRIQSLPKVGRFIGESKKPTPLTEKDINLILEKVHNRAAPKPKISFEEGENVRITEGPFANFTAIVEEYDMVRGLLKLNVSIFGRSTPVEILYSQVEKII

SEQ ID NO: 54331 - protein, 141 aa, Campylobacter jejuni
MAKKVVGEIKLQIAATKANPSPPVGPALGQQGVNIMEFCKAFNERTKDMAGFNIPVVITVYADKSFTFITKQPPATDLIKKAAGISKGTDNPLKNKVGKLTRAQVLEIVDKKIADLNTKDRDQAAKIIAGSARSMGVEIVD

SEQ ID NO: 54332 - protein, 233 aa, Campylobacter jejuni
MAKIAKRLKELSQKIDSNKEYALSDAIDTIKTLKSAKFDETVEIALKLNVDPRHADQMVRGSVVLPAGTGKKVRVAVIAKDAKADEAKNAGADIVGSDDLVEEIQKGNMNFDVLIATPNLMGLVGKVGRILGPKGLMPNPKTGTVTMDVAQAVNNAKSGQVNFRVDKQGNIHAGLGKVSFSKEQLWDNVSTFVKAINKHKPAAAKGRYIKNAALSLTMSPSVKLETQELLDMK

SEQ ID NO: 54333 - protein, 159 aa, Campylobacter jejuni
MTRSEKVEIIAKLEEGFKASEAIVVCNYRGLSTKKLEELRNNARENNVKVQIVKNTLANIALNNSGKTGLVLKDTNIYLWGEDQLSVSKVAAKFEENNDKFEIKTAHIEGEVADVAKVKALAKMPSRNELLAMLLQVWNAPITNFTIGLNALKNKKESE

SEQ ID NO: 54334 - protein, 125 aa, Campylobacter jejuni
MAISKEDVLEYISNLSVLELSELVKEFEEKFGVSAAPVMVAGGAVAGGAVAAAEEKTEFDIVLTDGGAKKIEVIKIVRALTGLGLKEAKDAVEQTPSTLKEGVAKAEAEEAKKQLEEAGAKVELK

SEQ ID NO: 54335 - protein, 1378 aa, Campylobacter jejuni
MCDMLDNKLGNRLRVDFSNISKQIEIPNLLQLQKKSFDYFLNLDNGESGIEKVFKSIFPIHDPQNRLSLEYVSSEIGKPKYTIRECMERGLTYSVNLKMKIRLTLHEKDEKTGEKVGVKDIKEQEIYIREIPLMTDRVSFIINGVERVVVNQLHRSPGVIFKEEESSTVANKLVYTAQIIPDRGSWLYFEYDAKDVLYVRINKRRKVPVTMLFRALGYKKQDIIKLFYPIQTIHVKKDKFLTEFNPNDFMDRIEYDIKDEKGKIVHQAGKRLTKKKAEQLIKDGLKWIEYPVEILLNRYLANPIIDKESGEVLFDSLTLLDESKLAKIKEQKSFDIANDLANGVDAAIINSFAQDGETLKLLKQSENIDDENDLAAIRIYKVMRPGEPVVKDAAKAFVNDLFFNPERYDLTKVGRMKMNHKLGLEVPEYVTVLTNEDIIKTAKYLIKVKNGKGHIDDRDHLGNRRIRSIGELLANELHLGLAKMQKAIRDKFTSLNADLDKVMPYDLINPKMITTTIIEFFTGGQLSQFMDQTNPLSEVTHKRRLSALGEGGLVKERAGFEVRDVHATHYGRICPVETPEGQNIGLINTLSTYAKVNELGFVEAPYRKVVNGKVTNEVVYLTATQEEGLFIAPASTKVDAKGNIVEEFVEARQDGETILARREEVQLIDLCSGMVVGVAASLIPFLEHDDANRALMGSNMQRQAVPLLTASAPIVGTGMEQIIARDAWEAVKAKRGGVVEKVDNKSIFILGEDDKGPFIDHYTMEKNLRTNQNTNYIQHPIVKKGDIVKAGQIIADGPSMDQGELAIGKNALIAFMPWNGYNYEDAIVVSERIIREDTFTSVHIYEKEIEARELKDGIEEITKDIPNVKEEDVAHLDESGIAKIGTHIKPGMILVGKVSPKGEVKPTPEERLLRAIFGEKAGHVVNKSLYATASLEGVVVDVKIFTKKGYEKDDRAIKSYDKEKMALEKEHHDRLLMMDREEMLRVCALLSKASLNSDQKIGDKNYKKGQTADISELEKINRFTLTTLIKAYSKEIQKEYDDLKNHFQNEKKKLKAEHDEKLEILEKDDILPSGVIKLVKVYIATKRKLKVGDKMAGRHGNKGIVSTIVPEVDMPYLPNGKSVDIALNPLGVPSRMNIGQILESHLGLVGLRLGDQIQEIFDRKQKDFLKELRAKILEICSIPRLANEKEFIKSLSDEELLNYARDWSKGVKFSTPVFEGVNIEEFSKLFKMAKIDMDGKTELYDGRTGEKIAERVHVGCMYMLKLHHLVDEKVHARSTGPYSLVTQQPVGGKALFGGQRFGEMEVWALEAYGAAHTLREMLTIKSDDVEGRFSAYKALTKGENVPATGIPETFFVLTNELKSLALDVEIFDKDEDNE

SEQ ID NO: 54336 - protein, 1517 aa, Campylobacter jejuni
MSKFKVIEIKEDARPRDFEAFQLRLASPEKIKSWSYGEVKKPETINYRTLKPERDGLFCAKIFGPIRDYECLCGKYKKMRFKGVKCEKCGVEVANSKVRRSRMGHIELVTPVAHIWYVNSLPSRIGTLLGVKMKDLERVLYYEAYIVENPGDAFYDNESTKKVEYCDVLNEEQYQNLMQRYENSGFKARMGGEVVRDLLANLDLVALLNQLKEEMGATNSEAKKKTIIKRLKVVENFLNSNLNANTDSDEAVPNRPEWMMITNLPVLPPDLRPLVALDGGKFAVSDVNDLYRRVINRNTRLKKLMELDAPEIIIRNEKRMLQEAVDALFDNGRRANAVKGANKRPLKSLSEIIKGKQGRFRQNLLGKRVDFSGRSVIVVGPKLRMDQCGLPKKMALELFKPHLLAKLEEKGYATTVKQAKKMIENKTNEVWECLEEVVKGHPVMLNRAPTLHKLSIQAFHPVLVEGKAIQLHPLVCAAFNADFDGDQMAVHVPLSQEAIAECKVLMLSSMNILLPASGKSVTVPSQDMVLGIYYLSLEKAGAKGSHKICTGIDEVMMALESKCLDIHASIQTMVDGRKITTTAGRLIVKSILPDFVPENSWNKVLKKKDIAALVDYVYKQGGLEITASFLDRLKNLGFEYATKAGISISIADIIVPNDKQKAIDEAKKQVREIQNSYNLGLITSGERYNKIIDIWKSTNNVLSKEMMKLVEKDKEGFNSIYMMADSGARGSAAQISQLAAMRGLMTKPDGSIIETPIISNFREGLNVLEYFISTHGARKGLADTALKTANAGYLTRKLIDVAQNVKITIEDCGTHEGVEINEITADSSIIETLEERILGRVLAEDVIDPITNSVLFAEGTLMDEEKAKILGESGIKSVNIRTPITCKAKKGICAKCYGINLGEGKLVKPGEAVGIISAQSIGEPGTQLTLRTFHSGGTASTDLQDRQVSAQKEGFIRFYNLKTYKNKEGKNIVANRRNAAVLLVEPKIKTPFKGVINIENIHEDVIVSIKDKKQEVKYILRKYDLAKPNELAGVSGSIDGKLYLPYQSGMQVEENESIVEVIKEGWNVPNRIPFASEILVEDGEPVVQNIKAGEKGTLKFYILKGDGLDRVKNVKKGDIVKEKGFFVVIADENDREAKRHYIPRESKIEFNDSEKIDDANTIIASAPKKERKVIAEWDAYNNTIIAEIDGVVSFEDIEAGYSADEQIDEATGKRSLVINEYLPSGVRPTLVIAGKGDKAVRYHLEPKTVIFVHDGDKIAQADILAKTPKAAAKSKDITGGLPRVSELFEARKPKNAAVIAEIDGVVRFDKPLRSKERIIIQAEDGTSAEYLIDKSKHIQVRDGEFIHAGEKLTDGVVSSHDVLKILGEKALHYYLISEIQQVYRGQGVVISDKHIEVIVSQMLRQVKVVDSGHTKFIEGDLVSRRKFREENERIIRMGGEPAIAEPVLLGVTRAAIGSDSVISAASFQETTKVLTEASIAGKFDYLEDLKENVILGRMIPVGTGLYGEQNLKLKEQE

SEQ ID NO: 54337 - protein, 390 aa, Campylobacter jejuni
MKMKKIMGYRREDGKFGLRNKVIIIPSVHCANKVCENIARKCNGAVYINHQHGCSQLEFDALQTRDVLIGHGSNANVFGVLIIGLGCEVIQAKAVAEKIKEAMPYKKVEYLVIQECGGSKNTIENGIKIVNEMLESAAKLQKSEGDFSDLILGTECGGSDSYSGLSANPTLGSLSDFVIDEGGAVILAETTELIGCEAILAKRAKNDEIAKKVYDKILAYENLVKSFHADIRGANPSPGNMAGGLSTIEEKSLGCVYKAGTRTLMDVIDYAKPVVSKGLTFMNTPGNDIEQLSAMVAGGANICVFTTGRGTPTGSAIVPTIKMSSNTFCYENMNDAIDINAGSIIDGVKTKEEVRDELIELIVRISDGELVKAELNEQNDFSAWRLATTC

SEQ ID NO: 54338 - protein, 418 aa, Campylobacter jejuni
MTDSKNIKIAIVLVTSLFFLWGVSYGLIDVMNKNFQNHLHISQHESGFLQFAYFGAYFIIALPAGYIANRFSYKMGIIFGLALYAIGALLIIPATNLASFHLFLFAFFILACGIGSLETSANPYMTKLGDEKNASFRINAAQSFNGLGQFVGPIIGGALFLSITKQEEGASKEQIQAALVANMGNVQLVYIGIAVIVILILIAFVANKLPEGSAVSDDYKQKDDSKPIYVFKHRHFNLGLLAQFLYIANQVAAGAFFINYVVEHNEGLKDAQGAYYFSIALVAFMLGRIVSTPLMKIIKGEKILGFYSLINVLICFSLYFASGFFSIVLLIALFFFMSISFPTIFAVATKNLPLNQVKLGGSLLVMSIVGGAIMPIIIGFINDHYGTGAGYLAMAPLFLYVAWYGFIGSKVRKNAKDF

SEQ ID NO: 54339 - protein, 105 aa, Campylobacter jejuni
MQRYGQIIKIKKEKIEEYKELHTKPYEGVCEMIKECNIQNYSIYLFGEYLFAYFEYIGADFEADMAKMARDESTQKWWKVTDPCQISLGYAGQKWLNMEEVFHLD

SEQ ID NO: 54340 - protein, 393 aa, Campylobacter jejuni
MQEQGKTRVLASIEINFTADYMDYTAEWARRYEGEIIQSDRANEHIYLYKSAIGVIGGILPWNFPFFLIARKMAPALLTGNTIVIKPSSETPNNAFEFAKLVSQSSLPKGVFNLVAGKGSVVGYELSSNENIGMVSLTGSVEAGTRVMEAAAKNIIKVSLELGGKAPAIVCKDADIDLAVEAIKASRICNNGQVCNCAERAYVHTSVYDEFVDKFVKAMSKVSVGNTLKGDFDMGPLVNQAGVDNALAMLQRATAKGAIVECGGKITDTSGYYFPASVLTNVKHEDEIMQKEIFAPILPIAKFDTLDEVIDMANDCEYGLTSSIYTQNLDIAMRASREIKFGETYINRENFEAMQGFHAGFRKSGIGGADGKHGLEEYLATHVVYLQYNTNKQ

SEQ ID NO: 54341 - protein, 128 aa, Campylobacter jejuni
MPTINQLVRKERKKVLEKSKSPALKNCPQRRGVCTRVYTTTPKKPNSALRKVAKVRLTSGFEVISYIGGEGHNLQEHSIVLVRGGRVKDLPGVKYHIVRGALDTAGVAKRTVSRSKYGAKRPKAGAAK

SEQ ID NO: 54342 - protein, 156 aa, Campylobacter jejuni
MRRRKAPVREVLPDPIYGNKVITKFINSLMYDGKKSTATTIMYGALEAIDKKGGEKKGIDIFNDAIENIKPLLEVKSRRVGGATYQVPVEVRPARQQALAIRWIISFARKRSERTMIDKLAAELLDAANSKGASFKKKEDTYKMAEANKAFAHYRW

SEQ ID NO: 54343 - protein, 691 aa, Campylobacter jejuni
MSRSTPLKKVRNIGIAAHIDAGKTTTSERILFFTGMSHKIGEVHDGAATMDWMEQEKERGITITSAATTCFWKDHQINLIDTPGHVDFTIEVERSMRVLDGAVAVFCSVGGVQPQSETVWRQANKYGVPRIVFVNKMDRIGANFYNVEDQIRNRLKANPVPLQIPIGAEDNFKGVIDLVTMKALVWEDDTKPTDYVEKEIPAELKEKAEEYRTKMIEAVSETSDELMEKYLGGEELSLEEIKTGIKAGCLSLSIVPMLCGTAFKNKGVQPLLDAVVAYLPAPDEVANIKGEYEDGTEVSVKSTDDGEFAGLAFKIMTDPFVGQLTFVRVYRGCLESGSYAYNSTKDKKERIGRLLKMHSNKREEIKVLYAGEIGAVVGLKDTLTGDTLASEKDKVILERMDFPDPVISVAVEPKTKADQEKMSIALNKLAQEDPSFRVSTDEESGQTIISGMGELHLEIIVDRMLREFKVEAEVGQPQVAYRETIRKTVEQEYKYAKQSGGRGQYGHVFLRLEPLEPGSGYEFVNDIKGGVIPKEYIPAVDKGVQEALQNGVLAGYPVEDVKVTVYDGSYHEVDSSEMAFKLAASMGFKEGARKAGAVILEPMMKVEVETPEDYMGDVIGDLNKRRGQVNSMDERGGNKIITAFCPLAEMFGYSTDLRSQTQGRATYSMEFDHYDEVPKNVADEIIKKRNG

SEQ ID NO: 54344 - protein, 233 aa, Campylobacter jejuni
MSDLITLAQLSQGYRYNSDSLILADFILKQGIKGAVFDVGAGCGIIGILLKKNIANLSLSLIDIQKENIELIEKNLKSNKIQGDIFHDDFNQFQIIKKFDFIVCNPPFYRQGAYKSEDQHKAISKFQEFLPLHSFLAKTNSMLKPNGTLYFCYEALALDEICFILKDMKMKITKLCFVHTHQSKKARLVLIQVKKGSKSPCEILPPFFVYENEILSKQMQEIHLRFRLKSYDI

SEQ ID NO: 54345 - protein, 258 aa, Campylobacter jejuni
MILDKIFEKTKEDLKERKLKLPYDMLGRSLASNPFFPKDVIKALKRVEKEVKIIAEVKKASPSKGVIREDFDPLSIALNYEKNKAAAISVLTEPHFFKGSLEYLSLIRRYTQIPLLRKDFIFDEYQILEALVYGADFVLLIAKMLSMKELKKLLEFARHLGLEALVEIHDKEDLSKAIFAGADIIGINHRNLEDFTMDMSLCEKLIPQIPNSKIIIAESGLENKEFLEHLQNLGVDAFLIGEYFMREKDEGKALKALL

SEQ ID NO: 54346 - protein, 288 aa, Campylobacter jejuni
MKIGIIGLGKMGQNHLNELSKNSHFKLNALFDLCKNPNLNIFDDIFYDDLDKFLNQNNDIIIIATPTNSHLTIAKKVFKQCKCVLIEKPLALNLKEIDEISNLAKEYSIKVGVGFCERFNPAVLALKKELENEEIISINIQRFSPYPQRISDVGILQDLAVHDLDLLCFLSKQEITKTNLLKKYTQDQTRESESIILCGLEKCIASIHQSWNSTQKLRKIHLITKNHFYEANLNDFSLLKDGNFIELTQQSPLFSEHEALLKLIDNQPNHLASTSDAYKVQEILERFA

SEQ ID NO: 54347 - protein, 842 aa, Campylobacter jejuni
MDIRKAYLDFFASKGHEITPSSPLVPDDATLLFTNAGMVPFKSIFTGEIPRPNPPRKTSCQTCIRAGGKHNDLDNVGYTARHHTFFEMLGNFSFGDYFKEQAIAYAWEFVTEVLKLPKDRLYVTVHENDDEAFNLWQKHIQKERIYKFGDKDNFWQMGDTGPCGPCSEIFYDQGQEHFNSSEDYMGGDGDRFLEIWNLVFMQYERSADGVLSPLPKPSIDTGMGLERVTAIKEGKFSNFDSSLFMPIINEISKLCNKTYVYESGASFRVIADHIRSSVFLLAQGVSFDKEGRGYVLRRILRRALRHGYLLGFKQAFMYKLVDVVCDLMGGHYTYLNEKKDFIKEQIRLEEERFLSTIENGIEIFNEELKNTKEIFSGEVAFKLYDTYGFPLDLTADMLREKNLKVDEEKFELFMNEQKARAKASWKGSGDKTASGDFKNLLEKFGENHFVGYEKAECESKILALLDEDFKEVSTLKDAGWVMLENTPFYATSGGQSADSGFIAKREVLDTQKFFNLNLSFIKAGEELKVNDIVHARIDTEKREQIARHHSATHLLHHALREILGSHVSQAGSLVESNKLRFDFTHHKALNKEELESIEKRVNKMIINSSEAILENMPLEEAKKSGAIALFNEKYQGNVRVLTLGESKELCGGTHVKNTAQIGSFYIVKESGVSAGVRRIEAVVSKAALEFVKNQLEELSKVKDELKNNDILSGIKKLKNEILSLKNELKNSSKTELDSKNIQGVEICVKRIDNGDIKAMIDDFKNKFAKAVILLIQVKDEKITLAAGVKDVPLKAGALVKEAAQILGGNGGGRDDFATAGGKDLSKINEALKQSLETIEKAL

SEQ ID NO: 54348 - protein, 643 aa, Campylobacter jejuni
MKILKYIFSFFTLLFITGFIYVAYLFTSADTEGYTFKEYKPPLTTQIYDRNGKLVANIFEQHRFYAPYEELPPRLIEALVAIEDTSFFEHNGVNIDAIFRAAVKIIKSGGKTMEGASTLTQQFIKNTELTPERTIARKIREALLAYKMETILTKEQILERYLNFIFFGHGYYGVKTAALGYFHKNLNELSLKEIAMLVGMPKAPSSYDPTKHLDLSISRANNVISRMYNLGWISKADYDTAIKEIPQVYDDTLTQNAAPYVVDEVIKQLSPNIKDLKTGGYKIILNIDLDVQNMAQNALKFGYDEIVKRDKDANLSTLNGAMVVVNHQSGDVLALVGGVDYEKSNYNRATQSMRQPGSSFKPFVYQVAINLGYSPMSEIADISRIFEGGAGNNEDWKPKNEGGKFLGLITLKEALTRSRNLATINLALDMGLDVLYSKLMEFGFKDIPPNLSIVLGSFGISPLEYSKFYTMFGNYGTIKDPQIIRQVQDKTGKTIMEFNSNERKVSDEAQSFLVLDMMRNVVEKGTGRNARVKDIEIAGKTGTTNKSVDAWFCGLTPEIEAIIWYGNDNNKPMRYTEGGARTAAPVFREFLTQYIEKFPDTTRKFSIPNGVYRGNYKGESAYYTTKSPLPKANMKFNESEIIF

SEQ ID NO: 54349 - protein, 857 aa, Campylobacter jejuni
MANIQDFLTDNMLSNLESAASLAIHSKNNEVVPLHLLWALSVDSTSILNQILNKLNISKEALELEIKSRISKLATSSNVNRENIRFSNELINSLENAKGLMSANGDSYLSVDTWLISESQKSPIKEILAQFLDLREFQKELESLRAGRKMDSKTSDETLDSLNKFGIDLTLKASEGKLDPVIGREEEIERLMQILIRKTKNNPILLGEPGVGKTAIVEALAQRIIKKDVPKSLQNKKVIALDMSALIAGAKYRGEFEDRLKAVVNEVIKSENIILFIDEIHTIVGAGASEGSMDAANILKPALARGELHTIGATTLKEYRKYFEKDAALQRRFQPVNVGEPSVNEALAMLRGIKEKLEIHHNVTINDSALVAAAKLSKRYIADRFLPDKAIDLIDEAAAELKMQIESEPSSLRKVRKDIETLEVENEALKMENDEKNQKRLDEIAKELANLKEKQNALNSQFENEKSVFDGISAKKKEIDLLKNEASLAKARGEFQKAAELEYGKIPSLEKEVEILEDKWKKMSENGVLLKNQVDEDLVAGILSKWTGISVQKMLTSEKQKFLEVEKHLKESVIGQDKALSALARAIKRNKAGLNADNKPIGSFLFLGPTGVGKTQSAKALAKFLFDDEKAMIRFDMSEFMEKHSVSRLLGAPPGYIGHEEGGELTEAVRRKPYSVLLFDEVEKAHKDVFNVLLGILDDGRATDSKGVTVDFKNTIIILTSNIASNAIMNLSGKEQEDAVKNELKNFFKPEFLNRLDDIITFNPLGKDEAYEIVKLLFKDLQMSLENKGIKASLSENAALLIAKDGFDPDFGARPLRRAIYDLIEDKLSDMILADELHENDSIIIDAKDDEIIIKKA

SEQ ID NO: 54350 - protein, 230 aa, Campylobacter jejuni
MIYKKIKALYFWIFFVLSVALVIFCFCFTKSQNTLWKIRKIWAKFQRYTISYKQEIIGTFNPQAQMILMNHQSALDIIALEELYPKNLCWIAKKELGEIPIFKVAMKKPKLLCIDRKNPRDLVRVLKEAKERISEDRVLAIFPEGTRSKNEKMLKFQSGAKILSEKLNLKVQPILIVDSAKILDTKSFSASSGVLKIICMDLVDTNDEKWLENTRKKMQELLDQERAKLC
